United States Patent Application Publication US 2006/0150283 A1 - sequence listing, part 9

SEQ ID NO: 33270 - DNA, 689 bp, Arabidopsis thaliana; identical to SEQ ID NO: 29680
  misc_feature (1)..(689): Ceres Seq. ID no. 12466456
  misc_feature (1)..(689): Ortholog of  Ceres SEQ ID NO 13581656 as cited in SEQ ID NO 59965

SEQ ID NO: 33271 - protein, 179 aa, Arabidopsis thaliana; identical to SEQ ID NO: 29681
  peptide (1)..(179): Ceres Seq. ID no. 12466457

SEQ ID NO: 33272 - protein, 175 aa, Arabidopsis thaliana; identical to SEQ ID NO: 29682
  peptide (1)..(175): Ceres Seq. ID no. 12466458

SEQ ID NO: 33273 - DNA, 908 bp, Arabidopsis thaliana; identical to SEQ ID NO: 29683
  misc_feature (1)..(908): Ceres Seq. ID no. 12333389
  misc_feature (1)..(908): Ortholog of  Ceres SEQ ID NO 15173410 as cited in SEQ ID NO 61812

SEQ ID NO: 33274 - protein, 252 aa, Arabidopsis thaliana; identical to SEQ ID NO: 29684
  peptide (1)..(252): Ceres Seq. ID no. 12333390

SEQ ID NO: 33275 - protein, 246 aa, Arabidopsis thaliana; identical to SEQ ID NO: 29685
  peptide (1)..(246): Ceres Seq. ID no. 12333391

SEQ ID NO: 33276 - protein, 131 aa, Arabidopsis thaliana; identical to SEQ ID NO: 29686
  peptide (1)..(131): Ceres Seq. ID no. 12333392

SEQ ID NO: 33277 - DNA, 1135 bp, Arabidopsis thaliana; identical to SEQ ID NO: 29687
  misc_feature (1)..(1135): Ceres Seq. ID no. 12559930
  misc_feature (1)..(1135): Ortholog of  Ceres SEQ ID NO 15178873 as cited in SEQ ID NO 1103
  misc_feature (1)..(1135): Ortholog of  Ceres SEQ ID NO 15173557 as cited in SEQ ID NO 60031
  misc_feature (1)..(1135): Ortholog of  Ceres SEQ ID NO 13590940 as cited in SEQ ID NO 68653

SEQ ID NO: 33278 - protein, 269 aa, Arabidopsis thaliana; identical to SEQ ID NO: 24385
  peptide (1)..(269): Ceres Seq. ID no. 12559931

SEQ ID NO: 33279 - protein, 253 aa, Arabidopsis thaliana; identical to SEQ ID NO: 24386
  peptide (1)..(253): Ceres Seq. ID no. 12559932

SEQ ID NO: 33280 - protein, 146 aa, Arabidopsis thaliana; identical to SEQ ID NO: 24387
  peptide (1)..(146): Ceres Seq. ID no. 12559933

SEQ ID NO: 33281 - DNA, 684 bp, Arabidopsis thaliana; identical to SEQ ID NO: 24528
  misc_feature (1)..(684): Ceres Seq. ID no. 12332058
  misc_feature (1)..(684): Ortholog of  Ceres SEQ ID NO 14314198 as cited in SEQ ID NO 57472
  misc_feature (1)..(684): Ortholog of  Ceres SEQ ID NO 15174264 as cited in SEQ ID NO 61877

SEQ ID NO: 33282 - protein, 172 aa, Arabidopsis thaliana; identical to SEQ ID NO: 24529
  peptide (1)..(172): Ceres Seq. ID no. 12332059

SEQ ID NO: 33283 - protein, 151 aa, Arabidopsis thaliana; identical to SEQ ID NO: 24530
  peptide (1)..(151): Ceres Seq. ID no. 12332060

SEQ ID NO: 33284 - DNA, 812 bp, Arabidopsis thaliana; identical to SEQ ID NO: 29694
  misc_feature (1)..(812): Ceres Seq. ID no. 12321339
  misc_feature (1)..(812): Ortholog of  Ceres SEQ ID NO 13583358 as cited in SEQ ID NO 62221
  misc_feature (1)..(812): Ortholog of  Ceres SEQ ID NO 15179036 as cited in SEQ ID NO 0

SEQ ID NO: 33285 - protein, 218 aa, Arabidopsis thaliana; identical to SEQ ID NO: 29695
  peptide (1)..(218): Ceres Seq. ID no. 12321340

SEQ ID NO: 33286 - protein, 201 aa, Arabidopsis thaliana; identical to SEQ ID NO: 29696
  peptide (1)..(201): Ceres Seq. ID no. 12321341

SEQ ID NO: 33287 - protein, 199 aa, Arabidopsis thaliana; identical to SEQ ID NO: 29697
  peptide (1)..(199): Ceres Seq. ID no. 12321342

SEQ ID NO: 33288 - DNA, 1112 bp, Arabidopsis thaliana; identical to SEQ ID NO: 29698
  misc_feature (1)..(1112): Ceres Seq. ID no. 12421015
  misc_feature (1)..(1112): Ortholog of  Ceres SEQ ID NO 14304678 as cited in SEQ ID NO 53747

SEQ ID NO: 33289 - protein, 331 aa, Arabidopsis thaliana; identical to SEQ ID NO: 29699
  peptide (1)..(331): Ceres Seq. ID no. 12421016

SEQ ID NO: 33290 - protein, 329 aa, Arabidopsis thaliana; identical to SEQ ID NO: 29700
  peptide (1)..(329): Ceres Seq. ID no. 12421017

SEQ ID NO: 33291 - protein, 192 aa, Arabidopsis thaliana; identical to SEQ ID NO: 29701
  peptide (1)..(192): Ceres Seq. ID no. 12421018

SEQ ID NO: 33292 - DNA, 772 bp, Arabidopsis thaliana; identical to SEQ ID NO: 29702
  misc_feature (1)..(772): Ceres Seq. ID no. 12332756
  misc_feature (1)..(772): Ortholog of  Ceres SEQ ID NO 12563476 as cited in SEQ ID NO 53763

SEQ ID NO: 33293 - protein, 205 aa, Arabidopsis thaliana; identical to SEQ ID NO: 29703
  peptide (1)..(205): Ceres Seq. ID no. 12332757

SEQ ID NO: 33294 - protein, 193 aa, Arabidopsis thaliana; identical to SEQ ID NO: 29704
  peptide (1)..(193): Ceres Seq. ID no. 12332758

SEQ ID NO: 33295 - protein, 181 aa, Arabidopsis thaliana; identical to SEQ ID NO: 29705
  peptide (1)..(181): Ceres Seq. ID no. 12332759

SEQ ID NO: 33296 - DNA, 748 bp, Arabidopsis thaliana; identical to SEQ ID NO: 29706
  misc_feature (1)..(748): Ceres Seq. ID no. 13486683
  misc_feature (1)..(748): Ortholog of  Ceres SEQ ID NO 13583412 as cited in SEQ ID NO 62624

SEQ ID NO: 33297 - protein, 183 aa, Arabidopsis thaliana; identical to SEQ ID NO: 29707
  peptide (1)..(183): Ceres Seq. ID no. 13486684

SEQ ID NO: 33298 - protein, 182 aa, Arabidopsis thaliana; identical to SEQ ID NO: 29708
  peptide (1)..(182): Ceres Seq. ID no. 13486685

SEQ ID NO: 33299 - protein, 109 aa, Arabidopsis thaliana; identical to SEQ ID NO: 29709
  peptide (1)..(109): Ceres Seq. ID no. 13486686

SEQ ID NO: 33300 - DNA, 1417 bp, Arabidopsis thaliana; identical to SEQ ID NO: 29710
  misc_feature (1)..(1417): Ceres Seq. ID no. 12336041
  misc_feature (1)..(1417): Ortholog of  Ceres SEQ ID NO 14303843 as cited in SEQ ID NO 53775
  misc_feature (1)..(1417): Ortholog of  Ceres SEQ ID NO 15179800 as cited in SEQ ID NO 58215
  misc_feature (1)..(1417): Ortholog of  Ceres SEQ ID NO 13654549 as cited in SEQ ID NO 68530

SEQ ID NO: 33301 - protein, 381 aa, Arabidopsis thaliana; identical to SEQ ID NO: 29711
  peptide (1)..(381): Ceres Seq. ID no. 12336042

SEQ ID NO: 33302 - protein, 365 aa, Arabidopsis thaliana; identical to SEQ ID NO: 29712
  peptide (1)..(365): Ceres Seq. ID no. 12336043

SEQ ID NO: 33303 - protein, 191 aa, Arabidopsis thaliana; identical to SEQ ID NO: 29713
  peptide (1)..(191): Ceres Seq. ID no. 12336044

SEQ ID NO: 33304 - DNA, 832 bp, Arabidopsis thaliana; identical to SEQ ID NO: 29714
  misc_feature (1)..(832): Ceres Seq. ID no. 13491488
  misc_feature (1)..(832): Ortholog of  Ceres SEQ ID NO 13584593 as cited in SEQ ID NO 65340

SEQ ID NO: 33305 - protein, 227 aa, Arabidopsis thaliana; identical to SEQ ID NO: 29715
  peptide (1)..(227): Ceres Seq. ID no. 13491489

SEQ ID NO: 33306 - protein, 213 aa, Arabidopsis thaliana; identical to SEQ ID NO: 29716
  peptide (1)..(213): Ceres Seq. ID no. 13491490

SEQ ID NO: 33307 - DNA, 720 bp, Arabidopsis thaliana; identical to SEQ ID NO: 29717
  misc_feature (1)..(720): Ceres Seq. ID no. 12329948
  misc_feature (1)..(720): Ortholog of  Ceres SEQ ID NO 15168856 as cited in SEQ ID NO 56354

SEQ ID NO: 33308 - protein, 196 aa, Arabidopsis thaliana; identical to SEQ ID NO: 29718
  peptide (1)..(196): Ceres Seq. ID no. 12329949

SEQ ID NO: 33309 - protein, 180 aa, Arabidopsis thaliana; identical to SEQ ID NO: 29719
  peptide (1)..(180): Ceres Seq. ID no. 12329950

SEQ ID NO: 33310 - protein, 179 aa, Arabidopsis thaliana; identical to SEQ ID NO: 29720
  peptide (1)..(179): Ceres Seq. ID no. 12329951

SEQ ID NO: 33311 - DNA, 812 bp, Arabidopsis thaliana; identical to SEQ ID NO: 29721
  misc_feature (1)..(812): Ceres Seq. ID no. 12332051
  misc_feature (1)..(812): Ortholog of  Ceres SEQ ID NO 13594705 as cited in SEQ ID NO 52034

SEQ ID NO: 33312 - protein, 167 aa, Arabidopsis thaliana; identical to SEQ ID NO: 29722
  peptide (1)..(167): Ceres Seq. ID no. 12332052

SEQ ID NO: 33313 - DNA, 1127 bp, Arabidopsis thaliana; identical to SEQ ID NO: 29723
  misc_feature (1)..(1127): Ceres Seq. ID no. 12348491
  misc_feature (1)..(1127): Ortholog of  Ceres SEQ ID NO 14315060 as cited in SEQ ID NO 60039
  misc_feature (1)..(1127): Ortholog of  Ceres SEQ ID NO 13597809 as cited in SEQ ID NO 64598
  misc_feature (1)..(1127): Ortholog of  Ceres SEQ ID NO 12617960 as cited in SEQ ID NO 69051
  misc_feature (1)..(1127): Ortholog of  Ceres SEQ ID NO 13589401 as cited in SEQ ID NO 0

SEQ ID NO: 33314 - protein, 247 aa, Arabidopsis thaliana; identical to SEQ ID NO: 29724
  peptide (1)..(247): Ceres Seq. ID no. 12348492

SEQ ID NO: 33315 - protein, 170 aa, Arabidopsis thaliana; identical to SEQ ID NO: 29725
  peptide (1)..(170): Ceres Seq. ID no. 12348493

SEQ ID NO: 33316 - protein, 142 aa, Arabidopsis thaliana; identical to SEQ ID NO: 29726
  peptide (1)..(142): Ceres Seq. ID no. 12348494

SEQ ID NO: 33317 - DNA, 1076 bp, Arabidopsis thaliana; identical to SEQ ID NO: 22642
  misc_feature (1)..(1076): Ceres Seq. ID no. 13588829
  misc_feature (1)..(1076): Ortholog of  Ceres SEQ ID NO 14313662 as cited in SEQ ID NO 54162
  misc_feature (1)..(1076): Ortholog of  Ceres SEQ ID NO 14302123 as cited in SEQ ID NO 0
  misc_feature (1)..(1076): Ortholog of  Ceres SEQ ID NO 15179452 as cited in SEQ ID NO 0

SEQ ID NO: 33318 - protein, 250 aa, Arabidopsis thaliana [sequence omitted]

SEQ ID NO: 33319 - protein, 207 aa, Arabidopsis thaliana; identical to SEQ ID NO: 22644
  peptide (1)..(207): Ceres Seq. ID no. 15220913

SEQ ID NO: 33320 - DNA, 873 bp, Arabidopsis thaliana; identical to SEQ ID NO: 29730
  misc_feature (1)..(873): Ceres Seq. ID no. 12369966
  misc_feature (1)..(873): Ortholog of  Ceres SEQ ID NO 15171239 as cited in SEQ ID NO 52298

SEQ ID NO: 33321 - protein, 192 aa, Arabidopsis thaliana; identical to SEQ ID NO: 29731
  peptide (1)..(192): Ceres Seq. ID no. 12369967

SEQ ID NO: 33322 - DNA, 1347 bp, Arabidopsis thaliana; identical to SEQ ID NO: 29732
  misc_feature (1)..(1347): Ceres Seq. ID no. 12371997
  misc_feature (1)..(1347): Ortholog of  Ceres SEQ ID NO 14304148 as cited in SEQ ID NO 57313
  misc_feature (1)..(1347): Ortholog of  Ceres SEQ ID NO 13598513 as cited in SEQ ID NO 64102
  misc_feature (1)..(1347): Ortholog of  Ceres SEQ ID NO 14302224 as cited in SEQ ID NO 64268

SEQ ID NO: 33323 - protein, 383 aa, Arabidopsis thaliana; identical to SEQ ID NO: 29733
  peptide (1)..(383): Ceres Seq. ID no. 12371998

SEQ ID NO: 33324 - protein, 382 aa, Arabidopsis thaliana; identical to SEQ ID NO: 29734
  peptide (1)..(382): Ceres Seq. ID no. 12371999

SEQ ID NO: 33325 - protein, 368 aa, Arabidopsis thaliana; identical to SEQ ID NO: 29735
  peptide (1)..(368): Ceres Seq. ID no. 12372000

SEQ ID NO: 33326 - DNA, 1059 bp, Arabidopsis thaliana; identical to SEQ ID NO: 29736
  misc_feature (1)..(1059): Ceres Seq. ID no. 12396829
  misc_feature (1)..(1059): Ortholog of  Ceres SEQ ID NO 12472003 as cited in SEQ ID NO 143

SEQ ID NO: 33327 - protein, 281 aa, Arabidopsis thaliana; identical to SEQ ID NO: 29737
  peptide (1)..(281): Ceres Seq. ID no. 12396830

SEQ ID NO: 33328 - protein, 260 aa, Arabidopsis thaliana; identical to SEQ ID NO: 29738
  peptide (1)..(260): Ceres Seq. ID no. 12396831

SEQ ID NO: 33329 - protein, 223 aa, Arabidopsis thaliana; identical to SEQ ID NO: 29739
  peptide (1)..(223): Ceres Seq. ID no. 12396832

SEQ ID NO: 33330 - DNA, 976 bp, Arabidopsis thaliana; identical to SEQ ID NO: 29740
  misc_feature (1)..(976): Ceres Seq. ID no. 12322294
  misc_feature (1)..(976): Ortholog of  Ceres SEQ ID NO 15173410 as cited in SEQ ID NO 61812

SEQ ID NO: 33331 - protein, 251 aa, Arabidopsis thaliana; identical to SEQ ID NO: 29741
  peptide (1)..(251): Ceres Seq. ID no. 12322295

SEQ ID NO: 33332 - protein, 239 aa, Arabidopsis thaliana; identical to SEQ ID NO: 29742
  peptide (1)..(239): Ceres Seq. ID no. 12322296

SEQ ID NO: 33333 - DNA, 1153 bp, Arabidopsis thaliana; identical to SEQ ID NO: 29743
  misc_feature (1)..(1153): Ceres Seq. ID no. 13497626
  misc_feature (1)..(1153): Ortholog of  Ceres SEQ ID NO 13639102 as cited in SEQ ID NO 56610

SEQ ID NO: 33334 - protein, 293 aa, Arabidopsis thaliana; identical to SEQ ID NO: 29744
  peptide (1)..(293): Ceres Seq. ID no. 13497627

SEQ ID NO: 33335 - protein, 249 aa, Arabidopsis thaliana; identical to SEQ ID NO: 29745
  peptide (1)..(249): Ceres Seq. ID no. 13497628

SEQ ID NO: 33336 - protein, 243 aa, Arabidopsis thaliana; identical to SEQ ID NO: 29746
  peptide (1)..(243): Ceres Seq. ID no. 13497629

SEQ ID NO: 33337 - DNA, 946 bp, Arabidopsis thaliana; identical to SEQ ID NO: 26202
  misc_feature (1)..(946): Ceres Seq. ID no. 13487250
  misc_feature (1)..(946): Ortholog of  Ceres SEQ ID NO 13597542 as cited in SEQ ID NO 64986

SEQ ID NO: 33338 - protein, 223 aa, Arabidopsis thaliana; identical to SEQ ID NO: 26203
  peptide (1)..(223): Ceres Seq. ID no. 13487251

SEQ ID NO: 33339 - protein, 201 aa, Arabidopsis thaliana; identical to SEQ ID NO: 26204
  peptide (1)..(201): Ceres Seq. ID no. 13487252

SEQ ID NO: 33340 - protein, 199 aa, Arabidopsis thaliana; identical to SEQ ID NO: 26205
  peptide (1)..(199): Ceres Seq. ID no. 13487253

SEQ ID NO: 33341 - DNA, 1151 bp, Arabidopsis thaliana; identical to SEQ ID NO: 29751
  misc_feature (1)..(1151): Ceres Seq. ID no. 13490670
  misc_feature (1)..(1151): Ortholog of  Ceres SEQ ID NO 12582601 as cited in SEQ ID NO 51064
  misc_feature (1)..(1151): Ortholog of  Ceres SEQ ID NO 13581092 as cited in SEQ ID NO 54771
  misc_feature (1)..(1151): Ortholog of  Ceres SEQ ID NO 13594298 as cited in SEQ ID NO 57803
  misc_feature (1)..(1151): Ortholog of  Ceres SEQ ID NO 13503476 as cited in SEQ ID NO 61978
  misc_feature (1)..(1151): Ortholog of  Ceres SEQ ID NO 12578438 as cited in SEQ ID NO 62201
  misc_feature (1)..(1151): Ortholog of  Ceres SEQ ID NO 12617675 as cited in SEQ ID NO 64656

SEQ ID NO: 33342 - protein, 296 aa, Arabidopsis thaliana; identical to SEQ ID NO: 29752
  peptide (1)..(296): Ceres Seq. ID no. 13490671

SEQ ID NO: 33343 - protein, 286 aa, Arabidopsis thaliana; identical to SEQ ID NO: 29753
  peptide (1)..(286): Ceres Seq. ID no. 13490672

SEQ ID NO: 33344 - protein, 281 aa, Arabidopsis thaliana; identical to SEQ ID NO: 29754
  peptide (1)..(281): Ceres Seq. ID no. 13490673

SEQ ID NO: 33345 - DNA, 1176 bp, Arabidopsis thaliana; identical to SEQ ID NO: 29755
  misc_feature (1)..(1176): Ceres Seq. ID no. 13487542
  misc_feature (1)..(1176): Ortholog of  Ceres SEQ ID NO 13586635 as cited in SEQ ID NO 14217
  misc_feature (1)..(1176): Ortholog of  Ceres SEQ ID NO 15170220 as cited in SEQ ID NO 55383
  misc_feature (1)..(1176): Ortholog of  Ceres SEQ ID NO 14304198 as cited in SEQ ID NO 56479
  misc_feature (1)..(1176): Ortholog of  Ceres SEQ ID NO 14316543 as cited in SEQ ID NO 57118
  misc_feature (1)..(1176): Ortholog of  Ceres SEQ ID NO 12616285 as cited in SEQ ID NO 63483

SEQ ID NO: 33346 - protein, 324 aa, Arabidopsis thaliana; identical to SEQ ID NO: 29756
  peptide (1)..(324): Ceres Seq. ID no. 13487543

SEQ ID NO: 33347 - protein, 309 aa, Arabidopsis thaliana; identical to SEQ ID NO: 29757
  peptide (1)..(309): Ceres Seq. ID no. 13487544

SEQ ID NO: 33348 - protein, 213 aa, Arabidopsis thaliana; identical to SEQ ID NO: 29758
  peptide (1)..(213): Ceres Seq. ID no. 13487545

SEQ ID NO: 33349 - DNA, 1215 bp, Arabidopsis thaliana; identical to SEQ ID NO: 29759
  misc_feature (1)..(1215): Ceres Seq. ID no. 12339760
  misc_feature (1)..(1215): Ortholog of  Ceres SEQ ID NO 13593963 as cited in SEQ ID NO 59580

SEQ ID NO: 33350 - protein, 360 aa, Arabidopsis thaliana; identical to SEQ ID NO: 29760
  peptide (1)..(360): Ceres Seq. ID no. 12339761

SEQ ID NO: 33351 - protein, 357 aa, Arabidopsis thaliana; identical to SEQ ID NO: 29761
  peptide (1)..(357): Ceres Seq. ID no. 12339762

SEQ ID NO: 33352 - protein, 312 aa, Arabidopsis thaliana; identical to SEQ ID NO: 29762
  peptide (1)..(312): Ceres Seq. ID no. 12339763

SEQ ID NO: 33353 - DNA, 1168 bp, Arabidopsis thaliana; identical to SEQ ID NO: 29763
  misc_feature (1)..(1168): Ceres Seq. ID no. 12396040
  misc_feature (1)..(1168): Ortholog of  Ceres SEQ ID NO 14316095 as cited in SEQ ID NO 52477

SEQ ID NO: 33354 - protein, 378 aa, Arabidopsis thaliana; identical to SEQ ID NO: 29764
  peptide (1)..(378): Ceres Seq. ID no. 12396041

SEQ ID NO: 33355 - protein, 363 aa, Arabidopsis thaliana; identical to SEQ ID NO: 29765
  peptide (1)..(363): Ceres Seq. ID no. 12396042

SEQ ID NO: 33356 - protein, 215 aa, Arabidopsis thaliana; identical to SEQ ID NO: 29766
  peptide (1)..(215): Ceres Seq. ID no. 12396043

SEQ ID NO: 33357 - DNA, 1401 bp, Arabidopsis thaliana; identical to SEQ ID NO: 29767
  misc_feature (1)..(1401): Ceres Seq. ID no. 12422582
  misc_feature (1)..(1401): Ortholog of  Ceres SEQ ID NO 15179955 as cited in SEQ ID NO 0

SEQ ID NO: 33358 - protein, 288 aa, Arabidopsis thaliana; identical to SEQ ID NO: 29768
  peptide (1)..(288): Ceres Seq. ID no. 12422583

SEQ ID NO: 33359 - protein, 191 aa, Arabidopsis thaliana; identical to SEQ ID NO: 29769
  peptide (1)..(191): Ceres Seq. ID no. 12422584

SEQ ID NO: 33360 - protein, 187 aa, Arabidopsis thaliana; identical to SEQ ID NO: 29770
  peptide (1)..(187): Ceres Seq. ID no. 12422585

SEQ ID NO: 33361 - DNA, 1107 bp, Arabidopsis thaliana; identical to SEQ ID NO: 29771
  misc_feature (1)..(1107): Ceres Seq. ID no. 12396806
  misc_feature (1)..(1107): Ortholog of  Ceres SEQ ID NO 15170617 as cited in SEQ ID NO 52614

SEQ ID NO: 33362 - protein, 273 aa, Arabidopsis thaliana; identical to SEQ ID NO: 29772
  peptide (1)..(273): Ceres Seq. ID no. 12396807

SEQ ID NO: 33363 - protein, 260 aa, Arabidopsis thaliana; identical to SEQ ID NO: 29773
  peptide (1)..(260): Ceres Seq. ID no. 12396808

SEQ ID NO: 33364 - protein, 238 aa, Arabidopsis thaliana; identical to SEQ ID NO: 29774
  peptide (1)..(238): Ceres Seq. ID no. 12396809

SEQ ID NO: 33365 - DNA, 1016 bp, Arabidopsis thaliana; identical to SEQ ID NO: 29775
  misc_feature (1)..(1016): Ceres Seq. ID no. 12321335
  misc_feature (1)..(1016): Ortholog of  Ceres SEQ ID NO 14304124 as cited in SEQ ID NO 56378
  misc_feature (1)..(1016): Ortholog of  Ceres SEQ ID NO 12585331 as cited in SEQ ID NO 62912
  misc_feature (1)..(1016): Ortholog of  Ceres SEQ ID NO 13654964 as cited in SEQ ID NO 63176

SEQ ID NO: 33366 - protein, 256 aa, Arabidopsis thaliana; identical to SEQ ID NO: 29776
  peptide (1)..(256): Ceres Seq. ID no. 12321336

SEQ ID NO: 33367 - protein, 245 aa, Arabidopsis thaliana; identical to SEQ ID NO: 29777
  peptide (1)..(245): Ceres Seq. ID no. 12321337

SEQ ID NO: 33368 - protein, 230 aa, Arabidopsis thaliana; identical to SEQ ID NO: 29778
  peptide (1)..(230): Ceres Seq. ID no. 12321338

SEQ ID NO: 33369 - DNA, 1957 bp, Arabidopsis thaliana; identical to SEQ ID NO: 29779
  misc_feature (1)..(1957): Ceres Seq. ID no. 12396656
  misc_feature (1)..(1957): Ortholog of  Ceres SEQ ID NO 13582783 as cited in SEQ ID NO 67821

SEQ ID NO: 33370 - protein, 527 aa, Arabidopsis thaliana; identical to SEQ ID NO: 29780
  peptide (1)..(527): Ceres Seq. ID no. 12396657

SEQ ID NO: 33371 - protein, 486 aa, Arabidopsis thaliana; identical to SEQ ID NO: 29781
  peptide (1)..(486): Ceres Seq. ID no. 12396658

SEQ ID NO: 33372 - protein, 456 aa, Arabidopsis thaliana; identical to SEQ ID NO: 29782
  peptide (1)..(456): Ceres Seq. ID no. 12396659

SEQ ID NO: 33373 - DNA, 897 bp, Arabidopsis thaliana; identical to SEQ ID NO: 29783
  misc_feature (1)..(897): Ceres Seq. ID no. 12321699
  misc_feature (1)..(897): Ortholog of  Ceres SEQ ID NO 12627139 as cited in SEQ ID NO 64036

SEQ ID NO: 33374 - protein, 237 aa, Arabidopsis thaliana; identical to SEQ ID NO: 29784
  peptide (1)..(237): Ceres Seq. ID no. 12321700

SEQ ID NO: 33375 - protein, 215 aa, Arabidopsis thaliana; identical to SEQ ID NO: 29785
  peptide (1)..(215): Ceres Seq. ID no. 12321701

SEQ ID NO: 33376 - DNA, 1590 bp, Arabidopsis thaliana; identical to SEQ ID NO: 29786
  misc_feature (1)..(1590): Ceres Seq. ID no. 12422847
  misc_feature (1)..(1590): Ortholog of  Ceres SEQ ID NO 14303831 as cited in SEQ ID NO 52976
  misc_feature (1)..(1590): Ortholog of  Ceres SEQ ID NO 12619453 as cited in SEQ ID NO 65952

SEQ ID NO: 33377 - protein, 367 aa, Arabidopsis thaliana; identical to SEQ ID NO: 29787
  peptide (1)..(367): Ceres Seq. ID no. 12422848

SEQ ID NO: 33378 - protein, 293 aa, Arabidopsis thaliana; identical to SEQ ID NO: 29788
  peptide (1)..(293): Ceres Seq. ID no. 12422849

SEQ ID NO: 33379 - protein, 272 aa, Arabidopsis thaliana; identical to SEQ ID NO: 29789
  peptide (1)..(272): Ceres Seq. ID no. 12422850

SEQ ID NO: 33380 - DNA, 1825 bp, Arabidopsis thaliana; identical to SEQ ID NO: 29790
  misc_feature (1)..(1825): Ceres Seq. ID no. 12738746
  misc_feature (1)..(1825): Ortholog of  Ceres SEQ ID NO 14303324 as cited in SEQ ID NO 54563
  misc_feature (1)..(1825): Ortholog of  Ceres SEQ ID NO 13582184 as cited in SEQ ID NO 56002
  misc_feature (1)..(1825): Ortholog of  Ceres SEQ ID NO 14308575 as cited in SEQ ID NO 58782
  misc_feature (1)..(1825): Ortholog of  Ceres SEQ ID NO 15227042 as cited in SEQ ID NO 0

SEQ ID NO: 33381 - protein, 345 aa, Arabidopsis thaliana; identical to SEQ ID NO: 29791
  peptide (1)..(345): Ceres Seq. ID no. 12738747

SEQ ID NO: 33382 - protein, 227 aa, Arabidopsis thaliana; identical to SEQ ID NO: 29792
  peptide (1)..(227): Ceres Seq. ID no. 12738748

SEQ ID NO: 33383 - protein, 197 aa, Arabidopsis thaliana; identical to SEQ ID NO: 29793
  peptide (1)..(197): Ceres Seq. ID no. 12738749

SEQ ID NO: 33384 - DNA, 852 bp, Arabidopsis thaliana; identical to SEQ ID NO: 29794
  misc_feature (1)..(852): Ceres Seq. ID no. 12332047
  misc_feature (1)..(852): Ortholog of  Ceres SEQ ID NO 13581670 as cited in SEQ ID NO 57766

SEQ ID NO: 33385 - protein, 133 aa, Arabidopsis thaliana; identical to SEQ ID NO: 29795
  peptide (1)..(133): Ceres Seq. ID no. 12332048

SEQ ID NO: 33386 - protein, 93 aa, Arabidopsis thaliana; identical to SEQ ID NO: 29796
  peptide (1)..(93): Ceres Seq. ID no. 12332049

SEQ ID NO: 33387 - protein, 66 aa, Arabidopsis thaliana; identical to SEQ ID NO: 29797
  peptide (1)..(66): Ceres Seq. ID no. 12332050

SEQ ID NO: 33388 - DNA, 912 bp, Arabidopsis thaliana; identical to SEQ ID NO: 29798
  misc_feature (1)..(912): Ceres Seq. ID no. 12333050
  misc_feature (1)..(912): Ortholog of  Ceres SEQ ID NO 12619999 as cited in SEQ ID NO 66123
  misc_feature (1)..(912): Ortholog of  Ceres SEQ ID NO 13656436 as cited in SEQ ID NO 69154

SEQ ID NO: 33389 - protein, 219 aa, Arabidopsis thaliana; identical to SEQ ID NO: 29799
  peptide (1)..(219): Ceres Seq. ID no. 12333051

SEQ ID NO: 33390 - protein, 166 aa, Arabidopsis thaliana; identical to SEQ ID NO: 29800
  peptide (1)..(166): Ceres Seq. ID no. 12333052

SEQ ID NO: 33391 - DNA, 594 bp, Arabidopsis thaliana; identical to SEQ ID NO: 29801
  misc_feature (1)..(594): Ceres Seq. ID no. 12333048
  misc_feature (1)..(594): Ortholog of  Ceres SEQ ID NO 14302474 as cited in SEQ ID NO 60589

SEQ ID NO: 33392 - protein, 103 aa, Arabidopsis thaliana; identical to SEQ ID NO: 7737
  peptide (1)..(103): Ceres Seq. ID no. 12333049

SEQ ID NO: 33393 - DNA, 1136 bp, Arabidopsis thaliana; identical to SEQ ID NO: 29803
  misc_feature (1)..(1136): Ceres Seq. ID no. 12330223
  misc_feature (1)..(1136): Ortholog of  Ceres SEQ ID NO 13594163 as cited in SEQ ID NO 60426

SEQ ID NO: 33394 - protein, 343 aa, Arabidopsis thaliana; identical to SEQ ID NO: 29804
  peptide (1)..(343): Ceres Seq. ID no. 12330224

SEQ ID NO: 33395 - protein, 300 aa, Arabidopsis thaliana; identical to SEQ ID NO: 29805
  peptide (1)..(300): Ceres Seq. ID no. 12330225

SEQ ID NO: 33396 - protein, 186 aa, Arabidopsis thaliana; identical to SEQ ID NO: 29806
  peptide (1)..(186): Ceres Seq. ID no. 12330226

SEQ ID NO: 33397 - DNA, 820 bp, Arabidopsis thaliana; identical to SEQ ID NO: 29807
  misc_feature (1)..(820): Ceres Seq. ID no. 13490245
  misc_feature (1)..(820): Ortholog of  Ceres SEQ ID NO 12613614 as cited in SEQ ID NO 68243
  misc_feature (1)..(820): Ortholog of  Ceres SEQ ID NO 12556636 as cited in SEQ ID NO 0
  misc_feature (1)..(820): Ortholog of  Ceres SEQ ID NO 13600066 as cited in SEQ ID NO 0
  misc_feature (1)..(820): Ortholog of  Ceres SEQ ID NO 15179946 as cited in SEQ ID NO 0

SEQ ID NO: 33398 - protein, 173 aa, Arabidopsis thaliana; identical to SEQ ID NO: 29808
  peptide (1)..(173): Ceres Seq. ID no. 13490246

SEQ ID NO: 33399 - protein, 137 aa, Arabidopsis thaliana; identical to SEQ ID NO: 29809
  peptide (1)..(137): Ceres Seq. ID no. 13490247

SEQ ID NO: 33400 - protein, 100 aa, Arabidopsis thaliana; identical to SEQ ID NO: 29810
  peptide (1)..(100): Ceres Seq. ID no. 13490248

SEQ ID NO: 33401 - DNA, 1026 bp, Arabidopsis thaliana; identical to SEQ ID NO: 29811
  misc_feature (1)..(1026): Ceres Seq. ID no. 13495944
  misc_feature (1)..(1026): Ortholog of  Ceres SEQ ID NO 15168868 as cited in SEQ ID NO 58303

SEQ ID NO: 33402 - protein, 232 aa, Arabidopsis thaliana; identical to SEQ ID NO: 29812
  peptide (1)..(232): Ceres Seq. ID no. 13495945

SEQ ID NO: 33403 - protein, 222 aa, Arabidopsis thaliana; identical to SEQ ID NO: 29813
  peptide (1)..(222): Ceres Seq. ID no. 13495946

SEQ ID NO: 33404 - protein, 207 aa, Arabidopsis thaliana; identical to SEQ ID NO: 29814
  peptide (1)..(207): Ceres Seq. ID no. 13495947

SEQ ID NO: 33405 - DNA, 873 bp, Arabidopsis thaliana; identical to SEQ ID NO: 21755
  misc_feature (1)..(873): Ceres Seq. ID no. 13497760
  misc_feature (1)..(873): Ortholog of  Ceres SEQ ID NO 14306406 as cited in SEQ ID NO 1412
  misc_feature (1)..(873): Ortholog of  Ceres SEQ ID NO 15178824 as cited in SEQ ID NO 0

SEQ ID NO: 33406 - protein, 200 aa, Arabidopsis thaliana; identical to SEQ ID NO: 21756
  peptide (1)..(200): Ceres Seq. ID no. 13497761

SEQ ID NO: 33407 - protein, 175 aa, Arabidopsis thaliana; identical to SEQ ID NO: 21757
  peptide (1)..(175): Ceres Seq. ID no. 13497762

SEQ ID NO: 33408 - DNA, 608 bp, Arabidopsis thaliana; identical to SEQ ID NO: 29818
  misc_feature (1)..(608): Ceres Seq. ID no. 12397109
  misc_feature (1)..(608): Ortholog of  Ceres SEQ ID NO 13661089 as cited in SEQ ID NO 61053

SEQ ID NO: 33409 - protein, 150 aa, Arabidopsis thaliana; identical to SEQ ID NO: 29819
  peptide (1)..(150): Ceres Seq. ID no. 12397110

SEQ ID NO: 33410 - protein, 143 aa, Arabidopsis thaliana; identical to SEQ ID NO: 29820
  peptide (1)..(143): Ceres Seq. ID no. 12397111

SEQ ID NO: 33411 - protein, 110 aa, Arabidopsis thaliana; identical to SEQ ID NO: 29821
  peptide (1)..(110): Ceres Seq. ID no. 12397112

SEQ ID NO: 33412 - DNA, 971 bp, Arabidopsis thaliana; identical to SEQ ID NO: 29822
  misc_feature (1)..(971): Ceres Seq. ID no. 12372139
  misc_feature (1)..(971): Ortholog of  Ceres SEQ ID NO 13597524 as cited in SEQ ID NO 64782

SEQ ID NO: 33413 - protein, 263 aa, Arabidopsis thaliana; identical to SEQ ID NO: 29823
  peptide (1)..(263): Ceres Seq. ID no. 12372140

SEQ ID NO: 33414 - protein, 255 aa, Arabidopsis thaliana; identical to SEQ ID NO: 29824
  peptide (1)..(255): Ceres Seq. ID no. 12372141

SEQ ID NO: 33415 - protein, 163 aa, Arabidopsis thaliana; identical to SEQ ID NO: 29825
  peptide (1)..(163): Ceres Seq. ID no. 12372142

SEQ ID NO: 33416 - DNA, 1717 bp, Arabidopsis thaliana; identical to SEQ ID NO: 29826
  misc_feature (1)..(1717): Ceres Seq. ID no. 12423026
  misc_feature (1)..(1717): Ortholog of  Ceres SEQ ID NO 14314896 as cited in SEQ ID NO 54010
  misc_feature (1)..(1717): Ortholog of  Ceres SEQ ID NO 13655744 as cited in SEQ ID NO 64032

SEQ ID NO: 33417 - protein, 449 aa, Arabidopsis thaliana; identical to SEQ ID NO: 27284
  peptide (1)..(449): Ceres Seq. ID no. 12423027

SEQ ID NO: 33418 - protein, 401 aa, Arabidopsis thaliana; identical to SEQ ID NO: 21437
  peptide (1)..(401): Ceres Seq. ID no. 12423028

SEQ ID NO: 33419 - protein, 348 aa, Arabidopsis thaliana; identical to SEQ ID NO: 21438
  peptide (1)..(348): Ceres Seq. ID no. 12423029

SEQ ID NO: 33420 - DNA, 2004 bp, Arabidopsis thaliana; identical to SEQ ID NO: 29830
  misc_feature (1)..(2004): Ceres Seq. ID no. 12558495
  misc_feature (1)..(2004): Ortholog of  Ceres SEQ ID NO 14309934 as cited in SEQ ID NO 20583
  misc_feature (1)..(2004): Ortholog of  Ceres SEQ ID NO 13654989 as cited in SEQ ID NO 63117
  misc_feature (1)..(2004): Ortholog of  Ceres SEQ ID NO 13584744 as cited in SEQ ID NO 69137

SEQ ID NO: 33421 - protein, 484 aa, Arabidopsis thaliana; identical to SEQ ID NO: 29831
  peptide (1)..(484): Ceres Seq. ID no. 12558496

SEQ ID NO: 33422 - protein, 324 aa, Arabidopsis thaliana; identical to SEQ ID NO: 29832
  peptide (1)..(324): Ceres Seq. ID no. 12558497

SEQ ID NO: 33423 - protein, 255 aa, Arabidopsis thaliana; identical to SEQ ID NO: 29833
  peptide (1)..(255): Ceres Seq. ID no. 12558498

SEQ ID NO: 33424 - DNA, 1239 bp, Arabidopsis thaliana; identical to SEQ ID NO: 29834
  misc_feature (1)..(1239): Ceres Seq. ID no. 6443802
  misc_feature (1)..(1239): Ortholog of  Ceres SEQ ID NO 13598579 as cited in SEQ ID NO 65523

SEQ ID NO: 33425 - protein, 278 aa, Arabidopsis thaliana; identical to SEQ ID NO: 29835
  peptide (1)..(278): Ceres Seq. ID no. 6443803

SEQ ID NO: 33426 - protein, 221 aa, Arabidopsis thaliana; identical to SEQ ID NO: 29836
  peptide (1)..(221): Ceres Seq. ID no. 6443804

SEQ ID NO: 33427 - DNA, 1580 bp, Arabidopsis thaliana; identical to SEQ ID NO: 29837
  misc_feature (1)..(1580): Ceres Seq. ID no. 12385358
  misc_feature (1)..(1580): Ortholog of  Ceres SEQ ID NO 13662245 as cited in SEQ ID NO 62708

SEQ ID NO: 33428 - protein, 449 aa, Arabidopsis thaliana; identical to SEQ ID NO: 29838
  peptide (1)..(449): Ceres Seq. ID no. 12385359

SEQ ID NO: 33429 - protein, 439 aa, Arabidopsis thaliana; identical to SEQ ID NO: 29839
  peptide (1)..(439): Ceres Seq. ID no. 12385360

SEQ ID NO: 33430 - protein, 347 aa, Arabidopsis thaliana; identical to SEQ ID NO: 29840
  peptide (1)..(347): Ceres Seq. ID no. 12385361

SEQ ID NO: 33431 - DNA, 2141 bp, Arabidopsis thaliana; identical to SEQ ID NO: 29841
  misc_feature (1)..(2141): Ceres Seq. ID no. 12333959
  misc_feature (1)..(2141): Ortholog of  Ceres SEQ ID NO 13582619 as cited in SEQ ID NO 56520
  misc_feature (1)..(2141): Ortholog of  Ceres SEQ ID NO 13660872 as cited in SEQ ID NO 60830
  misc_feature (1)..(2141): Ortholog of  Ceres SEQ ID NO 12616221 as cited in SEQ ID NO 63291

SEQ ID NO: 33432 - protein, 567 aa, Arabidopsis thaliana; identical to SEQ ID NO: 29842
  peptide (1)..(567): Ceres Seq. ID no. 12333960

SEQ ID NO: 33433 - protein, 496 aa, Arabidopsis thaliana; identical to SEQ ID NO: 29843
  peptide (1)..(496): Ceres Seq. ID no. 12333961

SEQ ID NO: 33434 - protein, 458 aa, Arabidopsis thaliana; identical to SEQ ID NO: 29844
  peptide (1)..(458): Ceres Seq. ID no. 12333962

SEQ ID NO: 33435 - DNA, 1538 bp, Arabidopsis thaliana; identical to SEQ ID NO: 29845
  misc_feature (1)..(1538): Ceres Seq. ID no. 12580443
  misc_feature (1)..(1538): Ortholog of  Ceres SEQ ID NO 14314567 as cited in SEQ ID NO 52335
  misc_feature (1)..(1538): Ortholog of  Ceres SEQ ID NO 14308803 as cited in SEQ ID NO 55038
  misc_feature (1)..(1538): Ortholog of  Ceres SEQ ID NO 13595437 as cited in SEQ ID NO 56562
  misc_feature (1)..(1538): Ortholog of  Ceres SEQ ID NO 14315985 as cited in SEQ ID NO 57720

SEQ ID NO: 33436 - protein, 356 aa, Arabidopsis thaliana; identical to SEQ ID NO: 29846
  peptide (1)..(356): Ceres Seq. ID no. 12580444

SEQ ID NO: 33437 - protein, 352 aa, Arabidopsis thaliana; identical to SEQ ID NO: 29847
  peptide (1)..(352): Ceres Seq. ID no. 12580445

SEQ ID NO: 33438 - protein, 277 aa, Arabidopsis thaliana; identical to SEQ ID NO: 29848
  peptide (1)..(277): Ceres Seq. ID no. 12580446

SEQ ID NO: 33439 - DNA, 1543 bp, Arabidopsis thaliana; identical to SEQ ID NO: 29849
  misc_feature (1)..(1543): Ceres Seq. ID no. 12579838
  misc_feature (1)..(1543): Ortholog of  Ceres SEQ ID NO 14307678 as cited in SEQ ID NO 59456
  misc_feature (1)..(1543): Ortholog of  Ceres SEQ ID NO 13586716 as cited in SEQ ID NO 0

SEQ ID NO: 33440 - protein, 243 aa, Arabidopsis thaliana; identical to SEQ ID NO: 29850
  peptide (1)..(243): Ceres Seq. ID no. 12579839

SEQ ID NO: 33441 - protein, 205 aa, Arabidopsis thaliana; identical to SEQ ID NO: 29851
  peptide (1)..(205): Ceres Seq. ID no. 12579840

SEQ ID NO: 33442 - protein, 202 aa, Arabidopsis thaliana; identical to SEQ ID NO: 29852
  peptide (1)..(202): Ceres Seq. ID no. 12579841

SEQ ID NO: 33443 - DNA, 1859 bp, Arabidopsis thaliana; identical to SEQ ID NO: 21171
  misc_feature (1)..(1859): Ceres Seq. ID no. 13646168
  misc_feature (1)..(1859): Ortholog of  Ceres SEQ ID NO 15176230 as cited in SEQ ID NO 58796
  misc_feature (1)..(1859): Ortholog of  Ceres SEQ ID NO 14308156 as cited in SEQ ID NO 59006
  misc_feature (1)..(1859): Ortholog of  Ceres SEQ ID NO 15174240 as cited in SEQ ID NO 61866
  misc_feature (1)..(1859): Ortholog of  Ceres SEQ ID NO 13596321 as cited in SEQ ID NO 67976

SEQ ID NO: 33444 - protein, 180 aa, Arabidopsis thaliana; identical to SEQ ID NO: 21172
  peptide (1)..(180): Ceres Seq. ID no. 13646169

SEQ ID NO: 33445 - protein, 168 aa, Arabidopsis thaliana; identical to SEQ ID NO: 21173
  peptide (1)..(168): Ceres Seq. ID no. 13646170

SEQ ID NO: 33446 - protein, 158 aa, Arabidopsis thaliana; identical to SEQ ID NO: 21174
  peptide (1)..(158): Ceres Seq. ID no. 13646171

SEQ ID NO: 33447 - DNA, 1430 bp, Arabidopsis thaliana; identical to SEQ ID NO: 22042
  misc_feature (1)..(1430): Ceres Seq. ID no. 12482890
  misc_feature (1)..(1430): Ortholog of  Ceres SEQ ID NO 14316017 as cited in SEQ ID NO 67028
  misc_feature (1)..(1430): Ortholog of  Ceres SEQ ID NO 15177500 as cited in SEQ ID NO 0

SEQ ID NO: 33448 - protein, 425 aa, Arabidopsis thaliana; identical to SEQ ID NO: 22043
  peptide (1)..(425): Ceres Seq. ID no. 12482891

SEQ ID NO: 33449 - protein, 404 aa, Arabidopsis thaliana; identical to SEQ ID NO: 22044
  peptide (1)..(404): Ceres Seq. ID no. 12482892

SEQ ID NO: 33450 - protein, 315 aa, Arabidopsis thaliana; identical to SEQ ID NO: 22045
  peptide (1)..(315): Ceres Seq. ID no. 12482893

SEQ ID NO: 33451 - DNA, 665 bp, Arabidopsis thaliana; identical to SEQ ID NO: 29861
  misc_feature (1)..(665): Ceres Seq. ID no. 13491980
  misc_feature (1)..(665): Ortholog of  Ceres SEQ ID NO 12608953 as cited in SEQ ID NO 51227
  misc_feature (1)..(665): Ortholog of  Ceres SEQ ID NO 12609890 as cited in SEQ ID NO 51792

SEQ ID NO: 33452 - protein, 131 aa, Arabidopsis thaliana; identical to SEQ ID NO: 29862
  peptide (1)..(131): Ceres Seq. ID no. 13491981

SEQ ID NO: 33453 - protein, 65 aa, Arabidopsis thaliana; identical to SEQ ID NO: 29863
  peptide (1)..(65): Ceres Seq. ID no. 13491982

SEQ ID NO: 33454 - DNA, 2799 bp, Arabidopsis thaliana; identical to SEQ ID NO: 29864
  misc_feature (1)..(2799): Ceres Seq. ID no. 12329264
  misc_feature (1)..(2799): Ortholog of  Ceres SEQ ID NO 14312844 as cited in SEQ ID NO 55601
  misc_feature (1)..(2799): Ortholog of  Ceres SEQ ID NO 14312866 as cited in SEQ ID NO 55630
  misc_feature (1)..(2799): Ortholog of  Ceres SEQ ID NO 13597376 as cited in SEQ ID NO 64002
  misc_feature (1)..(2799): Ortholog of  Ceres SEQ ID NO 13503573 as cited in SEQ ID NO 65402
  misc_feature (1)..(2799): Ortholog of  Ceres SEQ ID NO 13659615 as cited in SEQ ID NO 67248

SEQ ID NO: 33455 - protein, 378 aa, Arabidopsis thaliana; identical to SEQ ID NO: 29865
  peptide (1)..(378): Ceres Seq. ID no. 12329265

SEQ ID NO: 33456 - protein, 351 aa, Arabidopsis thaliana; identical to SEQ ID NO: 29866
  peptide (1)..(351): Ceres Seq. ID no. 12329266

SEQ ID NO: 33457 - protein, 350 aa, Arabidopsis thaliana; identical to SEQ ID NO: 29867
  peptide (1)..(350): Ceres Seq. ID no. 12329267

SEQ ID NO: 33458 - DNA, 1144 bp, Arabidopsis thaliana; identical to SEQ ID NO: 29868
  misc_feature (1)..(1144): Ceres Seq. ID no. 13490483
  misc_feature (1)..(1144): Ortholog of  Ceres SEQ ID NO 13574576 as cited in SEQ ID NO 47
  misc_feature (1)..(1144): Ortholog of  Ceres SEQ ID NO 13638673 as cited in SEQ ID NO 51830
  misc_feature (1)..(1144): Ortholog of  Ceres SEQ ID NO 13638785 as cited in SEQ ID NO 51967

SEQ ID NO: 33459 - protein, 273 aa, Arabidopsis thaliana; identical to SEQ ID NO: 29869
  peptide (1)..(273): Ceres Seq. ID no. 13490484

SEQ ID NO: 33460 - protein, 271 aa, Arabidopsis thaliana; identical to SEQ ID NO: 29870
  peptide (1)..(271): Ceres Seq. ID no. 13490485

SEQ ID NO: 33461 - DNA, 1235 bp, Arabidopsis thaliana; identical to SEQ ID NO: 29871
  misc_feature (1)..(1235): Ceres Seq. ID no. 13490486
  misc_feature (1)..(1235): Ortholog of  Ceres SEQ ID NO 13581947 as cited in SEQ ID NO 51812

SEQ ID NO: 33462 - protein, 305 aa, Arabidopsis thaliana; identical to SEQ ID NO: 29872
  peptide (1)..(305): Ceres Seq. ID no. 13490487

SEQ ID NO: 33463 - protein, 235 aa, Arabidopsis thaliana; identical to SEQ ID NO: 29873
  peptide (1)..(235): Ceres Seq. ID no. 13490488

SEQ ID NO: 33464 - protein, 153 aa, Arabidopsis thaliana; identical to SEQ ID NO: 29874
  peptide (1)..(153): Ceres Seq. ID no. 13490489

SEQ ID NO: 33465 - DNA, 1654 bp, Arabidopsis thaliana; identical to SEQ ID NO: 29875
  misc_feature (1)..(1654): Ceres Seq. ID no. 12422368
  misc_feature (1)..(1654): Ortholog of  Ceres SEQ ID NO 12613725 as cited in SEQ ID NO 68196

SEQ ID NO: 33466 - protein, 510 aa, Arabidopsis thaliana; identical to SEQ ID NO: 29876
  peptide (1)..(510): Ceres Seq. ID no. 12422369

SEQ ID NO: 33467 - protein, 496 aa, Arabidopsis thaliana; identical to SEQ ID NO: 29877
  peptide (1)..(496): Ceres Seq. ID no. 12422370

SEQ ID NO: 33468 - protein, 487 aa, Arabidopsis thaliana; identical to SEQ ID NO: 29878
  peptide (1)..(487): Ceres Seq. ID no. 12422371

SEQ ID NO: 33469 - DNA, 842 bp, Arabidopsis thaliana; identical to SEQ ID NO: 29879
  misc_feature (1)..(842): Ceres Seq. ID no. 12322334
  misc_feature (1)..(842): Ortholog of  Ceres SEQ ID NO 13656436 as cited in SEQ ID NO 69154

SEQ ID NO: 33470 - protein, 116 aa, Arabidopsis thaliana; identical to SEQ ID NO: 29880
  peptide (1)..(116): Ceres Seq. ID no. 12322335

SEQ ID NO: 33471 - protein, 111 aa, Arabidopsis thaliana; identical to SEQ ID NO: 29881
  peptide (1)..(111): Ceres Seq. ID no. 12322336

SEQ ID NO: 33472 - DNA, 1119 bp, Arabidopsis thaliana; identical to SEQ ID NO: 29882
  misc_feature (1)..(1119): Ceres Seq. ID no. 13487755
  misc_feature (1)..(1119): Ortholog of  Ceres SEQ ID NO 13593932 as cited in SEQ ID NO 54078
  misc_feature (1)..(1119): Ortholog of  Ceres SEQ ID NO 12635231 as cited in SEQ ID NO 0

SEQ ID NO: 33473 - protein, 261 aa, Arabidopsis thaliana; identical to SEQ ID NO: 29883
  peptide (1)..(261): Ceres Seq. ID no. 13487756

SEQ ID NO: 33474 - protein, 244 aa, Arabidopsis thaliana; identical to SEQ ID NO: 29884
  peptide (1)..(244): Ceres Seq. ID no. 13487757

SEQ ID NO: 33475 - protein, 243 aa, Arabidopsis thaliana; identical to SEQ ID NO: 29885
  peptide (1)..(243): Ceres Seq. ID no. 13487758

SEQ ID NO: 33476 - DNA, 1277 bp, Arabidopsis thaliana; identical to SEQ ID NO: 29886
  misc_feature (1)..(1277): Ceres Seq. ID no. 12370517
  misc_feature (1)..(1277): Ortholog of  Ceres SEQ ID NO 15169053 as cited in SEQ ID NO 53926

SEQ ID NO: 33477 - protein, 169 aa, Arabidopsis thaliana; identical to SEQ ID NO: 29887
  peptide (1)..(169): Ceres Seq. ID no. 12370518

SEQ ID NO: 33478 - protein, 136 aa, Arabidopsis thaliana; identical to SEQ ID NO: 29888
  peptide (1)..(136): Ceres Seq. ID no. 12370519

SEQ ID NO: 33479 - protein, 86 aa, Arabidopsis thaliana; identical to SEQ ID NO: 29889
  peptide (1)..(86): Ceres Seq. ID no. 12370520

SEQ ID NO: 33480 - DNA, 1647 bp, Arabidopsis thaliana; identical to SEQ ID NO: 29890
  misc_feature (1)..(1647): Ceres Seq. ID no. 13492901
  misc_feature (1)..(1647): Ortholog of  Ceres SEQ ID NO 13660024 as cited in SEQ ID NO 67241

SEQ ID NO: 33481 - protein, 499 aa, Arabidopsis thaliana; identical to SEQ ID NO: 29891
  peptide (1)..(499): Ceres Seq. ID no. 13492902

SEQ ID NO: 33482 - protein, 466 aa, Arabidopsis thaliana; identical to SEQ ID NO: 29892
  peptide (1)..(466): Ceres Seq. ID no. 13492903

SEQ ID NO: 33483 - protein, 465 aa, Arabidopsis thaliana; identical to SEQ ID NO: 29893
  peptide (1)..(465): Ceres Seq. ID no. 13492904

SEQ ID NO: 33484 - DNA, 1232 bp, Arabidopsis thaliana; identical to SEQ ID NO: 29894
  misc_feature (1)..(1232): Ceres Seq. ID no. 13490604
  misc_feature (1)..(1232): Ortholog of  Ceres SEQ ID NO 15225069 as cited in SEQ ID NO 68012
  misc_feature (1)..(1232): Ortholog of  Ceres SEQ ID NO 15179217 as cited in SEQ ID NO 0

SEQ ID NO: 33485 - protein, 310 aa, Arabidopsis thaliana; identical to SEQ ID NO: 29895
  peptide (1)..(310): Ceres Seq. ID no. 13490605

SEQ ID NO: 33486 - protein, 257 aa, Arabidopsis thaliana; identical to SEQ ID NO: 29896
  peptide (1)..(257): Ceres Seq. ID no. 13490606

SEQ ID NO: 33487 - protein, 244 aa, Arabidopsis thaliana; identical to SEQ ID NO: 29897
  peptide (1)..(244): Ceres Seq. ID no. 13490607

SEQ ID NO: 33488 - DNA, 1821 bp, Arabidopsis thaliana; identical to SEQ ID NO: 29898
  misc_feature (1)..(1821): Ceres Seq. ID no. 13490490
  misc_feature (1)..(1821): Ortholog of  Ceres SEQ ID NO 13597407 as cited in SEQ ID NO 64106

SEQ ID NO: 33489 - protein, 470 aa, Arabidopsis thaliana; identical to SEQ ID NO: 29899
  peptide (1)..(470): Ceres Seq. ID no. 13490491

SEQ ID NO: 33490 - protein, 468 aa, Arabidopsis thaliana; identical to SEQ ID NO: 29900
  peptide (1)..(468): Ceres Seq. ID no. 13490492

SEQ ID NO: 33491 - protein, 398 aa, Arabidopsis thaliana; identical to SEQ ID NO: 29901
  peptide (1)..(398): Ceres Seq. ID no. 13490493

SEQ ID NO: 33492 - DNA, 1901 bp, Arabidopsis thaliana; identical to SEQ ID NO: 29902
  misc_feature (1)..(1901): Ceres Seq. ID no. 13653850
  misc_feature (1)..(1901): Ortholog of  Ceres SEQ ID NO 15168348 as cited in SEQ ID NO 58074

SEQ ID NO: 33493 - protein, 423 aa, Arabidopsis thaliana; identical to SEQ ID NO: 29903
  peptide (1)..(423): Ceres Seq. ID no. 13653851

SEQ ID NO: 33494 - protein, 404 aa, Arabidopsis thaliana; identical to SEQ ID NO: 29904
  peptide (1)..(404): Ceres Seq. ID no. 13653852

SEQ ID NO: 33495 - protein, 270 aa, Arabidopsis thaliana; identical to SEQ ID NO: 29905
  peptide (1)..(270): Ceres Seq. ID no. 13653853

SEQ ID NO: 33496 - DNA, 1303 bp, Arabidopsis thaliana; identical to SEQ ID NO: 29906
  misc_feature (1)..(1303): Ceres Seq. ID no. 12334147
  misc_feature (1)..(1303): Ortholog of  Ceres SEQ ID NO 13584646 as cited in SEQ ID NO 60715

SEQ ID NO: 33497 - protein, 315 aa, Arabidopsis thaliana; identical to SEQ ID NO: 29907
  peptide (1)..(315): Ceres Seq. ID no. 12334148

SEQ ID NO: 33498 - protein, 282 aa, Arabidopsis thaliana; identical to SEQ ID NO: 29908
  peptide (1)..(282): Ceres Seq. ID no. 12334149

SEQ ID NO: 33499 - protein, 280 aa, Arabidopsis thaliana; identical to SEQ ID NO: 29909
  peptide (1)..(280): Ceres Seq. ID no. 12334150

SEQ ID NO: 33500 - DNA, 667 bp, Arabidopsis thaliana; identical to SEQ ID NO: 29910
  misc_feature (1)..(667): Ceres Seq. ID no. 12389141
  misc_feature (1)..(667): Ortholog of  Ceres SEQ ID NO 12585656 as cited in SEQ ID NO 68874

SEQ ID NO: 33501 - protein, 163 aa, Arabidopsis thaliana; identical to SEQ ID NO: 29911
  peptide (1)..(163): Ceres Seq. ID no. 12389142

SEQ ID NO: 33502 - protein, 146 aa, Arabidopsis thaliana [sequence omitted]

SEQ ID NO: 33503 - protein, 109 aa, Arabidopsis thaliana; identical to SEQ ID NO: 29913
  peptide (1)..(109): Ceres Seq. ID no. 12389144

SEQ ID NO: 33504 - DNA, 969 bp, Arabidopsis thaliana; identical to SEQ ID NO: 29914
  misc_feature (1)..(969): Ceres Seq. ID no. 12421076
  misc_feature (1)..(969): Ortholog of  Ceres SEQ ID NO 14314838 as cited in SEQ ID NO 52573

SEQ ID NO: 33505 - protein, 279 aa, Arabidopsis thaliana; identical to SEQ ID NO: 29915
  peptide (1)..(279): Ceres Seq. ID no. 12421077

SEQ ID NO: 33506 - protein, 274 aa, Arabidopsis thaliana; identical to SEQ ID NO: 29916
  peptide (1)..(274): Ceres Seq. ID no. 12421078

SEQ ID NO: 33507 - protein, 257 aa, Arabidopsis thaliana; identical to SEQ ID NO: 29917
  peptide (1)..(257): Ceres Seq. ID no. 12421079

SEQ ID NO: 33508 - DNA, 617 bp, Arabidopsis thaliana; identical to SEQ ID NO: 29918
  misc_feature (1)..(617): Ceres Seq. ID no. 12333456
  misc_feature (1)..(617): Ortholog of  Ceres SEQ ID NO 15178860 as cited in SEQ ID NO 0

SEQ ID NO: 33509 - protein, 133 aa, Arabidopsis thaliana; identical to SEQ ID NO: 29919
  peptide (1)..(133): Ceres Seq. ID no. 12333457

SEQ ID NO: 33510 - protein, 102 aa, Arabidopsis thaliana; identical to SEQ ID NO: 29920
  peptide (1)..(102): Ceres Seq. ID no. 12333458

SEQ ID NO: 33511 - DNA, 1371 bp, Arabidopsis thaliana; identical to SEQ ID NO: 29921
  misc_feature (1)..(1371): Ceres Seq. ID no. 13497131
  misc_feature (1)..(1371): Ortholog of  Ceres SEQ ID NO 14315518 as cited in SEQ ID NO 60467
  misc_feature (1)..(1371): Ortholog of  Ceres SEQ ID NO 12585444 as cited in SEQ ID NO 62814

SEQ ID NO: 33512 - protein, 300 aa, Arabidopsis thaliana; identical to SEQ ID NO: 29922
  peptide (1)..(300): Ceres Seq. ID no. 13497132

SEQ ID NO: 33513 - protein, 284 aa, Arabidopsis thaliana; identical to SEQ ID NO: 29923
  peptide (1)..(284): Ceres Seq. ID no. 13497133

SEQ ID NO: 33514 - DNA, 1609 bp, Arabidopsis thaliana; identical to SEQ ID NO: 29924
  misc_feature (1)..(1609): Ceres Seq. ID no. 12333595
  misc_feature (1)..(1609): Ortholog of  Ceres SEQ ID NO 15176444 as cited in SEQ ID NO 53249

SEQ ID NO: 33515 - protein, 291 aa, Arabidopsis thaliana; identical to SEQ ID NO: 29925
  peptide (1)..(291): Ceres Seq. ID no. 12333596

SEQ ID NO: 33516 - protein, 282 aa, Arabidopsis thaliana; identical to SEQ ID NO: 29926
  peptide (1)..(282): Ceres Seq. ID no. 12333597

SEQ ID NO: 33517 - protein, 275 aa, Arabidopsis thaliana; identical to SEQ ID NO: 29927
  peptide (1)..(275): Ceres Seq. ID no. 12333598

SEQ ID NO: 33518 - DNA, 1237 bp, Arabidopsis thaliana; identical to SEQ ID NO: 29928
  misc_feature (1)..(1237): Ceres Seq. ID no. 13580595
  misc_feature (1)..(1237): Ortholog of  Ceres SEQ ID NO 14311044 as cited in SEQ ID NO 53643

SEQ ID NO: 33519 - protein, 165 aa, Arabidopsis thaliana; identical to SEQ ID NO: 29929
  peptide (1)..(165): Ceres Seq. ID no. 13580596

SEQ ID NO: 33520 - protein, 151 aa, Arabidopsis thaliana; identical to SEQ ID NO: 23095
  peptide (1)..(151): Ceres Seq. ID no. 13580597

SEQ ID NO: 33521 - protein, 126 aa, Arabidopsis thaliana; identical to SEQ ID NO: 29931
  peptide (1)..(126): Ceres Seq. ID no. 13580598

SEQ ID NO: 33522 - DNA, 740 bp, Arabidopsis thaliana; identical to SEQ ID NO: 29932
  misc_feature (1)..(740): Ceres Seq. ID no. 13494290
  misc_feature (1)..(740): Ortholog of  Ceres SEQ ID NO 12784091 as cited in SEQ ID NO 67615
  misc_feature (1)..(740): Ortholog of  Ceres SEQ ID NO 15177688 as cited in SEQ ID NO 0

SEQ ID NO: 33523 - protein, 177 aa, Arabidopsis thaliana; identical to SEQ ID NO: 29933
  peptide (1)..(177): Ceres Seq. ID no. 13494291

SEQ ID NO: 33524 - protein, 158 aa, Arabidopsis thaliana; identical to SEQ ID NO: 29934
  peptide (1)..(158): Ceres Seq. ID no. 13494292

SEQ ID NO: 33525 - protein, 94 aa, Arabidopsis thaliana; identical to SEQ ID NO: 29935
  peptide (1)..(94): Ceres Seq. ID no. 13494293

SEQ ID NO: 33526 - DNA, 1758 bp, Arabidopsis thaliana; identical to SEQ ID NO: 25899
  misc_feature (1)..(1758): Ceres Seq. ID no. 13490176
  misc_feature (1)..(1758): Ortholog of  Ceres SEQ ID NO 15176262 as cited in SEQ ID NO 54751
  misc_feature (1)..(1758): Ortholog of  Ceres SEQ ID NO 13656177 as cited in SEQ ID NO 64997

SEQ ID NO: 33527 - protein, 524 aa, Arabidopsis thaliana; identical to SEQ ID NO: 25900
  peptide (1)..(524): Ceres Seq. ID no. 13490177

SEQ ID NO: 33528 - protein, 496 aa, Arabidopsis thaliana; identical to SEQ ID NO: 25901
  peptide (1)..(496): Ceres Seq. ID no. 13490178

SEQ ID NO: 33529 - protein, 394 aa, Arabidopsis thaliana; identical to SEQ ID NO: 25902
  peptide (1)..(394): Ceres Seq. ID no. 13490179

SEQ ID NO: 33530 - DNA, 2360 bp, Arabidopsis thaliana; identical to SEQ ID NO: 29940
  misc_feature (1)..(2360): Ceres Seq. ID no. 12339318
  misc_feature (1)..(2360): Ortholog of  Ceres SEQ ID NO 12778278 as cited in SEQ ID NO 63035

SEQ ID NO: 33531 - protein, 594 aa, Arabidopsis thaliana; identical to SEQ ID NO: 29941
  peptide (1)..(594): Ceres Seq. ID no. 12339319

SEQ ID NO: 33532 - protein, 495 aa, Arabidopsis thaliana; identical to SEQ ID NO: 29942
  peptide (1)..(495): Ceres Seq. ID no. 12339320

SEQ ID NO: 33533 - protein, 480 aa, Arabidopsis thaliana; identical to SEQ ID NO: 29943
  peptide (1)..(480): Ceres Seq. ID no. 12339322

SEQ ID NO: 33534 - DNA, 727 bp, Arabidopsis thaliana; identical to SEQ ID NO: 29944
  misc_feature (1)..(727): Ceres Seq. ID no. 12738409
  misc_feature (1)..(727): Ortholog of  Ceres SEQ ID NO 12626078 as cited in SEQ ID NO 69113

SEQ ID NO: 33535 - protein, 205 aa, Arabidopsis thaliana; identical to SEQ ID NO: 29945
  peptide (1)..(205): Ceres Seq. ID no. 12738410

SEQ ID NO: 33536 - DNA, 1261 bp, Arabidopsis thaliana; identical to SEQ ID NO: 29946
  misc_feature (1)..(1261): Ceres Seq. ID no. 12482789
  misc_feature (1)..(1261): Ortholog of  Ceres SEQ ID NO 15173355 as cited in SEQ ID NO 61844

SEQ ID NO: 33537 - protein, 272 aa, Arabidopsis thaliana; identical to SEQ ID NO: 29947
  peptide (1)..(272): Ceres Seq. ID no. 12482790

SEQ ID NO: 33538 - protein, 170 aa, Arabidopsis thaliana; identical to SEQ ID NO: 29948
  peptide (1)..(170): Ceres Seq. ID no. 12482791

SEQ ID NO: 33539 - DNA, 997 bp, Arabidopsis thaliana; identical to SEQ ID NO: 29949
  misc_feature (1)..(997): Ceres Seq. ID no. 12396633
  misc_feature (1)..(997): Ortholog of  Ceres SEQ ID NO 14301996 as cited in SEQ ID NO 56657

SEQ ID NO: 33540 - protein, 273 aa, Arabidopsis thaliana; identical to SEQ ID NO: 29950
  peptide (1)..(273): Ceres Seq. ID no. 12396634

SEQ ID NO: 33541 - protein, 239 aa, Arabidopsis thaliana; identical to SEQ ID NO: 29951
  peptide (1)..(239): Ceres Seq. ID no. 12396635

SEQ ID NO: 33542 - protein, 232 aa, Arabidopsis thaliana; identical to SEQ ID NO: 29952
  peptide (1)..(232): Ceres Seq. ID no. 12396636

SEQ ID NO: 33543 - DNA, 1449 bp, Arabidopsis thaliana; identical to SEQ ID NO: 29953
  misc_feature (1)..(1449): Ceres Seq. ID no. 12396528
  misc_feature (1)..(1449): Ortholog of  Ceres SEQ ID NO 15168537 as cited in SEQ ID NO 57100
  misc_feature (1)..(1449): Ortholog of  Ceres SEQ ID NO 15178681 as cited in SEQ ID NO 63192
  misc_feature (1)..(1449): Ortholog of  Ceres SEQ ID NO 13579918 as cited in SEQ ID NO 64644
  misc_feature (1)..(1449): Ortholog of  Ceres SEQ ID NO 13654122 as cited in SEQ ID NO 68192

SEQ ID NO: 33544 - protein, 453 aa, Arabidopsis thaliana; identical to SEQ ID NO: 29954
  peptide (1)..(453): Ceres Seq. ID no. 12396529

SEQ ID NO: 33545 - protein, 421 aa, Arabidopsis thaliana; identical to SEQ ID NO: 29955
  peptide (1)..(421): Ceres Seq. ID no. 12396530

SEQ ID NO: 33546 - protein, 389 aa, Arabidopsis thaliana; identical to SEQ ID NO: 29956
  peptide (1)..(389): Ceres Seq. ID no. 12396531

SEQ ID NO: 33547 - DNA, 940 bp, Arabidopsis thaliana; identical to SEQ ID NO: 29957
  misc_feature (1)..(940): Ceres Seq. ID no. 12323107
  misc_feature (1)..(940): Ortholog of  Ceres SEQ ID NO 12333459 as cited in SEQ ID NO 20477
  misc_feature (1)..(940): Ortholog of  Ceres SEQ ID NO 15176155 as cited in SEQ ID NO 0

SEQ ID NO: 33548 - protein, 126 aa, Arabidopsis thaliana; identical to SEQ ID NO: 29958
  peptide (1)..(126): Ceres Seq. ID no. 12323108

SEQ ID NO: 33549 - protein, 98 aa, Arabidopsis thaliana; identical to SEQ ID NO: 29959
  peptide (1)..(98): Ceres Seq. ID no. 12323109

SEQ ID NO: 33550 - DNA, 607 bp, Arabidopsis thaliana; identical to SEQ ID NO: 29960
  misc_feature (1)..(607): Ceres Seq. ID no. 12377317
  misc_feature (1)..(607): Ortholog of  Ceres SEQ ID NO 12582657 as cited in SEQ ID NO 51070

SEQ ID NO: 33551 - protein, 112 aa, Arabidopsis thaliana; identical to SEQ ID NO: 29961
  peptide (1)..(112): Ceres Seq. ID no. 12377318

SEQ ID NO: 33552 - protein, 99 aa, Arabidopsis thaliana; identical to SEQ ID NO: 29962
  peptide (1)..(99): Ceres Seq. ID no. 12377319

SEQ ID NO: 33553 - protein, 68 aa, Arabidopsis thaliana; identical to SEQ ID NO: 29963
  peptide (1)..(68): Ceres Seq. ID no. 12377320

SEQ ID NO: 33554 - DNA, 1562 bp, Arabidopsis thaliana; identical to SEQ ID NO: 29964
  misc_feature (1)..(1562): Ceres Seq. ID no. 12439764
  misc_feature (1)..(1562): Ortholog of  Ceres SEQ ID NO 13658590 as cited in SEQ ID NO 66762

SEQ ID NO: 33555 - protein, 423 aa, Arabidopsis thaliana; identical to SEQ ID NO: 29965
  peptide (1)..(423): Ceres Seq. ID no. 12439765

SEQ ID NO: 33556 - protein, 391 aa, Arabidopsis thaliana; identical to SEQ ID NO: 29966
  peptide (1)..(391): Ceres Seq. ID no. 12439766

SEQ ID NO: 33557 - protein, 290 aa, Arabidopsis thaliana; identical to SEQ ID NO: 29967
  peptide (1)..(290): Ceres Seq. ID no. 12439767

SEQ ID NO: 33558 - DNA, 868 bp, Arabidopsis thaliana; identical to SEQ ID NO: 29968
  misc_feature (1)..(868): Ceres Seq. ID no. 13487046
  misc_feature (1)..(868): Ortholog of  Ceres SEQ ID NO 13597839 as cited in SEQ ID NO 64260

SEQ ID NO: 33559 - protein, 203 aa, Arabidopsis thaliana; identical to SEQ ID NO: 29969
  peptide (1)..(203): Ceres Seq. ID no. 13487047

SEQ ID NO: 33560 - protein, 196 aa, Arabidopsis thaliana; identical to SEQ ID NO: 29970
  peptide (1)..(196): Ceres Seq. ID no. 13487048

SEQ ID NO: 33561 - protein, 156 aa, Arabidopsis thaliana; identical to SEQ ID NO: 29971
  peptide (1)..(156): Ceres Seq. ID no. 13487049

SEQ ID NO: 33562 - DNA, 1566 bp, Arabidopsis thaliana; identical to SEQ ID NO: 29972
  misc_feature (1)..(1566): Ceres Seq. ID no. 13492623
  misc_feature (1)..(1566): Ortholog of  Ceres SEQ ID NO 14304000 as cited in SEQ ID NO 53798
  misc_feature (1)..(1566): Ortholog of  Ceres SEQ ID NO 14314782 as cited in SEQ ID NO 56830
  misc_feature (1)..(1566): Ortholog of  Ceres SEQ ID NO 14303568 as cited in SEQ ID NO 65364

SEQ ID NO: 33563 - protein, 432 aa, Arabidopsis thaliana; identical to SEQ ID NO: 29973
  peptide (1)..(432): Ceres Seq. ID no. 13492624

SEQ ID NO: 33564 - protein, 275 aa, Arabidopsis thaliana; identical to SEQ ID NO: 29974
  peptide (1)..(275): Ceres Seq. ID no. 13492625

SEQ ID NO: 33565 - protein, 223 aa, Arabidopsis thaliana; identical to SEQ ID NO: 29975
  peptide (1)..(223): Ceres Seq. ID no. 13492626

SEQ ID NO: 33566 - DNA, 862 bp, Arabidopsis thaliana; identical to SEQ ID NO: 29976
  misc_feature (1)..(862): Ceres Seq. ID no. 12332832
  misc_feature (1)..(862): Ortholog of  Ceres SEQ ID NO 15170072 as cited in SEQ ID NO 55533
  misc_feature (1)..(862): Ortholog of  Ceres SEQ ID NO 15173959 as cited in SEQ ID NO 63398
  misc_feature (1)..(862): Ortholog of  Ceres SEQ ID NO 13663564 as cited in SEQ ID NO 66903

SEQ ID NO: 33567 - protein, 188 aa, Arabidopsis thaliana; identical to SEQ ID NO: 29977
  peptide (1)..(188): Ceres Seq. ID no. 12332833

SEQ ID NO: 33568 - protein, 146 aa, Arabidopsis thaliana; identical to SEQ ID NO: 29978
  peptide (1)..(146): Ceres Seq. ID no. 12332834

SEQ ID NO: 33569 - protein, 109 aa, Arabidopsis thaliana; identical to SEQ ID NO: 29979
  peptide (1)..(109): Ceres Seq. ID no. 12332835

SEQ ID NO: 33570 - DNA, 1592 bp, Arabidopsis thaliana; identical to SEQ ID NO: 29980
  misc_feature (1)..(1592): Ceres Seq. ID no. 13488446
  misc_feature (1)..(1592): Ortholog of  Ceres SEQ ID NO 13661452 as cited in SEQ ID NO 68781

SEQ ID NO: 33571 - protein, 367 aa, Arabidopsis thaliana; identical to SEQ ID NO: 29981
  peptide (1)..(367): Ceres Seq. ID no. 13488447

SEQ ID NO: 33572 - protein, 317 aa, Arabidopsis thaliana; identical to SEQ ID NO: 29982
  peptide (1)..(317): Ceres Seq. ID no. 13488448

SEQ ID NO: 33573 - protein, 285 aa, Arabidopsis thaliana; identical to SEQ ID NO: 29983
  peptide (1)..(285): Ceres Seq. ID no. 13488449

SEQ ID NO: 33574 - DNA, 1708 bp, Arabidopsis thaliana; identical to SEQ ID NO: 29984
  misc_feature (1)..(1708): Ceres Seq. ID no. 12603224
  misc_feature (1)..(1708): Ortholog of  Ceres SEQ ID NO 14307843 as cited in SEQ ID NO 20508
  misc_feature (1)..(1708): Ortholog of  Ceres SEQ ID NO 15170811 as cited in SEQ ID NO 52649
  misc_feature (1)..(1708): Ortholog of  Ceres SEQ ID NO 13638331 as cited in SEQ ID NO 58047
  misc_feature (1)..(1708): Ortholog of  Ceres SEQ ID NO 15225845 as cited in SEQ ID NO 65125

SEQ ID NO: 33575 - protein, 501 aa, Arabidopsis thaliana; identical to SEQ ID NO: 29985
  peptide (1)..(501): Ceres Seq. ID no. 12603225

SEQ ID NO: 33576 - protein, 424 aa, Arabidopsis thaliana; identical to SEQ ID NO: 29986
  peptide (1)..(424): Ceres Seq. ID no. 12603226

SEQ ID NO: 33577 - protein, 357 aa, Arabidopsis thaliana; identical to SEQ ID NO: 29987
  peptide (1)..(357): Ceres Seq. ID no. 12603227

SEQ ID NO: 33578 - DNA, 640 bp, Arabidopsis thaliana; identical to SEQ ID NO: 21715
  misc_feature (1)..(640): Ceres Seq. ID no. 12323094
  misc_feature (1)..(640): Ortholog of  Ceres SEQ ID NO 12610679 as cited in SEQ ID NO 56077

SEQ ID NO: 33579 - protein, 125 aa, Arabidopsis thaliana; identical to SEQ ID NO: 21716
  peptide (1)..(125): Ceres Seq. ID no. 12323095

SEQ ID NO: 33580 - DNA, 939 bp, Arabidopsis thaliana; identical to SEQ ID NO: 29990
  misc_feature (1)..(939): Ceres Seq. ID no. 12322718
  misc_feature (1)..(939): Ortholog of  Ceres SEQ ID NO 13584593 as cited in SEQ ID NO 65340

SEQ ID NO: 33581 - protein, 258 aa, Arabidopsis thaliana; identical to SEQ ID NO: 29991
  peptide (1)..(258): Ceres Seq. ID no. 12322719

SEQ ID NO: 33582 - protein, 217 aa, Arabidopsis thaliana; identical to SEQ ID NO: 29992
  peptide (1)..(217): Ceres Seq. ID no. 12322720

SEQ ID NO: 33583 - protein, 183 aa, Arabidopsis thaliana; identical to SEQ ID NO: 29993
  peptide (1)..(183): Ceres Seq. ID no. 12322721

SEQ ID NO: 33584 - DNA, 781 bp, Arabidopsis thaliana; identical to SEQ ID NO: 29994
  misc_feature (1)..(781): Ceres Seq. ID no. 13487058
  misc_feature (1)..(781): Ortholog of  Ceres SEQ ID NO 15173990 as cited in SEQ ID NO 1070
  misc_feature (1)..(781): Ortholog of  Ceres SEQ ID NO 13594900 as cited in SEQ ID NO 52042

SEQ ID NO: 33585 - protein, 130 aa, Arabidopsis thaliana; identical to SEQ ID NO: 29995
  peptide (1)..(130): Ceres Seq. ID no. 13487059

SEQ ID NO: 33586 - protein, 71 aa, Arabidopsis thaliana; identical to SEQ ID NO: 29996
  peptide (1)..(71): Ceres Seq. ID no. 13487060

SEQ ID NO: 33587 - protein, 70 aa, Arabidopsis thaliana; identical to SEQ ID NO: 29997
  peptide (1)..(70): Ceres Seq. ID no. 13487061

SEQ ID NO: 33588 - DNA, 1635 bp, Arabidopsis thaliana; identical to SEQ ID NO: 29998
  misc_feature (1)..(1635): Ceres Seq. ID no. 12327239
  misc_feature (1)..(1635): Ortholog of  Ceres SEQ ID NO 14313491 as cited in SEQ ID NO 0

SEQ ID NO: 33589 - protein, 293 aa, Arabidopsis thaliana; identical to SEQ ID NO: 29999
  peptide (1)..(293): Ceres Seq. ID no. 12327240

SEQ ID NO: 33590 - DNA, 832 bp, Arabidopsis thaliana; identical to SEQ ID NO: 26742
  misc_feature (1)..(832): Ceres Seq. ID no. 12482239
  misc_feature (1)..(832): Ortholog of  Ceres SEQ ID NO 12557512 as cited in SEQ ID NO 4
  misc_feature (1)..(832): Ortholog of  Ceres SEQ ID NO 13657435 as cited in SEQ ID NO 66084
  misc_feature (1)..(832): Ortholog of  Ceres SEQ ID NO 14309476 as cited in SEQ ID NO 0

SEQ ID NO: 33591 - protein, 235 aa, Arabidopsis thaliana; identical to SEQ ID NO: 26743
  peptide (1)..(235): Ceres Seq. ID no. 12482240

SEQ ID NO: 33592 - protein, 189 aa, Arabidopsis thaliana; identical to SEQ ID NO: 26744
  peptide (1)..(189): Ceres Seq. ID no. 12482241

SEQ ID NO: 33593 - protein, 185 aa, Arabidopsis thaliana; identical to SEQ ID NO: 26745
  peptide (1)..(185): Ceres Seq. ID no. 12482242

SEQ ID NO: 33594 - DNA, 1055 bp, Arabidopsis thaliana; identical to SEQ ID NO: 30004
  misc_feature (1)..(1055): Ceres Seq. ID no. 13503881
  misc_feature (1)..(1055): Ortholog of  Ceres SEQ ID NO 14311568 as cited in SEQ ID NO 51732
  misc_feature (1)..(1055): Ortholog of  Ceres SEQ ID NO 14303877 as cited in SEQ ID NO 53500
  misc_feature (1)..(1055): Ortholog of  Ceres SEQ ID NO 15169781 as cited in SEQ ID NO 54829
  misc_feature (1)..(1055): Ortholog of  Ceres SEQ ID NO 15173757 as cited in SEQ ID NO 57537
  misc_feature (1)..(1055): Ortholog of  Ceres SEQ ID NO 13597743 as cited in SEQ ID NO 65452
  misc_feature (1)..(1055): Ortholog of  Ceres SEQ ID NO 13654231 as cited in SEQ ID NO 68285

SEQ ID NO: 33595 - protein, 267 aa, Arabidopsis thaliana; identical to SEQ ID NO: 30005
  peptide (1)..(267): Ceres Seq. ID no. 13503882

SEQ ID NO: 33596 - protein, 226 aa, Arabidopsis thaliana; identical to SEQ ID NO: 30006
  peptide (1)..(226): Ceres Seq. ID no. 13503883

SEQ ID NO: 33597 - DNA, 810 bp, Arabidopsis thaliana; identical to SEQ ID NO: 30007
  misc_feature (1)..(810): Ceres Seq. ID no. 12332907
  misc_feature (1)..(810): Ortholog of  Ceres SEQ ID NO 15179603 as cited in SEQ ID NO 0

SEQ ID NO: 33598 - protein, 217 aa, Arabidopsis thaliana; identical to SEQ ID NO: 30008
  peptide (1)..(217): Ceres Seq. ID no. 12332908

SEQ ID NO: 33599 - protein, 195 aa, Arabidopsis thaliana; identical to SEQ ID NO: 30009
  peptide (1)..(195): Ceres Seq. ID no. 12332909

SEQ ID NO: 33600 - protein, 183 aa, Arabidopsis thaliana; identical to SEQ ID NO: 30010
  peptide (1)..(183): Ceres Seq. ID no. 12332910

SEQ ID NO: 33601 - DNA, 688 bp, Arabidopsis thaliana; identical to SEQ ID NO: 30011
  misc_feature (1)..(688): Ceres Seq. ID no. 12348526
  misc_feature (1)..(688): Ortholog of  Ceres SEQ ID NO 13594809 as cited in SEQ ID NO 51847
  misc_feature (1)..(688): Ortholog of  Ceres SEQ ID NO 15226273 as cited in SEQ ID NO 64934
  misc_feature (1)..(688): Ortholog of  Ceres SEQ ID NO 12617639 as cited in SEQ ID NO 65219
  misc_feature (1)..(688): Ortholog of  Ceres SEQ ID NO 15173998 as cited in SEQ ID NO 0
  misc_feature (1)..(688): Ortholog of  Ceres SEQ ID NO 15178333 as cited in SEQ ID NO 0

SEQ ID NO: 33602 - protein, 180 aa, Arabidopsis thaliana; identical to SEQ ID NO: 30012
  peptide (1)..(180): Ceres Seq. ID no. 12348527

SEQ ID NO: 33603 - protein, 158 aa, Arabidopsis thaliana; identical to SEQ ID NO: 30013
  peptide (1)..(158): Ceres Seq. ID no. 12348528

SEQ ID NO: 33604 - protein, 133 aa, Arabidopsis thaliana; identical to SEQ ID NO: 30014
  peptide (1)..(133): Ceres Seq. ID no. 12348529

SEQ ID NO: 33605 - DNA, 927 bp, Arabidopsis thaliana; identical to SEQ ID NO: 30015
  misc_feature (1)..(927): Ceres Seq. ID no. 13490173
  misc_feature (1)..(927): Ortholog of  Ceres SEQ ID NO 13661767 as cited in SEQ ID NO 61423

SEQ ID NO: 33606 - protein, 149 aa, Arabidopsis thaliana; identical to SEQ ID NO: 30016
  peptide (1)..(149): Ceres Seq. ID no. 15218712

SEQ ID NO: 33607 - protein, 132 aa, Arabidopsis thaliana; identical to SEQ ID NO: 30017
  peptide (1)..(132): Ceres Seq. ID no. 15218713

SEQ ID NO: 33608 - protein, 101 aa, Arabidopsis thaliana; identical to SEQ ID NO: 30018
  peptide (1)..(101): Ceres Seq. ID no. 15218714

SEQ ID NO: 33609 - DNA, 888 bp, Arabidopsis thaliana; identical to SEQ ID NO: 30019
  misc_feature (1)..(888): Ceres Seq. ID no. 12338180
  misc_feature (1)..(888): Ortholog of  Ceres SEQ ID NO 13584593 as cited in SEQ ID NO 65340

SEQ ID NO: 33610 - protein, 213 aa, Arabidopsis thaliana; identical to SEQ ID NO: 29716
  peptide (1)..(213): Ceres Seq. ID no. 12338181

SEQ ID NO: 33611 - DNA, 796 bp, Arabidopsis thaliana; identical to SEQ ID NO: 30021
  misc_feature (1)..(796): Ceres Seq. ID no. 12332827
  misc_feature (1)..(796): Ortholog of  Ceres SEQ ID NO 14307351 as cited in SEQ ID NO 54892

SEQ ID NO: 33612 - protein, 264 aa, Arabidopsis thaliana; identical to SEQ ID NO: 30022
  peptide (1)..(264): Ceres Seq. ID no. 12332828

SEQ ID NO: 33613 - protein, 193 aa, Arabidopsis thaliana; identical to SEQ ID NO: 30023
  peptide (1)..(193): Ceres Seq. ID no. 12332829

SEQ ID NO: 33614 - DNA, 589 bp, Arabidopsis thaliana; identical to SEQ ID NO: 30024
  misc_feature (1)..(589): Ceres Seq. ID no. 13591389
  misc_feature (1)..(589): Ortholog of  Ceres SEQ ID NO 15174145 as cited in SEQ ID NO 0

SEQ ID NO: 33615 - protein, 155 aa, Arabidopsis thaliana; identical to SEQ ID NO: 30025
  peptide (1)..(155): Ceres Seq. ID no. 13591390

SEQ ID NO: 33616 - protein, 145 aa, Arabidopsis thaliana; identical to SEQ ID NO: 30026
  peptide (1)..(145): Ceres Seq. ID no. 13591391

SEQ ID NO: 33617 - protein, 140 aa, Arabidopsis thaliana; identical to SEQ ID NO: 30027
  peptide (1)..(140): Ceres Seq. ID no. 13591392

SEQ ID NO: 33618 - DNA, 1466 bp, Arabidopsis thaliana; identical to SEQ ID NO: 30028
  misc_feature (1)..(1466): Ceres Seq. ID no. 13486699
  misc_feature (1)..(1466): Ortholog of  Ceres SEQ ID NO 15178909 as cited in SEQ ID NO 0

SEQ ID NO: 33619 - protein, 395 aa, Arabidopsis thaliana; identical to SEQ ID NO: 30029
  peptide (1)..(395): Ceres Seq. ID no. 13486700

SEQ ID NO: 33620 - protein, 339 aa, Arabidopsis thaliana; identical to SEQ ID NO: 30030
  peptide (1)..(339): Ceres Seq. ID no. 13486701

SEQ ID NO: 33621 - protein, 326 aa, Arabidopsis thaliana; identical to SEQ ID NO: 30031
  peptide (1)..(326): Ceres Seq. ID no. 13486702

SEQ ID NO: 33622 - DNA, 1558 bp, Arabidopsis thaliana; identical to SEQ ID NO: 30032
  misc_feature (1)..(1558): Ceres Seq. ID no. 13497382
  misc_feature (1)..(1558): Ortholog of  Ceres SEQ ID NO 14313155 as cited in SEQ ID NO 54706
  misc_feature (1)..(1558): Ortholog of  Ceres SEQ ID NO 13639022 as cited in SEQ ID NO 59811

SEQ ID NO: 33623 - protein, 386 aa, Arabidopsis thaliana; identical to SEQ ID NO: 30033
  peptide (1)..(386): Ceres Seq. ID no. 13497383

SEQ ID NO: 33624 - protein, 382 aa, Arabidopsis thaliana; identical to SEQ ID NO: 30034
  peptide (1)..(382): Ceres Seq. ID no. 13497384

SEQ ID NO: 33625 - protein, 348 aa, Arabidopsis thaliana; identical to SEQ ID NO: 30035
  peptide (1)..(348): Ceres Seq. ID no. 13497385

SEQ ID NO: 33626 - DNA, 1613 bp, Arabidopsis thaliana; identical to SEQ ID NO: 30036
  misc_feature (1)..(1613): Ceres Seq. ID no. 13490265
  misc_feature (1)..(1613): Ortholog of  Ceres SEQ ID NO 13655660 as cited in SEQ ID NO 63727

SEQ ID NO: 33627 - protein, 407 aa, Arabidopsis thaliana; identical to SEQ ID NO: 30037
  peptide (1)..(407): Ceres Seq. ID no. 15218814

SEQ ID NO: 33628 - protein, 278 aa, Arabidopsis thaliana; identical to SEQ ID NO: 30038
  peptide (1)..(278): Ceres Seq. ID no. 15218815

SEQ ID NO: 33629 - protein, 232 aa, Arabidopsis thaliana; identical to SEQ ID NO: 30039
  peptide (1)..(232): Ceres Seq. ID no. 15218816

SEQ ID NO: 33630 - DNA, 1370 bp, Arabidopsis thaliana; identical to SEQ ID NO: 30040
  misc_feature (1)..(1370): Ceres Seq. ID no. 13490428
  misc_feature (1)..(1370): Ortholog of  Ceres SEQ ID NO 13595351 as cited in SEQ ID NO 55934
  misc_feature (1)..(1370): Ortholog of  Ceres SEQ ID NO 13595513 as cited in SEQ ID NO 56663
  misc_feature (1)..(1370): Ortholog of  Ceres SEQ ID NO 13639645 as cited in SEQ ID NO 57488

SEQ ID NO: 33631 - protein, 380 aa, Arabidopsis thaliana; identical to SEQ ID NO: 30041
  peptide (1)..(380): Ceres Seq. ID no. 13490429

SEQ ID NO: 33632 - protein, 371 aa, Arabidopsis thaliana; identical to SEQ ID NO: 30042
  peptide (1)..(371): Ceres Seq. ID no. 13490430

SEQ ID NO: 33633 - protein, 362 aa, Arabidopsis thaliana; identical to SEQ ID NO: 30043
  peptide (1)..(362): Ceres Seq. ID no. 13490431

SEQ ID NO: 33634 - DNA, 1623 bp, Arabidopsis thaliana; identical to SEQ ID NO: 30044
  misc_feature (1)..(1623): Ceres Seq. ID no. 12335112
  misc_feature (1)..(1623): Ortholog of  Ceres SEQ ID NO 13600220 as cited in SEQ ID NO 0

SEQ ID NO: 33635 - protein, 506 aa, Arabidopsis thaliana; identical to SEQ ID NO: 30045
  peptide (1)..(506): Ceres Seq. ID no. 12335113

SEQ ID NO: 33636 - protein, 503 aa, Arabidopsis thaliana; identical to SEQ ID NO: 30046
  peptide (1)..(503): Ceres Seq. ID no. 12335114

SEQ ID NO: 33637 - protein, 418 aa, Arabidopsis thaliana; identical to SEQ ID NO: 30047
  peptide (1)..(418): Ceres Seq. ID no. 12335115

SEQ ID NO: 33638 - DNA, 1868 bp, Arabidopsis thaliana; identical to SEQ ID NO: 30048
  misc_feature (1)..(1868): Ceres Seq. ID no. 12333644
  misc_feature (1)..(1868): Ortholog of  Ceres SEQ ID NO 14310375 as cited in SEQ ID NO 59612

SEQ ID NO: 33639 - protein, 488 aa, Arabidopsis thaliana; identical to SEQ ID NO: 30049
  peptide (1)..(488): Ceres Seq. ID no. 12333645

SEQ ID NO: 33640 - protein, 466 aa, Arabidopsis thaliana; identical to SEQ ID NO: 30050
  peptide (1)..(466): Ceres Seq. ID no. 12333646

SEQ ID NO: 33641 - protein, 451 aa, Arabidopsis thaliana; identical to SEQ ID NO: 30051
  peptide (1)..(451): Ceres Seq. ID no. 12333647

SEQ ID NO: 33642 - DNA, 872 bp, Arabidopsis thaliana; identical to SEQ ID NO: 30052
  misc_feature (1)..(872): Ceres Seq. ID no. 12333983
  misc_feature (1)..(872): Ortholog of  Ceres SEQ ID NO 14302000 as cited in SEQ ID NO 52175
  misc_feature (1)..(872): Ortholog of  Ceres SEQ ID NO 14316371 as cited in SEQ ID NO 60113

SEQ ID NO: 33643 - protein, 232 aa, Arabidopsis thaliana; identical to SEQ ID NO: 30053
  peptide (1)..(232): Ceres Seq. ID no. 12333984

SEQ ID NO: 33644 - protein, 204 aa, Arabidopsis thaliana; identical to SEQ ID NO: 30054
  peptide (1)..(204): Ceres Seq. ID no. 12333985

SEQ ID NO: 33645 - protein, 139 aa, Arabidopsis thaliana; identical to SEQ ID NO: 30055
  peptide (1)..(139): Ceres Seq. ID no. 12333986

SEQ ID NO: 33646 - DNA, 1436 bp, Arabidopsis thaliana; identical to SEQ ID NO: 30056
  misc_feature (1)..(1436): Ceres Seq. ID no. 12333640
  misc_feature (1)..(1436): Ortholog of  Ceres SEQ ID NO 13582297 as cited in SEQ ID NO 56486
  misc_feature (1)..(1436): Ortholog of  Ceres SEQ ID NO 13586936 as cited in SEQ ID NO 0

SEQ ID NO: 33647 - protein, 356 aa, Arabidopsis thaliana; identical to SEQ ID NO: 30057
  peptide (1)..(356): Ceres Seq. ID no. 12333641

SEQ ID NO: 33648 - protein, 355 aa, Arabidopsis thaliana; identical to SEQ ID NO: 30058
  peptide (1)..(355): Ceres Seq. ID no. 12333642

SEQ ID NO: 33649 - protein, 323 aa, Arabidopsis thaliana; identical to SEQ ID NO: 30059
  peptide (1)..(323): Ceres Seq. ID no. 12333643

SEQ ID NO: 33650 - DNA, 1349 bp, Arabidopsis thaliana; identical to SEQ ID NO: 30060
  misc_feature (1)..(1349): Ceres Seq. ID no. 12334159
  misc_feature (1)..(1349): Ortholog of  Ceres SEQ ID NO 15226049 as cited in SEQ ID NO 55683
  misc_feature (1)..(1349): Ortholog of  Ceres SEQ ID NO 13597225 as cited in SEQ ID NO 63994

SEQ ID NO: 33651 - protein, 394 aa, Arabidopsis thaliana; identical to SEQ ID NO: 30061
  peptide (1)..(394): Ceres Seq. ID no. 12334160

SEQ ID NO: 33652 - protein, 344 aa, Arabidopsis thaliana; identical to SEQ ID NO: 30062
  peptide (1)..(344): Ceres Seq. ID no. 12334161

SEQ ID NO: 33653 - protein, 335 aa, Arabidopsis thaliana; identical to SEQ ID NO: 30063
  peptide (1)..(335): Ceres Seq. ID no. 12334162

SEQ ID NO: 33654 - DNA, 1665 bp, Arabidopsis thaliana; identical to SEQ ID NO: 30064
  misc_feature (1)..(1665): Ceres Seq. ID no. 13489296
  misc_feature (1)..(1665): Ortholog of  Ceres SEQ ID NO 13648400 as cited in SEQ ID NO 20329
  misc_feature (1)..(1665): Ortholog of  Ceres SEQ ID NO 13659393 as cited in SEQ ID NO 67047
  misc_feature (1)..(1665): Ortholog of  Ceres SEQ ID NO 13654553 as cited in SEQ ID NO 68417
  misc_feature (1)..(1665): Ortholog of  Ceres SEQ ID NO 12635162 as cited in SEQ ID NO 0
  misc_feature (1)..(1665): Ortholog of  Ceres SEQ ID NO 15175178 as cited in SEQ ID NO 0

SEQ ID NO: 33655 - protein, 222 aa, Arabidopsis thaliana; identical to SEQ ID NO: 30065
  peptide (1)..(222): Ceres Seq. ID no. 13489297

SEQ ID NO: 33656 - protein, 210 aa, Arabidopsis thaliana; identical to SEQ ID NO: 30066
  peptide (1)..(210): Ceres Seq. ID no. 13489298

SEQ ID NO: 33657 - DNA, 762 bp, Arabidopsis thaliana; identical to SEQ ID NO: 30067
  misc_feature (1)..(762): Ceres Seq. ID no. 12482057
  misc_feature (1)..(762): Ortholog of  Ceres SEQ ID NO 15176693 as cited in SEQ ID NO 1078
  misc_feature (1)..(762): Ortholog of  Ceres SEQ ID NO 12615074 as cited in SEQ ID NO 62676
  misc_feature (1)..(762): Ortholog of  Ceres SEQ ID NO 13598819 as cited in SEQ ID NO 0
  misc_feature (1)..(762): Ortholog of  Ceres SEQ ID NO 13600371 as cited in SEQ ID NO 0

SEQ ID NO: 33658 - protein, 134 aa, Arabidopsis thaliana; identical to SEQ ID NO: 30068
  peptide (1)..(134): Ceres Seq. ID no. 12482058

SEQ ID NO: 33659 - protein, 123 aa, Arabidopsis thaliana; identical to SEQ ID NO: 30069
  peptide (1)..(123): Ceres Seq. ID no. 12482059

SEQ ID NO: 33660 - protein, 81 aa, Arabidopsis thaliana; identical to SEQ ID NO: 30070
  peptide (1)..(81): Ceres Seq. ID no. 12482060

SEQ ID NO: 33661 - DNA, 1787 bp, Arabidopsis thaliana; identical to SEQ ID NO: 30071
  misc_feature (1)..(1787): Ceres Seq. ID no. 13500097
  misc_feature (1)..(1787): Ortholog of  Ceres SEQ ID NO 15168908 as cited in SEQ ID NO 20765

SEQ ID NO: 33662 - protein, 473 aa, Arabidopsis thaliana; identical to SEQ ID NO: 30072
  peptide (1)..(473): Ceres Seq. ID no. 13500098

SEQ ID NO: 33663 - protein, 442 aa, Arabidopsis thaliana; identical to SEQ ID NO: 30073
  peptide (1)..(442): Ceres Seq. ID no. 13500099

SEQ ID NO: 33664 - protein, 400 aa, Arabidopsis thaliana; identical to SEQ ID NO: 30074
  peptide (1)..(400): Ceres Seq. ID no. 13500100

SEQ ID NO: 33665 - DNA, 1556 bp, Arabidopsis thaliana; identical to SEQ ID NO: 30075
  misc_feature (1)..(1556): Ceres Seq. ID no. 12334251
  misc_feature (1)..(1556): Ortholog of  Ceres SEQ ID NO 14316553 as cited in SEQ ID NO 20761

SEQ ID NO: 33666 - protein, 360 aa, Arabidopsis thaliana; identical to SEQ ID NO: 30076
  peptide (1)..(360): Ceres Seq. ID no. 12334252

SEQ ID NO: 33667 - protein, 324 aa, Arabidopsis thaliana; identical to SEQ ID NO: 30077
  peptide (1)..(324): Ceres Seq. ID no. 12334253

SEQ ID NO: 33668 - protein, 296 aa, Arabidopsis thaliana; identical to SEQ ID NO: 30078
  peptide (1)..(296): Ceres Seq. ID no. 12334254

SEQ ID NO: 33669 - DNA, 465 bp, Arabidopsis thaliana; identical to SEQ ID NO: 30079
  misc_feature (1)..(465): Ceres Seq. ID no. 12558719
  misc_feature (1)..(465): Ortholog of  Ceres SEQ ID NO 13656408 as cited in SEQ ID NO 65810

SEQ ID NO: 33670 - protein, 92 aa, Arabidopsis thaliana [sequence omitted]

SEQ ID NO: 33671 - protein, 65 aa, Arabidopsis thaliana; identical to SEQ ID NO: 30081
  peptide (1)..(65): Ceres Seq. ID no. 12558721

SEQ ID NO: 33672 - protein, 64 aa, Arabidopsis thaliana; identical to SEQ ID NO: 30082
  peptide (1)..(64): Ceres Seq. ID no. 12558722

SEQ ID NO: 33673 - DNA, 1120 bp, Arabidopsis thaliana; identical to SEQ ID NO: 30083
  misc_feature (1)..(1120): Ceres Seq. ID no. 12335201
  misc_feature (1)..(1120): Ortholog of  Ceres SEQ ID NO 13581579 as cited in SEQ ID NO 58361
  misc_feature (1)..(1120): Ortholog of  Ceres SEQ ID NO 13596474 as cited in SEQ ID NO 62169
  misc_feature (1)..(1120): Ortholog of  Ceres SEQ ID NO 13598714 as cited in SEQ ID NO 62656
  misc_feature (1)..(1120): Ortholog of  Ceres SEQ ID NO 13597519 as cited in SEQ ID NO 64759
  misc_feature (1)..(1120): Ortholog of  Ceres SEQ ID NO 13597870 as cited in SEQ ID NO 64982
  misc_feature (1)..(1120): Ortholog of  Ceres SEQ ID NO 13595926 as cited in SEQ ID NO 67778
  misc_feature (1)..(1120): Ortholog of  Ceres SEQ ID NO 12567001 as cited in SEQ ID NO 0

SEQ ID NO: 33674 - protein, 328 aa, Arabidopsis thaliana; identical to SEQ ID NO: 30084
  peptide (1)..(328): Ceres Seq. ID no. 12335202

SEQ ID NO: 33675 - protein, 316 aa, Arabidopsis thaliana; identical to SEQ ID NO: 30085
  peptide (1)..(316): Ceres Seq. ID no. 12335203

SEQ ID NO: 33676 - DNA, 1441 bp, Arabidopsis thaliana; identical to SEQ ID NO: 30086
  misc_feature (1)..(1441): Ceres Seq. ID no. 12385648
  misc_feature (1)..(1441): Ortholog of  Ceres SEQ ID NO 13581327 as cited in SEQ ID NO 51165
  misc_feature (1)..(1441): Ortholog of  Ceres SEQ ID NO 12610002 as cited in SEQ ID NO 55823
  misc_feature (1)..(1441): Ortholog of  Ceres SEQ ID NO 14308310 as cited in SEQ ID NO 58573
  misc_feature (1)..(1441): Ortholog of  Ceres SEQ ID NO 14308795 as cited in SEQ ID NO 59140
  misc_feature (1)..(1441): Ortholog of  Ceres SEQ ID NO 14313354 as cited in SEQ ID NO 61520
  misc_feature (1)..(1441): Ortholog of  Ceres SEQ ID NO 13596744 as cited in SEQ ID NO 62765

SEQ ID NO: 33677 - protein, 296 aa, Arabidopsis thaliana; identical to SEQ ID NO: 30087
  peptide (1)..(296): Ceres Seq. ID no. 12385649

SEQ ID NO: 33678 - protein, 261 aa, Arabidopsis thaliana; identical to SEQ ID NO: 30088
  peptide (1)..(261): Ceres Seq. ID no. 12385650

SEQ ID NO: 33679 - protein, 256 aa, Arabidopsis thaliana; identical to SEQ ID NO: 30089
  peptide (1)..(256): Ceres Seq. ID no. 12385651

SEQ ID NO: 33680 - DNA, 893 bp, Arabidopsis thaliana; identical to SEQ ID NO: 30090
  misc_feature (1)..(893): Ceres Seq. ID no. 12322897
  misc_feature (1)..(893): Ortholog of  Ceres SEQ ID NO 15176514 as cited in SEQ ID NO 1114
  misc_feature (1)..(893): Ortholog of  Ceres SEQ ID NO 15173688 as cited in SEQ ID NO 61918
  misc_feature (1)..(893): Ortholog of  Ceres SEQ ID NO 13662513 as cited in SEQ ID NO 63303
  misc_feature (1)..(893): Ortholog of  Ceres SEQ ID NO 12616929 as cited in SEQ ID NO 63962
  misc_feature (1)..(893): Ortholog of  Ceres SEQ ID NO 15225803 as cited in SEQ ID NO 67623
  misc_feature (1)..(893): Ortholog of  Ceres SEQ ID NO 15174088 as cited in SEQ ID NO 0

SEQ ID NO: 33681 - protein, 246 aa, Arabidopsis thaliana; identical to SEQ ID NO: 30091
  peptide (1)..(246): Ceres Seq. ID no. 12322898

SEQ ID NO: 33682 - protein, 232 aa, Arabidopsis thaliana; identical to SEQ ID NO: 30092
  peptide (1)..(232): Ceres Seq. ID no. 12322899

SEQ ID NO: 33683 - protein, 170 aa, Arabidopsis thaliana; identical to SEQ ID NO: 30093
  peptide (1)..(170): Ceres Seq. ID no. 12322900

SEQ ID NO: 33684 - DNA, 866 bp, Arabidopsis thaliana; identical to SEQ ID NO: 30094
  misc_feature (1)..(866): Ceres Seq. ID no. 12396917
  misc_feature (1)..(866): Ortholog of  Ceres SEQ ID NO 12556855 as cited in SEQ ID NO 1
  misc_feature (1)..(866): Ortholog of  Ceres SEQ ID NO 12466413 as cited in SEQ ID NO 20470
  misc_feature (1)..(866): Ortholog of  Ceres SEQ ID NO 13661434 as cited in SEQ ID NO 61387
  misc_feature (1)..(866): Ortholog of  Ceres SEQ ID NO 15178869 as cited in SEQ ID NO 0

SEQ ID NO: 33685 - protein, 183 aa, Arabidopsis thaliana; identical to SEQ ID NO: 30095
  peptide (1)..(183): Ceres Seq. ID no. 12396918

SEQ ID NO: 33686 - protein, 165 aa, Arabidopsis thaliana; identical to SEQ ID NO: 30096
  peptide (1)..(165): Ceres Seq. ID no. 12396919

SEQ ID NO: 33687 - DNA, 783 bp, Arabidopsis thaliana; identical to SEQ ID NO: 30097
  misc_feature (1)..(783): Ceres Seq. ID no. 12323067
  misc_feature (1)..(783): Ortholog of  Ceres SEQ ID NO 13661969 as cited in SEQ ID NO 61215
  misc_feature (1)..(783): Ortholog of  Ceres SEQ ID NO 12614809 as cited in SEQ ID NO 68808
  misc_feature (1)..(783): Ortholog of  Ceres SEQ ID NO 12634366 as cited in SEQ ID NO 0
  misc_feature (1)..(783): Ortholog of  Ceres SEQ ID NO 14309113 as cited in SEQ ID NO 0
  misc_feature (1)..(783): Ortholog of  Ceres SEQ ID NO 15175257 as cited in SEQ ID NO 0

SEQ ID NO: 33688 - protein, 184 aa, Arabidopsis thaliana; identical to SEQ ID NO: 30098
  peptide (1)..(184): Ceres Seq. ID no. 12323068

SEQ ID NO: 33689 - protein, 138 aa, Arabidopsis thaliana; identical to SEQ ID NO: 30099
  peptide (1)..(138): Ceres Seq. ID no. 12323069

SEQ ID NO: 33690 - protein, 111 aa, Arabidopsis thaliana; identical to SEQ ID NO: 30100
  peptide (1)..(111): Ceres Seq. ID no. 12323070

SEQ ID NO: 33691 - DNA, 1493 bp, Arabidopsis thaliana; identical to SEQ ID NO: 30101
  misc_feature (1)..(1493): Ceres Seq. ID no. 13648561
  misc_feature (1)..(1493): Ortholog of  Ceres SEQ ID NO 13598234 as cited in SEQ ID NO 63461
  misc_feature (1)..(1493): Ortholog of  Ceres SEQ ID NO 13597254 as cited in SEQ ID NO 63858
  misc_feature (1)..(1493): Ortholog of  Ceres SEQ ID NO 12622778 as cited in SEQ ID NO 67562

SEQ ID NO: 33692 - protein, 384 aa, Arabidopsis thaliana; identical to SEQ ID NO: 30102
  peptide (1)..(384): Ceres Seq. ID no. 13648562

SEQ ID NO: 33693 - protein, 343 aa, Arabidopsis thaliana; identical to SEQ ID NO: 30103
  peptide (1)..(343): Ceres Seq. ID no. 13648563

SEQ ID NO: 33694 - protein, 305 aa, Arabidopsis thaliana; identical to SEQ ID NO: 30104
  peptide (1)..(305): Ceres Seq. ID no. 13648564

SEQ ID NO: 33695 - DNA, 716 bp, Arabidopsis thaliana; identical to SEQ ID NO: 30105
  misc_feature (1)..(716): Ceres Seq. ID no. 12396924
  misc_feature (1)..(716): Ortholog of  Ceres SEQ ID NO 15226850 as cited in SEQ ID NO 62501

SEQ ID NO: 33696 - protein, 149 aa, Arabidopsis thaliana; identical to SEQ ID NO: 27678
  peptide (1)..(149): Ceres Seq. ID no. 12396925

SEQ ID NO: 33697 - protein, 113 aa, Arabidopsis thaliana; identical to SEQ ID NO: 27679
  peptide (1)..(113): Ceres Seq. ID no. 12396926

SEQ ID NO: 33698 - protein, 98 aa, Arabidopsis thaliana; identical to SEQ ID NO: 27680
  peptide (1)..(98): Ceres Seq. ID no. 12396927

SEQ ID NO: 33699 - DNA, 1578 bp, Arabidopsis thaliana; identical to SEQ ID NO: 30109
  misc_feature (1)..(1578): Ceres Seq. ID no. 13487069
  misc_feature (1)..(1578): Ortholog of  Ceres SEQ ID NO 13638402 as cited in SEQ ID NO 60300
  misc_feature (1)..(1578): Ortholog of  Ceres SEQ ID NO 12618349 as cited in SEQ ID NO 64838
  misc_feature (1)..(1578): Ortholog of  Ceres SEQ ID NO 15176161 as cited in SEQ ID NO 0

SEQ ID NO: 33700 - protein, 361 aa, Arabidopsis thaliana; identical to SEQ ID NO: 30110
  peptide (1)..(361): Ceres Seq. ID no. 13487070

SEQ ID NO: 33701 - protein, 350 aa, Arabidopsis thaliana; identical to SEQ ID NO: 30111
  peptide (1)..(350): Ceres Seq. ID no. 13487071

SEQ ID NO: 33702 - protein, 268 aa, Arabidopsis thaliana; identical to SEQ ID NO: 30112
  peptide (1)..(268): Ceres Seq. ID no. 13487072

SEQ ID NO: 33703 - DNA, 908 bp, Arabidopsis thaliana; identical to SEQ ID NO: 30113
  misc_feature (1)..(908): Ceres Seq. ID no. 12388520
  misc_feature (1)..(908): Ortholog of  Ceres SEQ ID NO 15172691 as cited in SEQ ID NO 56148
  misc_feature (1)..(908): Ortholog of  Ceres SEQ ID NO 15174297 as cited in SEQ ID NO 0

SEQ ID NO: 33704 - protein, 149 aa, Arabidopsis thaliana; identical to SEQ ID NO: 29417
  peptide (1)..(149): Ceres Seq. ID no. 12388521

SEQ ID NO: 33705 - protein, 113 aa, Arabidopsis thaliana; identical to SEQ ID NO: 29418
  peptide (1)..(113): Ceres Seq. ID no. 12388522

SEQ ID NO: 33706 - protein, 98 aa, Arabidopsis thaliana; identical to SEQ ID NO: 29419
  peptide (1)..(98): Ceres Seq. ID no. 12388523

SEQ ID NO: 33707 - DNA, 1356 bp, Arabidopsis thaliana; identical to SEQ ID NO: 30117
  misc_feature (1)..(1356): Ceres Seq. ID no. 13504985
  misc_feature (1)..(1356): Ortholog of  Ceres SEQ ID NO 12583469 as cited in SEQ ID NO 51031
  misc_feature (1)..(1356): Ortholog of  Ceres SEQ ID NO 13597389 as cited in SEQ ID NO 63426
  misc_feature (1)..(1356): Ortholog of  Ceres SEQ ID NO 15180463 as cited in SEQ ID NO 0

SEQ ID NO: 33708 - protein, 379 aa, Arabidopsis thaliana; identical to SEQ ID NO: 30118
  peptide (1)..(379): Ceres Seq. ID no. 13504986

SEQ ID NO: 33709 - protein, 294 aa, Arabidopsis thaliana; identical to SEQ ID NO: 30119
  peptide (1)..(294): Ceres Seq. ID no. 13504987

SEQ ID NO: 33710 - protein, 208 aa, Arabidopsis thaliana; identical to SEQ ID NO: 30120
  peptide (1)..(208): Ceres Seq. ID no. 13504988

SEQ ID NO: 33711 - DNA, 747 bp, Arabidopsis thaliana; identical to SEQ ID NO: 30121
  misc_feature (1)..(747): Ceres Seq. ID no. 12397065
  misc_feature (1)..(747): Ortholog of  Ceres SEQ ID NO 12598105 as cited in SEQ ID NO 61032

SEQ ID NO: 33712 - protein, 173 aa, Arabidopsis thaliana; identical to SEQ ID NO: 30122
  peptide (1)..(173): Ceres Seq. ID no. 12397066

SEQ ID NO: 33713 - protein, 115 aa, Arabidopsis thaliana; identical to SEQ ID NO: 30123
  peptide (1)..(115): Ceres Seq. ID no. 12397067

SEQ ID NO: 33714 - protein, 114 aa, Arabidopsis thaliana; identical to SEQ ID NO: 30124
  peptide (1)..(114): Ceres Seq. ID no. 12397068

SEQ ID NO: 33715 - DNA, 1654 bp, Arabidopsis thaliana; identical to SEQ ID NO: 30125
  misc_feature (1)..(1654): Ceres Seq. ID no. 13496814
  misc_feature (1)..(1654): Ortholog of  Ceres SEQ ID NO 13656177 as cited in SEQ ID NO 64997

SEQ ID NO: 33716 - protein, 459 aa, Arabidopsis thaliana; identical to SEQ ID NO: 30126
  peptide (1)..(459): Ceres Seq. ID no. 13496815

SEQ ID NO: 33717 - protein, 427 aa, Arabidopsis thaliana; identical to SEQ ID NO: 20810
  peptide (1)..(427): Ceres Seq. ID no. 13496816

SEQ ID NO: 33718 - protein, 344 aa, Arabidopsis thaliana; identical to SEQ ID NO: 20811
  peptide (1)..(344): Ceres Seq. ID no. 13496817

SEQ ID NO: 33719 - DNA, 888 bp, Arabidopsis thaliana; identical to SEQ ID NO: 30129
  misc_feature (1)..(888): Ceres Seq. ID no. 12488396
  misc_feature (1)..(888): Ortholog of  Ceres SEQ ID NO 13594828 as cited in SEQ ID NO 56431
  misc_feature (1)..(888): Ortholog of  Ceres SEQ ID NO 14316363 as cited in SEQ ID NO 57222
  misc_feature (1)..(888): Ortholog of  Ceres SEQ ID NO 15177754 as cited in SEQ ID NO 57945
  misc_feature (1)..(888): Ortholog of  Ceres SEQ ID NO 13594354 as cited in SEQ ID NO 58082
  misc_feature (1)..(888): Ortholog of  Ceres SEQ ID NO 14316408 as cited in SEQ ID NO 58228
  misc_feature (1)..(888): Ortholog of  Ceres SEQ ID NO 13528075 as cited in SEQ ID NO 60188
  misc_feature (1)..(888): Ortholog of  Ceres SEQ ID NO 13600483 as cited in SEQ ID NO 0

SEQ ID NO: 33720 - protein, 207 aa, Arabidopsis thaliana; identical to SEQ ID NO: 30130
  peptide (1)..(207): Ceres Seq. ID no. 12488397

SEQ ID NO: 33721 - protein, 188 aa, Arabidopsis thaliana; identical to SEQ ID NO: 30131
  peptide (1)..(188): Ceres Seq. ID no. 12488398

SEQ ID NO: 33722 - protein, 131 aa, Arabidopsis thaliana; identical to SEQ ID NO: 30132
  peptide (1)..(131): Ceres Seq. ID no. 12488399

SEQ ID NO: 33723 - DNA, 843 bp, Arabidopsis thaliana; identical to SEQ ID NO: 30133
  misc_feature (1)..(843): Ceres Seq. ID no. 13580431
  misc_feature (1)..(843): Ortholog of  Ceres SEQ ID NO 13661801 as cited in SEQ ID NO 61655
  misc_feature (1)..(843): Ortholog of  Ceres SEQ ID NO 13596450 as cited in SEQ ID NO 68838

SEQ ID NO: 33724 - protein, 217 aa, Arabidopsis thaliana; identical to SEQ ID NO: 30134
  peptide (1)..(217): Ceres Seq. ID no. 13580432

SEQ ID NO: 33725 - protein, 204 aa, Arabidopsis thaliana; identical to SEQ ID NO: 30135
  peptide (1)..(204): Ceres Seq. ID no. 13580433

SEQ ID NO: 33726 - protein, 136 aa, Arabidopsis thaliana; identical to SEQ ID NO: 30136
  peptide (1)..(136): Ceres Seq. ID no. 13580434

SEQ ID NO: 33727 - DNA, 649 bp, Arabidopsis thaliana; identical to SEQ ID NO: 30137
  misc_feature (1)..(649): Ceres Seq. ID no. 12324000
  misc_feature (1)..(649): Ortholog of  Ceres SEQ ID NO 12635845 as cited in SEQ ID NO 0

SEQ ID NO: 33728 - protein, 158 aa, Arabidopsis thaliana; identical to SEQ ID NO: 30138
  peptide (1)..(158): Ceres Seq. ID no. 12324001

SEQ ID NO: 33729 - protein, 137 aa, Arabidopsis thaliana; identical to SEQ ID NO: 30139
  peptide (1)..(137): Ceres Seq. ID no. 12324002

SEQ ID NO: 33730 - DNA, 825 bp, Arabidopsis thaliana; identical to SEQ ID NO: 30140
  misc_feature (1)..(825): Ceres Seq. ID no. 12322128
  misc_feature (1)..(825): Ortholog of  Ceres SEQ ID NO 12780822 as cited in SEQ ID NO 67471

SEQ ID NO: 33731 - protein, 231 aa, Arabidopsis thaliana; identical to SEQ ID NO: 30141
  peptide (1)..(231): Ceres Seq. ID no. 12322129

SEQ ID NO: 33732 - protein, 155 aa, Arabidopsis thaliana; identical to SEQ ID NO: 30142
  peptide (1)..(155): Ceres Seq. ID no. 12322130

SEQ ID NO: 33733 - protein, 145 aa, Arabidopsis thaliana; identical to SEQ ID NO: 30143
  peptide (1)..(145): Ceres Seq. ID no. 12322131

SEQ ID NO: 33734 - DNA, 2221 bp, Arabidopsis thaliana; identical to SEQ ID NO: 30144
  misc_feature (1)..(2221): Ceres Seq. ID no. 13490207
  misc_feature (1)..(2221): Ortholog of  Ceres SEQ ID NO 12584790 as cited in SEQ ID NO 62648
  misc_feature (1)..(2221): Ortholog of  Ceres SEQ ID NO 15178116 as cited in SEQ ID NO 0

SEQ ID NO: 33735 - protein, 327 aa, Arabidopsis thaliana; identical to SEQ ID NO: 30145
  peptide (1)..(327): Ceres Seq. ID no. 15218812

SEQ ID NO: 33736 - protein, 237 aa, Arabidopsis thaliana; identical to SEQ ID NO: 30146
  peptide (1)..(237): Ceres Seq. ID no. 15218813

SEQ ID NO: 33737 - DNA, 801 bp, Arabidopsis thaliana; identical to SEQ ID NO: 30147
  misc_feature (1)..(801): Ceres Seq. ID no. 12377352
  misc_feature (1)..(801): Ortholog of  Ceres SEQ ID NO 12608953 as cited in SEQ ID NO 51227
  misc_feature (1)..(801): Ortholog of  Ceres SEQ ID NO 12636917 as cited in SEQ ID NO 0
  misc_feature (1)..(801): Ortholog of  Ceres SEQ ID NO 14309430 as cited in SEQ ID NO 0

SEQ ID NO: 33738 - protein, 169 aa, Arabidopsis thaliana; identical to SEQ ID NO: 30148
  peptide (1)..(169): Ceres Seq. ID no. 12377353

SEQ ID NO: 33739 - protein, 142 aa, Arabidopsis thaliana; identical to SEQ ID NO: 30149
  peptide (1)..(142): Ceres Seq. ID no. 12377354

SEQ ID NO: 33740 - DNA, 897 bp, Arabidopsis thaliana; identical to SEQ ID NO: 30150
  misc_feature (1)..(897): Ceres Seq. ID no. 12394147
  misc_feature (1)..(897): Ortholog of  Ceres SEQ ID NO 15224382 as cited in SEQ ID NO 65962
  misc_feature (1)..(897): Ortholog of  Ceres SEQ ID NO 15174380 as cited in SEQ ID NO 0

SEQ ID NO: 33741 - protein, 113 aa, Arabidopsis thaliana; identical to SEQ ID NO: 30151
  peptide (1)..(113): Ceres Seq. ID no. 12394148

SEQ ID NO: 33742 - protein, 94 aa, Arabidopsis thaliana; identical to SEQ ID NO: 30152
  peptide (1)..(94): Ceres Seq. ID no. 12394149

SEQ ID NO: 33743 - DNA, 636 bp, Arabidopsis thaliana; identical to SEQ ID NO: 30153
  misc_feature (1)..(636): Ceres Seq. ID no. 12337350
  misc_feature (1)..(636): Ortholog of  Ceres SEQ ID NO 12597253 as cited in SEQ ID NO 62959

SEQ ID NO: 33744 - protein, 132 aa, Arabidopsis thaliana; identical to SEQ ID NO: 30154
  peptide (1)..(132): Ceres Seq. ID no. 12337351

SEQ ID NO: 33745 - DNA, 1105 bp, Arabidopsis thaliana; identical to SEQ ID NO: 30155
  misc_feature (1)..(1105): Ceres Seq. ID no. 12343433
  misc_feature (1)..(1105): Ortholog of  Ceres SEQ ID NO 13639109 as cited in SEQ ID NO 51131
  misc_feature (1)..(1105): Ortholog of  Ceres SEQ ID NO 13596346 as cited in SEQ ID NO 60879
  misc_feature (1)..(1105): Ortholog of  Ceres SEQ ID NO 15178104 as cited in SEQ ID NO 0

SEQ ID NO: 33746 - protein, 309 aa, Arabidopsis thaliana; identical to SEQ ID NO: 30156
  peptide (1)..(309): Ceres Seq. ID no. 12343434

SEQ ID NO: 33747 - protein, 273 aa, Arabidopsis thaliana; identical to SEQ ID NO: 30157
  peptide (1)..(273): Ceres Seq. ID no. 12343435

SEQ ID NO: 33748 - protein, 262 aa, Arabidopsis thaliana; identical to SEQ ID NO: 30158
  peptide (1)..(262): Ceres Seq. ID no. 12343436

SEQ ID NO: 33749 - DNA, 805 bp, Arabidopsis thaliana; identical to SEQ ID NO: 30159
  misc_feature (1)..(805): Ceres Seq. ID no. 12322655
  misc_feature (1)..(805): Ortholog of  Ceres SEQ ID NO 13594720 as cited in SEQ ID NO 52147

SEQ ID NO: 33750 - protein, 181 aa, Arabidopsis thaliana; identical to SEQ ID NO: 30160
  peptide (1)..(181): Ceres Seq. ID no. 12322656

SEQ ID NO: 33751 - DNA, 895 bp, Arabidopsis thaliana; identical to SEQ ID NO: 30161
  misc_feature (1)..(895): Ceres Seq. ID no. 12321347
  misc_feature (1)..(895): Ortholog of  Ceres SEQ ID NO 15178388 as cited in SEQ ID NO 1097

SEQ ID NO: 33752 - protein, 128 aa, Arabidopsis thaliana; identical to SEQ ID NO: 30162
  peptide (1)..(128): Ceres Seq. ID no. 12321348

SEQ ID NO: 33753 - protein, 65 aa, Arabidopsis thaliana; identical to SEQ ID NO: 30163
  peptide (1)..(65): Ceres Seq. ID no. 12321349

SEQ ID NO: 33754 - DNA, 2131 bp, Arabidopsis thaliana; identical to SEQ ID NO: 30164
  misc_feature (1)..(2131): Ceres Seq. ID no. 12326066
  misc_feature (1)..(2131): Ortholog of  Ceres SEQ ID NO 13597407 as cited in SEQ ID NO 64106

SEQ ID NO: 33755 - protein, 546 aa, Arabidopsis thaliana; identical to SEQ ID NO: 30165
  peptide (1)..(546): Ceres Seq. ID no. 12326067

SEQ ID NO: 33756 - protein, 493 aa, Arabidopsis thaliana; identical to SEQ ID NO: 30166
  peptide (1)..(493): Ceres Seq. ID no. 12326068

SEQ ID NO: 33757 - protein, 478 aa, Arabidopsis thaliana; identical to SEQ ID NO: 30167
  peptide (1)..(478): Ceres Seq. ID no. 12326069

SEQ ID NO: 33758 - DNA, 1075 bp, Arabidopsis thaliana; identical to SEQ ID NO: 30168
  misc_feature (1)..(1075): Ceres Seq. ID no. 12605070
  misc_feature (1)..(1075): Ortholog of  Ceres SEQ ID NO 14304626 as cited in SEQ ID NO 52955

SEQ ID NO: 33759 - protein, 300 aa, Arabidopsis thaliana; identical to SEQ ID NO: 30169
  peptide (1)..(300): Ceres Seq. ID no. 12605071

SEQ ID NO: 33760 - protein, 265 aa, Arabidopsis thaliana; identical to SEQ ID NO: 30170
  peptide (1)..(265): Ceres Seq. ID no. 12605072

SEQ ID NO: 33761 - DNA, 1139 bp, Arabidopsis thaliana; identical to SEQ ID NO: 22245
  misc_feature (1)..(1139): Ceres Seq. ID no. 12323678
  misc_feature (1)..(1139): Ortholog of  Ceres SEQ ID NO 15178299 as cited in SEQ ID NO 0
  misc_feature (1)..(1139): Ortholog of  Ceres SEQ ID NO 15226331 as cited in SEQ ID NO 0

SEQ ID NO: 33762 - protein, 217 aa, Arabidopsis thaliana; identical to SEQ ID NO: 22246
  peptide (1)..(217): Ceres Seq. ID no. 12323679

SEQ ID NO: 33763 - protein, 133 aa, Arabidopsis thaliana; identical to SEQ ID NO: 22247
  peptide (1)..(133): Ceres Seq. ID no. 12323680

SEQ ID NO: 33764 - DNA, 787 bp, Arabidopsis thaliana; identical to SEQ ID NO: 30174
  misc_feature (1)..(787): Ceres Seq. ID no. 12332031
  misc_feature (1)..(787): Ortholog of  Ceres SEQ ID NO 12557654 as cited in SEQ ID NO 12
  misc_feature (1)..(787): Ortholog of  Ceres SEQ ID NO 15175150 as cited in SEQ ID NO 0

SEQ ID NO: 33765 - protein, 180 aa, Arabidopsis thaliana; identical to SEQ ID NO: 30175
  peptide (1)..(180): Ceres Seq. ID no. 12332032

SEQ ID NO: 33766 - protein, 153 aa, Arabidopsis thaliana; identical to SEQ ID NO: 30176
  peptide (1)..(153): Ceres Seq. ID no. 12332033

SEQ ID NO: 33767 - protein, 94 aa, Arabidopsis thaliana; identical to SEQ ID NO: 30177
  peptide (1)..(94): Ceres Seq. ID no. 12332034

SEQ ID NO: 33768 - DNA, 897 bp, Arabidopsis thaliana; identical to SEQ ID NO: 30178
  misc_feature (1)..(897): Ceres Seq. ID no. 13490026
  misc_feature (1)..(897): Ortholog of  Ceres SEQ ID NO 14314534 as cited in SEQ ID NO 52434
  misc_feature (1)..(897): Ortholog of  Ceres SEQ ID NO 13656436 as cited in SEQ ID NO 69154

SEQ ID NO: 33769 - protein, 217 aa, Arabidopsis thaliana; identical to SEQ ID NO: 30179
  peptide (1)..(217): Ceres Seq. ID no. 13490027

SEQ ID NO: 33770 - DNA, 1307 bp, Arabidopsis thaliana; identical to SEQ ID NO: 30180
  misc_feature (1)..(1307): Ceres Seq. ID no. 12335859
  misc_feature (1)..(1307): Ortholog of  Ceres SEQ ID NO 13596281 as cited in SEQ ID NO 68146

SEQ ID NO: 33771 - protein, 366 aa, Arabidopsis thaliana; identical to SEQ ID NO: 30181
  peptide (1)..(366): Ceres Seq. ID no. 12335860

SEQ ID NO: 33772 - protein, 355 aa, Arabidopsis thaliana; identical to SEQ ID NO: 30182
  peptide (1)..(355): Ceres Seq. ID no. 12335861

SEQ ID NO: 33773 - DNA, 1213 bp, Arabidopsis thaliana; identical to SEQ ID NO: 30183
  misc_feature (1)..(1213): Ceres Seq. ID no. 12339711
  misc_feature (1)..(1213): Ortholog of  Ceres SEQ ID NO 14306970 as cited in SEQ ID NO 53904
  misc_feature (1)..(1213): Ortholog of  Ceres SEQ ID NO 13597320 as cited in SEQ ID NO 63901

SEQ ID NO: 33774 - protein, 158 aa, Arabidopsis thaliana; identical to SEQ ID NO: 30184
  peptide (1)..(158): Ceres Seq. ID no. 12339712

SEQ ID NO: 33775 - protein, 151 aa, Arabidopsis thaliana; identical to SEQ ID NO: 30185
  peptide (1)..(151): Ceres Seq. ID no. 12339713

SEQ ID NO: 33776 - protein, 138 aa, Arabidopsis thaliana; identical to SEQ ID NO: 30186
  peptide (1)..(138): Ceres Seq. ID no. 12339714

SEQ ID NO: 33777 - DNA, 1224 bp, Arabidopsis thaliana; identical to SEQ ID NO: 30187
  misc_feature (1)..(1224): Ceres Seq. ID no. 12333622
  misc_feature (1)..(1224): Ortholog of  Ceres SEQ ID NO 14306797 as cited in SEQ ID NO 53354
  misc_feature (1)..(1224): Ortholog of  Ceres SEQ ID NO 15176525 as cited in SEQ ID NO 54495
  misc_feature (1)..(1224): Ortholog of  Ceres SEQ ID NO 15169519 as cited in SEQ ID NO 67237

SEQ ID NO: 33778 - protein, 358 aa, Arabidopsis thaliana; identical to SEQ ID NO: 30188
  peptide (1)..(358): Ceres Seq. ID no. 12333623

SEQ ID NO: 33779 - protein, 341 aa, Arabidopsis thaliana; identical to SEQ ID NO: 30189
  peptide (1)..(341): Ceres Seq. ID no. 12333624

SEQ ID NO: 33780 - protein, 329 aa, Arabidopsis thaliana; identical to SEQ ID NO: 30190
  peptide (1)..(329): Ceres Seq. ID no. 12333625

SEQ ID NO: 33781 - DNA, 765 bp, Arabidopsis thaliana; identical to SEQ ID NO: 30191
  misc_feature (1)..(765): Ceres Seq. ID no. 12333665
  misc_feature (1)..(765): Ortholog of  Ceres SEQ ID NO 14309365 as cited in SEQ ID NO 0

SEQ ID NO: 33782 - protein, 203 aa, Arabidopsis thaliana; identical to SEQ ID NO: 30192
  peptide (1)..(203): Ceres Seq. ID no. 12333666

SEQ ID NO: 33783 - protein, 186 aa, Arabidopsis thaliana; identical to SEQ ID NO: 30193
  peptide (1)..(186): Ceres Seq. ID no. 12333667

SEQ ID NO: 33784 - protein, 180 aa, Arabidopsis thaliana; identical to SEQ ID NO: 30194
  peptide (1)..(180): Ceres Seq. ID no. 12333668

SEQ ID NO: 33785 - DNA, 1364 bp, Arabidopsis thaliana; identical to SEQ ID NO: 30195
  misc_feature (1)..(1364): Ceres Seq. ID no. 12335499
  misc_feature (1)..(1364): Ortholog of  Ceres SEQ ID NO 15177842 as cited in SEQ ID NO 51547
  misc_feature (1)..(1364): Ortholog of  Ceres SEQ ID NO 13594859 as cited in SEQ ID NO 51974
  misc_feature (1)..(1364): Ortholog of  Ceres SEQ ID NO 13597887 as cited in SEQ ID NO 64295

SEQ ID NO: 33786 - protein, 177 aa, Arabidopsis thaliana; identical to SEQ ID NO: 30196
  peptide (1)..(177): Ceres Seq. ID no. 12335500

SEQ ID NO: 33787 - protein, 167 aa, Arabidopsis thaliana; identical to SEQ ID NO: 30197
  peptide (1)..(167): Ceres Seq. ID no. 12335501

SEQ ID NO: 33788 - protein, 166 aa, Arabidopsis thaliana; identical to SEQ ID NO: 30198
  peptide (1)..(166): Ceres Seq. ID no. 12335502

SEQ ID NO: 33789 - DNA, 1355 bp, Arabidopsis thaliana; identical to SEQ ID NO: 30199
  misc_feature (1)..(1355): Ceres Seq. ID no. 12325051
  misc_feature (1)..(1355): Ortholog of  Ceres SEQ ID NO 12615491 as cited in SEQ ID NO 62838

SEQ ID NO: 33790 - protein, 320 aa, Arabidopsis thaliana; identical to SEQ ID NO: 30200
  peptide (1)..(320): Ceres Seq. ID no. 12325052

SEQ ID NO: 33791 - protein, 212 aa, Arabidopsis thaliana; identical to SEQ ID NO: 30201
  peptide (1)..(212): Ceres Seq. ID no. 12325053

SEQ ID NO: 33792 - protein, 169 aa, Arabidopsis thaliana; identical to SEQ ID NO: 30202
  peptide (1)..(169): Ceres Seq. ID no. 12325054

SEQ ID NO: 33793 - DNA, 994 bp, Arabidopsis thaliana; identical to SEQ ID NO: 30203
  misc_feature (1)..(994): Ceres Seq. ID no. 13500011
  misc_feature (1)..(994): Ortholog of  Ceres SEQ ID NO 14301994 as cited in SEQ ID NO 56653
  misc_feature (1)..(994): Ortholog of  Ceres SEQ ID NO 13595658 as cited in SEQ ID NO 59888
  misc_feature (1)..(994): Ortholog of  Ceres SEQ ID NO 13661330 as cited in SEQ ID NO 61614
  misc_feature (1)..(994): Ortholog of  Ceres SEQ ID NO 13596025 as cited in SEQ ID NO 62024
  misc_feature (1)..(994): Ortholog of  Ceres SEQ ID NO 13662324 as cited in SEQ ID NO 62162
  misc_feature (1)..(994): Ortholog of  Ceres SEQ ID NO 12625713 as cited in SEQ ID NO 64160
  misc_feature (1)..(994): Ortholog of  Ceres SEQ ID NO 14301782 as cited in SEQ ID NO 66788
  misc_feature (1)..(994): Ortholog of  Ceres SEQ ID NO 14302860 as cited in SEQ ID NO 67667
  misc_feature (1)..(994): Ortholog of  Ceres SEQ ID NO 15174373 as cited in SEQ ID NO 0

SEQ ID NO: 33794 - protein, 272 aa, Arabidopsis thaliana; identical to SEQ ID NO: 30204
  peptide (1)..(272): Ceres Seq. ID no. 13500012

SEQ ID NO: 33795 - protein, 264 aa, Arabidopsis thaliana; identical to SEQ ID NO: 30205
  peptide (1)..(264): Ceres Seq. ID no. 13500013

SEQ ID NO: 33796 - protein, 244 aa, Arabidopsis thaliana; identical to SEQ ID NO: 30206
  peptide (1)..(244): Ceres Seq. ID no. 13500014

SEQ ID NO: 33797 - DNA, 1179 bp, Arabidopsis thaliana; identical to SEQ ID NO: 30207
  misc_feature (1)..(1179): Ceres Seq. ID no. 12335675
  misc_feature (1)..(1179): Ortholog of  Ceres SEQ ID NO 13594482 as cited in SEQ ID NO 51285
  misc_feature (1)..(1179): Ortholog of  Ceres SEQ ID NO 13655381 as cited in SEQ ID NO 63359
  misc_feature (1)..(1179): Ortholog of  Ceres SEQ ID NO 12617583 as cited in SEQ ID NO 64897

SEQ ID NO: 33798 - protein, 353 aa, Arabidopsis thaliana; identical to SEQ ID NO: 30208
  peptide (1)..(353): Ceres Seq. ID no. 12335676

SEQ ID NO: 33799 - protein, 343 aa, Arabidopsis thaliana; identical to SEQ ID NO: 30209
  peptide (1)..(343): Ceres Seq. ID no. 12335677

SEQ ID NO: 33800 - protein, 285 aa, Arabidopsis thaliana; identical to SEQ ID NO: 30210
  peptide (1)..(285): Ceres Seq. ID no. 12335678

SEQ ID NO: 33801 - DNA, 1132 bp, Arabidopsis thaliana; identical to SEQ ID NO: 30211
  misc_feature (1)..(1132): Ceres Seq. ID no. 13490255
  misc_feature (1)..(1132): Ortholog of  Ceres SEQ ID NO 13504447 as cited in SEQ ID NO 57609

SEQ ID NO: 33802 - protein, 202 aa, Arabidopsis thaliana; identical to SEQ ID NO: 30212
  peptide (1)..(202): Ceres Seq. ID no. 13490256

SEQ ID NO: 33803 - DNA, 1440 bp, Arabidopsis thaliana; identical to SEQ ID NO: 30213
  misc_feature (1)..(1440): Ceres Seq. ID no. 13488422
  misc_feature (1)..(1440): Ortholog of  Ceres SEQ ID NO 15175775 as cited in SEQ ID NO 57075

SEQ ID NO: 33804 - protein, 451 aa, Arabidopsis thaliana; identical to SEQ ID NO: 30214
  peptide (1)..(451): Ceres Seq. ID no. 13488423

SEQ ID NO: 33805 - protein, 417 aa, Arabidopsis thaliana; identical to SEQ ID NO: 30215
  peptide (1)..(417): Ceres Seq. ID no. 13488424

SEQ ID NO: 33806 - protein, 315 aa, Arabidopsis thaliana; identical to SEQ ID NO: 30216
  peptide (1)..(315): Ceres Seq. ID no. 13488425

SEQ ID NO: 33807 - DNA, 716 bp, Arabidopsis thaliana; identical to SEQ ID NO: 30217
  misc_feature (1)..(716): Ceres Seq. ID no. 13499521
  misc_feature (1)..(716): Ortholog of  Ceres SEQ ID NO 12624943 as cited in SEQ ID NO 67802

SEQ ID NO: 33808 - protein, 202 aa, Arabidopsis thaliana; identical to SEQ ID NO: 30218
  peptide (1)..(202): Ceres Seq. ID no. 13499522

SEQ ID NO: 33809 - protein, 196 aa, Arabidopsis thaliana; identical to SEQ ID NO: 30219
  peptide (1)..(196): Ceres Seq. ID no. 13499523

SEQ ID NO: 33810 - protein, 136 aa, Arabidopsis thaliana; identical to SEQ ID NO: 30220
  peptide (1)..(136): Ceres Seq. ID no. 13499524

SEQ ID NO: 33811 - DNA, 1022 bp, Arabidopsis thaliana; identical to SEQ ID NO: 30221
  misc_feature (1)..(1022): Ceres Seq. ID no. 12393636
  misc_feature (1)..(1022): Ortholog of  Ceres SEQ ID NO 13595782 as cited in SEQ ID NO 57677
  misc_feature (1)..(1022): Ortholog of  Ceres SEQ ID NO 13596009 as cited in SEQ ID NO 68258

SEQ ID NO: 33812 - protein, 171 aa, Arabidopsis thaliana; identical to SEQ ID NO: 30222
  peptide (1)..(171): Ceres Seq. ID no. 12393637

SEQ ID NO: 33813 - protein, 166 aa, Arabidopsis thaliana; identical to SEQ ID NO: 30223
  peptide (1)..(166): Ceres Seq. ID no. 12393638

SEQ ID NO: 33814 - protein, 120 aa, Arabidopsis thaliana; identical to SEQ ID NO: 30224
  peptide (1)..(120): Ceres Seq. ID no. 12393639

SEQ ID NO: 33815 - DNA, 1072 bp, Arabidopsis thaliana; identical to SEQ ID NO: 30225
  misc_feature (1)..(1072): Ceres Seq. ID no. 12394892
  misc_feature (1)..(1072): Ortholog of  Ceres SEQ ID NO 13594416 as cited in SEQ ID NO 51058
  misc_feature (1)..(1072): Ortholog of  Ceres SEQ ID NO 13596609 as cited in SEQ ID NO 63070
  misc_feature (1)..(1072): Ortholog of  Ceres SEQ ID NO 12616895 as cited in SEQ ID NO 63909
  misc_feature (1)..(1072): Ortholog of  Ceres SEQ ID NO 14302096 as cited in SEQ ID NO 68356
  misc_feature (1)..(1072): Ortholog of  Ceres SEQ ID NO 13598574 as cited in SEQ ID NO 69083

SEQ ID NO: 33816 - protein, 288 aa, Arabidopsis thaliana; identical to SEQ ID NO: 30226
  peptide (1)..(288): Ceres Seq. ID no. 12394893

SEQ ID NO: 33817 - protein, 269 aa, Arabidopsis thaliana; identical to SEQ ID NO: 30227
  peptide (1)..(269): Ceres Seq. ID no. 12394894

SEQ ID NO: 33818 - protein, 192 aa, Arabidopsis thaliana; identical to SEQ ID NO: 30228
  peptide (1)..(192): Ceres Seq. ID no. 12394895

SEQ ID NO: 33819 - DNA, 1209 bp, Arabidopsis thaliana; identical to SEQ ID NO: 30229
  misc_feature (1)..(1209): Ceres Seq. ID no. 12334293
  misc_feature (1)..(1209): Ortholog of  Ceres SEQ ID NO 14311074 as cited in SEQ ID NO 53253

SEQ ID NO: 33820 - protein, 308 aa, Arabidopsis thaliana; identical to SEQ ID NO: 30230
  peptide (1)..(308): Ceres Seq. ID no. 12334294

SEQ ID NO: 33821 - protein, 279 aa, Arabidopsis thaliana; identical to SEQ ID NO: 30231
  peptide (1)..(279): Ceres Seq. ID no. 12334295

SEQ ID NO: 33822 - DNA, 1609 bp, Arabidopsis thaliana; identical to SEQ ID NO: 30232
  misc_feature (1)..(1609): Ceres Seq. ID no. 13491644
  misc_feature (1)..(1609): Ortholog of  Ceres SEQ ID NO 15178767 as cited in SEQ ID NO 55317
  misc_feature (1)..(1609): Ortholog of  Ceres SEQ ID NO 13657647 as cited in SEQ ID NO 66399

SEQ ID NO: 33823 - protein, 443 aa, Arabidopsis thaliana; identical to SEQ ID NO: 30233
  peptide (1)..(443): Ceres Seq. ID no. 13491645

SEQ ID NO: 33824 - protein, 372 aa, Arabidopsis thaliana; identical to SEQ ID NO: 30234
  peptide (1)..(372): Ceres Seq. ID no. 13491646

SEQ ID NO: 33825 - protein, 371 aa, Arabidopsis thaliana; identical to SEQ ID NO: 30235
  peptide (1)..(371): Ceres Seq. ID no. 13491647

SEQ ID NO: 33826 - DNA, 677 bp, Arabidopsis thaliana; identical to SEQ ID NO: 23436
  misc_feature (1)..(677): Ceres Seq. ID no. 12561632
  misc_feature (1)..(677): Ortholog of  Ceres SEQ ID NO 13599506 as cited in SEQ ID NO 334
  misc_feature (1)..(677): Ortholog of  Ceres SEQ ID NO 13598157 as cited in SEQ ID NO 61570
  misc_feature (1)..(677): Ortholog of  Ceres SEQ ID NO 15175549 as cited in SEQ ID NO 0

SEQ ID NO: 33827 - protein, 153 aa, Arabidopsis thaliana; identical to SEQ ID NO: 23437
  peptide (1)..(153): Ceres Seq. ID no. 12561633

SEQ ID NO: 33828 - protein, 134 aa, Arabidopsis thaliana; identical to SEQ ID NO: 23438
  peptide (1)..(134): Ceres Seq. ID no. 12561634

SEQ ID NO: 33829 - DNA, 2764 bp, Arabidopsis thaliana; identical to SEQ ID NO: 27071
  misc_feature (1)..(2764): Ceres Seq. ID no. 13491797
  misc_feature (1)..(2764): Ortholog of  Ceres SEQ ID NO 13598926 as cited in SEQ ID NO 0

SEQ ID NO: 33830 - protein, 873 aa, Arabidopsis thaliana; identical to SEQ ID NO: 27072
  peptide (1)..(873): Ceres Seq. ID no. 13491798

SEQ ID NO: 33831 - protein, 858 aa, Arabidopsis thaliana; identical to SEQ ID NO: 27073
  peptide (1)..(858): Ceres Seq. ID no. 13491799

SEQ ID NO: 33832 - protein, 721 aa, Arabidopsis thaliana; identical to SEQ ID NO: 27074
  peptide (1)..(721): Ceres Seq. ID no. 13491800

SEQ ID NO: 33833 - DNA, 1515 bp, Arabidopsis thaliana; identical to SEQ ID NO: 30243
  misc_feature (1)..(1515): Ceres Seq. ID no. 12334769
  misc_feature (1)..(1515): Ortholog of  Ceres SEQ ID NO 15177674 as cited in SEQ ID NO 52629
  misc_feature (1)..(1515): Ortholog of  Ceres SEQ ID NO 13596541 as cited in SEQ ID NO 62372

SEQ ID NO: 33834 - protein, 184 aa, Arabidopsis thaliana; identical to SEQ ID NO: 30244
  peptide (1)..(184): Ceres Seq. ID no. 12334770

SEQ ID NO: 33835 - protein, 142 aa, Arabidopsis thaliana; identical to SEQ ID NO: 30245
  peptide (1)..(142): Ceres Seq. ID no. 12334771

SEQ ID NO: 33836 - protein, 115 aa, Arabidopsis thaliana; identical to SEQ ID NO: 30246
  peptide (1)..(115): Ceres Seq. ID no. 12334772

SEQ ID NO: 33837 - DNA, 1758 bp, Arabidopsis thaliana; identical to SEQ ID NO: 30247
  misc_feature (1)..(1758): Ceres Seq. ID no. 12324212
  misc_feature (1)..(1758): Ortholog of  Ceres SEQ ID NO 13581563 as cited in SEQ ID NO 58942
  misc_feature (1)..(1758): Ortholog of  Ceres SEQ ID NO 13658707 as cited in SEQ ID NO 66286
  misc_feature (1)..(1758): Ortholog of  Ceres SEQ ID NO 13654528 as cited in SEQ ID NO 68080

SEQ ID NO: 33838 - protein, 455 aa, Arabidopsis thaliana; identical to SEQ ID NO: 30248
  peptide (1)..(455): Ceres Seq. ID no. 12324213

SEQ ID NO: 33839 - protein, 453 aa, Arabidopsis thaliana; identical to SEQ ID NO: 30249
  peptide (1)..(453): Ceres Seq. ID no. 12324214

SEQ ID NO: 33840 - DNA, 1235 bp, Arabidopsis thaliana; identical to SEQ ID NO: 30250
  misc_feature (1)..(1235): Ceres Seq. ID no. 12371716
  misc_feature (1)..(1235): Ortholog of  Ceres SEQ ID NO 14311854 as cited in SEQ ID NO 51455

SEQ ID NO: 33841 - protein, 365 aa, Arabidopsis thaliana; identical to SEQ ID NO: 30251
  peptide (1)..(365): Ceres Seq. ID no. 12371717

SEQ ID NO: 33842 - protein, 364 aa, Arabidopsis thaliana; identical to SEQ ID NO: 30252
  peptide (1)..(364): Ceres Seq. ID no. 12371718

SEQ ID NO: 33843 - protein, 323 aa, Arabidopsis thaliana; identical to SEQ ID NO: 30253
  peptide (1)..(323): Ceres Seq. ID no. 12371719

SEQ ID NO: 33844 - DNA, 1325 bp, Arabidopsis thaliana; identical to SEQ ID NO: 30254
  misc_feature (1)..(1325): Ceres Seq. ID no. 13500101
  misc_feature (1)..(1325): Ortholog of  Ceres SEQ ID NO 13664220 as cited in SEQ ID NO 61151
  misc_feature (1)..(1325): Ortholog of  Ceres SEQ ID NO 13597477 as cited in SEQ ID NO 65160

SEQ ID NO: 33845 - protein, 325 aa, Arabidopsis thaliana; identical to SEQ ID NO: 30255
  peptide (1)..(325): Ceres Seq. ID no. 13500102

SEQ ID NO: 33846 - DNA, 1628 bp, Arabidopsis thaliana; identical to SEQ ID NO: 30256
  misc_feature (1)..(1628): Ceres Seq. ID no. 12395605
  misc_feature (1)..(1628): Ortholog of  Ceres SEQ ID NO 15174513 as cited in SEQ ID NO 58979
  misc_feature (1)..(1628): Ortholog of  Ceres SEQ ID NO 13584616 as cited in SEQ ID NO 65234
  misc_feature (1)..(1628): Ortholog of  Ceres SEQ ID NO 15178939 as cited in SEQ ID NO 0

SEQ ID NO: 33847 - protein, 458 aa, Arabidopsis thaliana; identical to SEQ ID NO: 30257
  peptide (1)..(458): Ceres Seq. ID no. 12395606

SEQ ID NO: 33848 - protein, 419 aa, Arabidopsis thaliana; identical to SEQ ID NO: 30258
  peptide (1)..(419): Ceres Seq. ID no. 12395607

SEQ ID NO: 33849 - protein, 406 aa, Arabidopsis thaliana; identical to SEQ ID NO: 30259
  peptide (1)..(406): Ceres Seq. ID no. 12395608

SEQ ID NO: 33850 - DNA, 1823 bp, Arabidopsis thaliana; identical to SEQ ID NO: 30260
  misc_feature (1)..(1823): Ceres Seq. ID no. 12337378
  misc_feature (1)..(1823): Ortholog of  Ceres SEQ ID NO 14314945 as cited in SEQ ID NO 58031
  misc_feature (1)..(1823): Ortholog of  Ceres SEQ ID NO 13595833 as cited in SEQ ID NO 59877
  misc_feature (1)..(1823): Ortholog of  Ceres SEQ ID NO 13654452 as cited in SEQ ID NO 65792
  misc_feature (1)..(1823): Ortholog of  Ceres SEQ ID NO 13573778 as cited in SEQ ID NO 0

SEQ ID NO: 33851 - protein, 423 aa, Arabidopsis thaliana; identical to SEQ ID NO: 30261
  peptide (1)..(423): Ceres Seq. ID no. 12337379

SEQ ID NO: 33852 - protein, 390 aa, Arabidopsis thaliana; identical to SEQ ID NO: 30262
  peptide (1)..(390): Ceres Seq. ID no. 12337380

SEQ ID NO: 33853 - protein, 361 aa, Arabidopsis thaliana; identical to SEQ ID NO: 30263
  peptide (1)..(361): Ceres Seq. ID no. 12337381

SEQ ID NO: 33854 - DNA, 1663 bp, Arabidopsis thaliana; identical to SEQ ID NO: 30264
  misc_feature (1)..(1663): Ceres Seq. ID no. 13591657
  misc_feature (1)..(1663): Ortholog of  Ceres SEQ ID NO 15179007 as cited in SEQ ID NO 1038
  misc_feature (1)..(1663): Ortholog of  Ceres SEQ ID NO 15226449 as cited in SEQ ID NO 58879
  misc_feature (1)..(1663): Ortholog of  Ceres SEQ ID NO 13597146 as cited in SEQ ID NO 63311

SEQ ID NO: 33855 - protein, 476 aa, Arabidopsis thaliana; identical to SEQ ID NO: 30265
  peptide (1)..(476): Ceres Seq. ID no. 13591658

SEQ ID NO: 33856 - protein, 391 aa, Arabidopsis thaliana; identical to SEQ ID NO: 30266
  peptide (1)..(391): Ceres Seq. ID no. 13591659

SEQ ID NO: 33857 - protein, 327 aa, Arabidopsis thaliana; identical to SEQ ID NO: 30267
  peptide (1)..(327): Ceres Seq. ID no. 13591660

SEQ ID NO: 33858 - DNA, 1476 bp, Arabidopsis thaliana; identical to SEQ ID NO: 30268
  misc_feature (1)..(1476): Ceres Seq. ID no. 12422615
  misc_feature (1)..(1476): Ortholog of  Ceres SEQ ID NO 13661504 as cited in SEQ ID NO 61294
  misc_feature (1)..(1476): Ortholog of  Ceres SEQ ID NO 13596227 as cited in SEQ ID NO 68750
  misc_feature (1)..(1476): Ortholog of  Ceres SEQ ID NO 15179068 as cited in SEQ ID NO 0

SEQ ID NO: 33859 - protein, 368 aa, Arabidopsis thaliana; identical to SEQ ID NO: 30269
  peptide (1)..(368): Ceres Seq. ID no. 12422616

SEQ ID NO: 33860 - protein, 351 aa, Arabidopsis thaliana; identical to SEQ ID NO: 30270
  peptide (1)..(351): Ceres Seq. ID no. 12422617

SEQ ID NO: 33861 - protein, 325 aa, Arabidopsis thaliana; identical to SEQ ID NO: 30271
  peptide (1)..(325): Ceres Seq. ID no. 12422618

SEQ ID NO: 33862 - DNA, 1201 bp, Arabidopsis thaliana; identical to SEQ ID NO: 30272
  misc_feature (1)..(1201): Ceres Seq. ID no. 12384927
  misc_feature (1)..(1201): Ortholog of  Ceres SEQ ID NO 15174752 as cited in SEQ ID NO 53279
  misc_feature (1)..(1201): Ortholog of  Ceres SEQ ID NO 15226087 as cited in SEQ ID NO 58655

SEQ ID NO: 33863 - protein, 286 aa, Arabidopsis thaliana; identical to SEQ ID NO: 30273
  peptide (1)..(286): Ceres Seq. ID no. 12384928

SEQ ID NO: 33864 - DNA, 2221 bp, Arabidopsis thaliana; identical to SEQ ID NO: 30144
  misc_feature (1)..(2221): Ceres Seq. ID no. 13490207
  misc_feature (1)..(2221): Ortholog of  Ceres SEQ ID NO 12584790 as cited in SEQ ID NO 62648
  misc_feature (1)..(2221): Ortholog of  Ceres SEQ ID NO 15178116 as cited in SEQ ID NO 0

SEQ ID NO: 33865 - protein, 327 aa, Arabidopsis thaliana; identical to SEQ ID NO: 30145
  peptide (1)..(327): Ceres Seq. ID no. 15218812

SEQ ID NO: 33866 - protein, 237 aa, Arabidopsis thaliana; identical to SEQ ID NO: 30146
  peptide (1)..(237): Ceres Seq. ID no. 15218813

SEQ ID NO: 33867 - DNA, 1766 bp, Arabidopsis thaliana; identical to SEQ ID NO: 30277
  misc_feature (1)..(1766): Ceres Seq. ID no. 12348549
  misc_feature (1)..(1766): Ortholog of  Ceres SEQ ID NO 15171245 as cited in SEQ ID NO 52264
  misc_feature (1)..(1766): Ortholog of  Ceres SEQ ID NO 14303576 as cited in SEQ ID NO 68428

SEQ ID NO: 33868 - protein, 456 aa, Arabidopsis thaliana; identical to SEQ ID NO: 30278
  peptide (1)..(456): Ceres Seq. ID no. 12348550

SEQ ID NO: 33869 - protein, 409 aa, Arabidopsis thaliana; identical to SEQ ID NO: 30279
  peptide (1)..(409): Ceres Seq. ID no. 12348551

SEQ ID NO: 33870 - protein, 404 aa, Arabidopsis thaliana; identical to SEQ ID NO: 30280
  peptide (1)..(404): Ceres Seq. ID no. 12348552

SEQ ID NO: 33871 - DNA, 1015 bp, Arabidopsis thaliana; identical to SEQ ID NO: 30281
  misc_feature (1)..(1015): Ceres Seq. ID no. 12481977
  misc_feature (1)..(1015): Ortholog of  Ceres SEQ ID NO 14305357 as cited in SEQ ID NO 60046
  misc_feature (1)..(1015): Ortholog of  Ceres SEQ ID NO 14313511 as cited in SEQ ID NO 64459
  misc_feature (1)..(1015): Ortholog of  Ceres SEQ ID NO 14303006 as cited in SEQ ID NO 67498
  misc_feature (1)..(1015): Ortholog of  Ceres SEQ ID NO 13599627 as cited in SEQ ID NO 0

SEQ ID NO: 33872 - protein, 231 aa, Arabidopsis thaliana; identical to SEQ ID NO: 23905
  peptide (1)..(231): Ceres Seq. ID no. 12481978

SEQ ID NO: 33873 - DNA, 1941 bp, Arabidopsis thaliana; identical to SEQ ID NO: 30283
  misc_feature (1)..(1941): Ceres Seq. ID no. 13490571
  misc_feature (1)..(1941): Ortholog of  Ceres SEQ ID NO 15176081 as cited in SEQ ID NO 65838
  misc_feature (1)..(1941): Ortholog of  Ceres SEQ ID NO 13660287 as cited in SEQ ID NO 67316

SEQ ID NO: 33874 - protein, 507 aa, Arabidopsis thaliana; identical to SEQ ID NO: 30284
  peptide (1)..(507): Ceres Seq. ID no. 13490572

SEQ ID NO: 33875 - protein, 432 aa, Arabidopsis thaliana; identical to SEQ ID NO: 30285
  peptide (1)..(432): Ceres Seq. ID no. 13490573

SEQ ID NO: 33876 - protein, 399 aa, Arabidopsis thaliana; identical to SEQ ID NO: 30286
  peptide (1)..(399): Ceres Seq. ID no. 13490574

SEQ ID NO: 33877 - DNA, 632 bp, Arabidopsis thaliana; identical to SEQ ID NO: 30287
  misc_feature (1)..(632): Ceres Seq. ID no. 13490432
  misc_feature (1)..(632): Ortholog of  Ceres SEQ ID NO 14305840 as cited in SEQ ID NO 52339

SEQ ID NO: 33878 - protein, 141 aa, Arabidopsis thaliana; identical to SEQ ID NO: 30288
  peptide (1)..(141): Ceres Seq. ID no. 13490433

SEQ ID NO: 33879 - protein, 119 aa, Arabidopsis thaliana; identical to SEQ ID NO: 30289
  peptide (1)..(119): Ceres Seq. ID no. 13490434

SEQ ID NO: 33880 - protein, 97 aa, Arabidopsis thaliana; identical to SEQ ID NO: 30290
  peptide (1)..(97): Ceres Seq. ID no. 13490435

SEQ ID NO: 33881 - DNA, 1072 bp, Arabidopsis thaliana; identical to SEQ ID NO: 30291
  misc_feature (1)..(1072): Ceres Seq. ID no. 13495755
  misc_feature (1)..(1072): Ortholog of  Ceres SEQ ID NO 12563124 as cited in SEQ ID NO 57104
  misc_feature (1)..(1072): Ortholog of  Ceres SEQ ID NO 13598373 as cited in SEQ ID NO 62185
  misc_feature (1)..(1072): Ortholog of  Ceres SEQ ID NO 12617639 as cited in SEQ ID NO 65219

SEQ ID NO: 33882 - protein, 114 aa, Arabidopsis thaliana; identical to SEQ ID NO: 27779
  peptide (1)..(114): Ceres Seq. ID no. 13495756

SEQ ID NO: 33883 - protein, 107 aa, Arabidopsis thaliana; identical to SEQ ID NO: 27780
  peptide (1)..(107): Ceres Seq. ID no. 13495757

SEQ ID NO: 33884 - protein, 105 aa, Arabidopsis thaliana; identical to SEQ ID NO: 30294
  peptide (1)..(105): Ceres Seq. ID no. 13495758

SEQ ID NO: 33885 - DNA, 1321 bp, Arabidopsis thaliana; identical to SEQ ID NO: 30295
  misc_feature (1)..(1321): Ceres Seq. ID no. 13497165
  misc_feature (1)..(1321): Ortholog of  Ceres SEQ ID NO 14310616 as cited in SEQ ID NO 55699
  misc_feature (1)..(1321): Ortholog of  Ceres SEQ ID NO 13596519 as cited in SEQ ID NO 62572
  misc_feature (1)..(1321): Ortholog of  Ceres SEQ ID NO 12625108 as cited in SEQ ID NO 68102

SEQ ID NO: 33886 - protein, 257 aa, Arabidopsis thaliana; identical to SEQ ID NO: 30296
  peptide (1)..(257): Ceres Seq. ID no. 13497166

SEQ ID NO: 33887 - protein, 210 aa, Arabidopsis thaliana; identical to SEQ ID NO: 30297
  peptide (1)..(210): Ceres Seq. ID no. 13497167

SEQ ID NO: 33888 - protein, 180 aa, Arabidopsis thaliana; identical to SEQ ID NO: 30298
  peptide (1)..(180): Ceres Seq. ID no. 13497168

SEQ ID NO: 33889 - DNA, 836 bp, Arabidopsis thaliana; identical to SEQ ID NO: 30299
  misc_feature (1)..(836): Ceres Seq. ID no. 13490390
  misc_feature (1)..(836): Ortholog of  Ceres SEQ ID NO 15173624 as cited in SEQ ID NO 60470

SEQ ID NO: 33890 - protein, 199 aa, Arabidopsis thaliana; identical to SEQ ID NO: 30300
  peptide (1)..(199): Ceres Seq. ID no. 13490391

SEQ ID NO: 33891 - protein, 147 aa, Arabidopsis thaliana; identical to SEQ ID NO: 30301
  peptide (1)..(147): Ceres Seq. ID no. 13490392

SEQ ID NO: 33892 - protein, 115 aa, Arabidopsis thaliana; identical to SEQ ID NO: 30302
  peptide (1)..(115): Ceres Seq. ID no. 13490393

SEQ ID NO: 33893 - DNA, 762 bp, Arabidopsis thaliana; identical to SEQ ID NO: 30303
  misc_feature (1)..(762): Ceres Seq. ID no. 13490575
  misc_feature (1)..(762): Ortholog of  Ceres SEQ ID NO 14313370 as cited in SEQ ID NO 67252

SEQ ID NO: 33894 - protein, 154 aa, Arabidopsis thaliana; identical to SEQ ID NO: 30304
  peptide (1)..(154): Ceres Seq. ID no. 13490576

SEQ ID NO: 33895 - protein, 90 aa, Arabidopsis thaliana; identical to SEQ ID NO: 30305
  peptide (1)..(90): Ceres Seq. ID no. 13490577

SEQ ID NO: 33896 - DNA, 1910 bp, Arabidopsis thaliana; identical to SEQ ID NO: 30306
  misc_feature (1)..(1910): Ceres Seq. ID no. 13509014
  misc_feature (1)..(1910): Ortholog of  Ceres SEQ ID NO 15177320 as cited in SEQ ID NO 52645
  misc_feature (1)..(1910): Ortholog of  Ceres SEQ ID NO 15171359 as cited in SEQ ID NO 57279
  misc_feature (1)..(1910): Ortholog of  Ceres SEQ ID NO 15168502 as cited in SEQ ID NO 60095
  misc_feature (1)..(1910): Ortholog of  Ceres SEQ ID NO 14314084 as cited in SEQ ID NO 63256
  misc_feature (1)..(1910): Ortholog of  Ceres SEQ ID NO 15169466 as cited in SEQ ID NO 66135
  misc_feature (1)..(1910): Ortholog of  Ceres SEQ ID NO 14303091 as cited in SEQ ID NO 66369

SEQ ID NO: 33897 - protein, 510 aa, Arabidopsis thaliana; identical to SEQ ID NO: 30307
  peptide (1)..(510): Ceres Seq. ID no. 13509015

SEQ ID NO: 33898 - protein, 500 aa, Arabidopsis thaliana [sequence omitted]

SEQ ID NO: 33899 - protein, 326 aa, Arabidopsis thaliana; identical to SEQ ID NO: 30309
  peptide (1)..(326): Ceres Seq. ID no. 13509017

SEQ ID NO: 33900 - DNA, 1448 bp, Arabidopsis thaliana; identical to SEQ ID NO: 30310
  misc_feature (1)..(1448): Ceres Seq. ID no. 13490608
  misc_feature (1)..(1448): Ortholog of  Ceres SEQ ID NO 12582068 as cited in SEQ ID NO 51073
  misc_feature (1)..(1448): Ortholog of  Ceres SEQ ID NO 14303255 as cited in SEQ ID NO 0

SEQ ID NO: 33901 - protein, 420 aa, Arabidopsis thaliana; identical to SEQ ID NO: 30311
  peptide (1)..(420): Ceres Seq. ID no. 13490609

SEQ ID NO: 33902 - protein, 381 aa, Arabidopsis thaliana; identical to SEQ ID NO: 30312
  peptide (1)..(381): Ceres Seq. ID no. 13490610

SEQ ID NO: 33903 - protein, 368 aa, Arabidopsis thaliana; identical to SEQ ID NO: 30313
  peptide (1)..(368): Ceres Seq. ID no. 13490611

SEQ ID NO: 33904 - DNA, 1121 bp, Arabidopsis thaliana; identical to SEQ ID NO: 30314
  misc_feature (1)..(1121): Ceres Seq. ID no. 12377558
  misc_feature (1)..(1121): Ortholog of  Ceres SEQ ID NO 14307351 as cited in SEQ ID NO 54892

SEQ ID NO: 33905 - protein, 242 aa, Arabidopsis thaliana; identical to SEQ ID NO: 24833
  peptide (1)..(242): Ceres Seq. ID no. 12377559

SEQ ID NO: 33906 - protein, 130 aa, Arabidopsis thaliana; identical to SEQ ID NO: 24834
  peptide (1)..(130): Ceres Seq. ID no. 12377560

SEQ ID NO: 33907 - DNA, 1066 bp, Arabidopsis thaliana; identical to SEQ ID NO: 30317
  misc_feature (1)..(1066): Ceres Seq. ID no. 13488512
  misc_feature (1)..(1066): Ortholog of  Ceres SEQ ID NO 15178847 as cited in SEQ ID NO 1145
  misc_feature (1)..(1066): Ortholog of  Ceres SEQ ID NO 14311253 as cited in SEQ ID NO 56483
  misc_feature (1)..(1066): Ortholog of  Ceres SEQ ID NO 13597435 as cited in SEQ ID NO 64073
  misc_feature (1)..(1066): Ortholog of  Ceres SEQ ID NO 13656209 as cited in SEQ ID NO 64393

SEQ ID NO: 33908 - protein, 227 aa, Arabidopsis thaliana; identical to SEQ ID NO: 30318
  peptide (1)..(227): Ceres Seq. ID no. 13488513

SEQ ID NO: 33909 - DNA, 934 bp, Arabidopsis thaliana; identical to SEQ ID NO: 30319
  misc_feature (1)..(934): Ceres Seq. ID no. 12340180
  misc_feature (1)..(934): Ortholog of  Ceres SEQ ID NO 13583408 as cited in SEQ ID NO 62616
  misc_feature (1)..(934): Ortholog of  Ceres SEQ ID NO 15179752 as cited in SEQ ID NO 63074

SEQ ID NO: 33910 - protein, 265 aa, Arabidopsis thaliana; identical to SEQ ID NO: 30320
  peptide (1)..(265): Ceres Seq. ID no. 12340181

SEQ ID NO: 33911 - protein, 242 aa, Arabidopsis thaliana; identical to SEQ ID NO: 23649
  peptide (1)..(242): Ceres Seq. ID no. 12340182

SEQ ID NO: 33912 - DNA, 1512 bp, Arabidopsis thaliana; identical to SEQ ID NO: 30322
  misc_feature (1)..(1512): Ceres Seq. ID no. 13487654
  misc_feature (1)..(1512): Ortholog of  Ceres SEQ ID NO 15177652 as cited in SEQ ID NO 56858

SEQ ID NO: 33913 - protein, 457 aa, Arabidopsis thaliana; identical to SEQ ID NO: 30323
  peptide (1)..(457): Ceres Seq. ID no. 13487655

SEQ ID NO: 33914 - protein, 450 aa, Arabidopsis thaliana; identical to SEQ ID NO: 30324
  peptide (1)..(450): Ceres Seq. ID no. 13487656

SEQ ID NO: 33915 - protein, 445 aa, Arabidopsis thaliana; identical to SEQ ID NO: 30325
  peptide (1)..(445): Ceres Seq. ID no. 13487657

SEQ ID NO: 33916 - DNA, 1190 bp, Arabidopsis thaliana; identical to SEQ ID NO: 30326
  misc_feature (1)..(1190): Ceres Seq. ID no. 12385283
  misc_feature (1)..(1190): Ortholog of  Ceres SEQ ID NO 15179676 as cited in SEQ ID NO 52442
  misc_feature (1)..(1190): Ortholog of  Ceres SEQ ID NO 13582807 as cited in SEQ ID NO 67806

SEQ ID NO: 33917 - protein, 285 aa, Arabidopsis thaliana; identical to SEQ ID NO: 30327
  peptide (1)..(285): Ceres Seq. ID no. 12385284

SEQ ID NO: 33918 - protein, 196 aa, Arabidopsis thaliana; identical to SEQ ID NO: 30328
  peptide (1)..(196): Ceres Seq. ID no. 12385285

SEQ ID NO: 33919 - protein, 185 aa, Arabidopsis thaliana; identical to SEQ ID NO: 30329
  peptide (1)..(185): Ceres Seq. ID no. 12385286

SEQ ID NO: 33920 - DNA, 821 bp, Arabidopsis thaliana; identical to SEQ ID NO: 30330
  misc_feature (1)..(821): Ceres Seq. ID no. 12482404
  misc_feature (1)..(821): Ortholog of  Ceres SEQ ID NO 13595022 as cited in SEQ ID NO 51963
  misc_feature (1)..(821): Ortholog of  Ceres SEQ ID NO 15178123 as cited in SEQ ID NO 52030
  misc_feature (1)..(821): Ortholog of  Ceres SEQ ID NO 14302532 as cited in SEQ ID NO 56531
  misc_feature (1)..(821): Ortholog of  Ceres SEQ ID NO 13598382 as cited in SEQ ID NO 62325
  misc_feature (1)..(821): Ortholog of  Ceres SEQ ID NO 15173967 as cited in SEQ ID NO 63578
  misc_feature (1)..(821): Ortholog of  Ceres SEQ ID NO 13591023 as cited in SEQ ID NO 67961
  misc_feature (1)..(821): Ortholog of  Ceres SEQ ID NO 12637935 as cited in SEQ ID NO 0

SEQ ID NO: 33921 - protein, 196 aa, Arabidopsis thaliana; identical to SEQ ID NO: 30331
  peptide (1)..(196): Ceres Seq. ID no. 12482405

SEQ ID NO: 33922 - DNA, 1033 bp, Arabidopsis thaliana; identical to SEQ ID NO: 30332
  misc_feature (1)..(1033): Ceres Seq. ID no. 12327338
  misc_feature (1)..(1033): Ortholog of  Ceres SEQ ID NO 14312391 as cited in SEQ ID NO 55070

SEQ ID NO: 33923 - protein, 302 aa, Arabidopsis thaliana; identical to SEQ ID NO: 30333
  peptide (1)..(302): Ceres Seq. ID no. 12327339

SEQ ID NO: 33924 - protein, 284 aa, Arabidopsis thaliana; identical to SEQ ID NO: 30334
  peptide (1)..(284): Ceres Seq. ID no. 12327340

SEQ ID NO: 33925 - DNA, 1929 bp, Arabidopsis thaliana; identical to SEQ ID NO: 30335
  misc_feature (1)..(1929): Ceres Seq. ID no. 12324454
  misc_feature (1)..(1929): Ortholog of  Ceres SEQ ID NO 12635836 as cited in SEQ ID NO 0
  misc_feature (1)..(1929): Ortholog of  Ceres SEQ ID NO 13599004 as cited in SEQ ID NO 0

SEQ ID NO: 33926 - protein, 388 aa, Arabidopsis thaliana; identical to SEQ ID NO: 30336
  peptide (1)..(388): Ceres Seq. ID no. 12324455

SEQ ID NO: 33927 - protein, 387 aa, Arabidopsis thaliana; identical to SEQ ID NO: 30337
  peptide (1)..(387): Ceres Seq. ID no. 12324456

SEQ ID NO: 33928 - protein, 249 aa, Arabidopsis thaliana; identical to SEQ ID NO: 30338
  peptide (1)..(249): Ceres Seq. ID no. 12324457

SEQ ID NO: 33929 - DNA, 1267 bp, Arabidopsis thaliana; identical to SEQ ID NO: 30339
  misc_feature (1)..(1267): Ceres Seq. ID no. 13487841
  misc_feature (1)..(1267): Ortholog of  Ceres SEQ ID NO 15172792 as cited in SEQ ID NO 52134
  misc_feature (1)..(1267): Ortholog of  Ceres SEQ ID NO 13502622 as cited in SEQ ID NO 56443
  misc_feature (1)..(1267): Ortholog of  Ceres SEQ ID NO 12624901 as cited in SEQ ID NO 62597

SEQ ID NO: 33930 - protein, 281 aa, Arabidopsis thaliana; identical to SEQ ID NO: 30340
  peptide (1)..(281): Ceres Seq. ID no. 13487842

SEQ ID NO: 33931 - protein, 164 aa, Arabidopsis thaliana; identical to SEQ ID NO: 30341
  peptide (1)..(164): Ceres Seq. ID no. 13487843

SEQ ID NO: 33932 - protein, 158 aa, Arabidopsis thaliana; identical to SEQ ID NO: 30342
  peptide (1)..(158): Ceres Seq. ID no. 13487844

SEQ ID NO: 33933 - DNA, 1139 bp, Arabidopsis thaliana; identical to SEQ ID NO: 30343
  misc_feature (1)..(1139): Ceres Seq. ID no. 12396159
  misc_feature (1)..(1139): Ortholog of  Ceres SEQ ID NO 13598488 as cited in SEQ ID NO 63862
  misc_feature (1)..(1139): Ortholog of  Ceres SEQ ID NO 13659640 as cited in SEQ ID NO 67101

SEQ ID NO: 33934 - protein, 294 aa, Arabidopsis thaliana; identical to SEQ ID NO: 30344
  peptide (1)..(294): Ceres Seq. ID no. 12396160

SEQ ID NO: 33935 - DNA, 1082 bp, Arabidopsis thaliana; identical to SEQ ID NO: 30345
  misc_feature (1)..(1082): Ceres Seq. ID no. 13500301
  misc_feature (1)..(1082): Ortholog of  Ceres SEQ ID NO 13599324 as cited in SEQ ID NO 0

SEQ ID NO: 33936 - protein, 278 aa, Arabidopsis thaliana; identical to SEQ ID NO: 30346
  peptide (1)..(278): Ceres Seq. ID no. 13500302

SEQ ID NO: 33937 - protein, 242 aa, Arabidopsis thaliana; identical to SEQ ID NO: 30347
  peptide (1)..(242): Ceres Seq. ID no. 13500303

SEQ ID NO: 33938 - protein, 205 aa, Arabidopsis thaliana; identical to SEQ ID NO: 30348
  peptide (1)..(205): Ceres Seq. ID no. 13500304

SEQ ID NO: 33939 - DNA, 962 bp, Arabidopsis thaliana; identical to SEQ ID NO: 30349
  misc_feature (1)..(962): Ceres Seq. ID no. 12322291
  misc_feature (1)..(962): Ortholog of  Ceres SEQ ID NO 13594296 as cited in SEQ ID NO 57764

SEQ ID NO: 33940 - protein, 235 aa, Arabidopsis thaliana; identical to SEQ ID NO: 30350
  peptide (1)..(235): Ceres Seq. ID no. 12322292

SEQ ID NO: 33941 - protein, 174 aa, Arabidopsis thaliana; identical to SEQ ID NO: 30351
  peptide (1)..(174): Ceres Seq. ID no. 12322293

SEQ ID NO: 33942 - DNA, 1886 bp, Arabidopsis thaliana; identical to SEQ ID NO: 30352
  misc_feature (1)..(1886): Ceres Seq. ID no. 13492392
  misc_feature (1)..(1886): Ortholog of  Ceres SEQ ID NO 14303109 as cited in SEQ ID NO 66330

SEQ ID NO: 33943 - protein, 564 aa, Arabidopsis thaliana; identical to SEQ ID NO: 30353
  peptide (1)..(564): Ceres Seq. ID no. 15222883

SEQ ID NO: 33944 - protein, 545 aa, Arabidopsis thaliana; identical to SEQ ID NO: 30354
  peptide (1)..(545): Ceres Seq. ID no. 15222884

SEQ ID NO: 33945 - protein, 543 aa, Arabidopsis thaliana; identical to SEQ ID NO: 30355
  peptide (1)..(543): Ceres Seq. ID no. 15222885

SEQ ID NO: 33946 - DNA, 1999 bp, Arabidopsis thaliana; identical to SEQ ID NO: 26468
  misc_feature (1)..(1999): Ceres Seq. ID no. 12327028
  misc_feature (1)..(1999): Ortholog of  Ceres SEQ ID NO 14314404 as cited in SEQ ID NO 57421
  misc_feature (1)..(1999): Ortholog of  Ceres SEQ ID NO 13493536 as cited in SEQ ID NO 58515
  misc_feature (1)..(1999): Ortholog of  Ceres SEQ ID NO 12618461 as cited in SEQ ID NO 64349

SEQ ID NO: 33947 - protein, 567 aa, Arabidopsis thaliana; identical to SEQ ID NO: 26469
  peptide (1)..(567): Ceres Seq. ID no. 12327029

SEQ ID NO: 33948 - protein, 530 aa, Arabidopsis thaliana; identical to SEQ ID NO: 26470
  peptide (1)..(530): Ceres Seq. ID no. 12327030

SEQ ID NO: 33949 - protein, 394 aa, Arabidopsis thaliana; identical to SEQ ID NO: 26471
  peptide (1)..(394): Ceres Seq. ID no. 12327031

SEQ ID NO: 33950 - DNA, 613 bp, Arabidopsis thaliana; identical to SEQ ID NO: 30360
  misc_feature (1)..(613): Ceres Seq. ID no. 12579948
  misc_feature (1)..(613): Ortholog of  Ceres SEQ ID NO 14303201 as cited in SEQ ID NO 67304

SEQ ID NO: 33951 - protein, 150 aa, Arabidopsis thaliana; identical to SEQ ID NO: 30361
  peptide (1)..(150): Ceres Seq. ID no. 12579949

SEQ ID NO: 33952 - protein, 119 aa, Arabidopsis thaliana; identical to SEQ ID NO: 30362
  peptide (1)..(119): Ceres Seq. ID no. 12579950

SEQ ID NO: 33953 - protein, 97 aa, Arabidopsis thaliana; identical to SEQ ID NO: 30363
  peptide (1)..(97): Ceres Seq. ID no. 12579951

SEQ ID NO: 33954 - DNA, 720 bp, Arabidopsis thaliana; identical to SEQ ID NO: 30364
  misc_feature (1)..(720): Ceres Seq. ID no. 12389149
  misc_feature (1)..(720): Ortholog of  Ceres SEQ ID NO 12609656 as cited in SEQ ID NO 51891
  misc_feature (1)..(720): Ortholog of  Ceres SEQ ID NO 13664337 as cited in SEQ ID NO 61267
  misc_feature (1)..(720): Ortholog of  Ceres SEQ ID NO 15224278 as cited in SEQ ID NO 63590
  misc_feature (1)..(720): Ortholog of  Ceres SEQ ID NO 12635152 as cited in SEQ ID NO 0

SEQ ID NO: 33955 - protein, 166 aa, Arabidopsis thaliana; identical to SEQ ID NO: 30365
  peptide (1)..(166): Ceres Seq. ID no. 12389150

SEQ ID NO: 33956 - DNA, 710 bp, Arabidopsis thaliana; identical to SEQ ID NO: 30366
  misc_feature (1)..(710): Ceres Seq. ID no. 12332093
  misc_feature (1)..(710): Ortholog of  Ceres SEQ ID NO 13598617 as cited in SEQ ID NO 65391
  misc_feature (1)..(710): Ortholog of  Ceres SEQ ID NO 13623093 as cited in SEQ ID NO 0

SEQ ID NO: 33957 - protein, 192 aa, Arabidopsis thaliana; identical to SEQ ID NO: 30367
  peptide (1)..(192): Ceres Seq. ID no. 12332094

SEQ ID NO: 33958 - protein, 180 aa, Arabidopsis thaliana; identical to SEQ ID NO: 30368
  peptide (1)..(180): Ceres Seq. ID no. 12332095

SEQ ID NO: 33959 - protein, 107 aa, Arabidopsis thaliana; identical to SEQ ID NO: 30369
  peptide (1)..(107): Ceres Seq. ID no. 12332096

SEQ ID NO: 33960 - DNA, 958 bp, Arabidopsis thaliana; identical to SEQ ID NO: 30370
  misc_feature (1)..(958): Ceres Seq. ID no. 13489828
  misc_feature (1)..(958): Ortholog of  Ceres SEQ ID NO 12473977 as cited in SEQ ID NO 133
  misc_feature (1)..(958): Ortholog of  Ceres SEQ ID NO 12585294 as cited in SEQ ID NO 63023

SEQ ID NO: 33961 - protein, 212 aa, Arabidopsis thaliana; identical to SEQ ID NO: 30371
  peptide (1)..(212): Ceres Seq. ID no. 13489829

SEQ ID NO: 33962 - protein, 208 aa, Arabidopsis thaliana; identical to SEQ ID NO: 30372
  peptide (1)..(208): Ceres Seq. ID no. 13489830

SEQ ID NO: 33963 - DNA, 644 bp, Arabidopsis thaliana; identical to SEQ ID NO: 30373
  misc_feature (1)..(644): Ceres Seq. ID no. 12369950
  misc_feature (1)..(644): Ortholog of  Ceres SEQ ID NO 13581902 as cited in SEQ ID NO 52223
  misc_feature (1)..(644): Ortholog of  Ceres SEQ ID NO 12585528 as cited in SEQ ID NO 62991

SEQ ID NO: 33964 - protein, 136 aa, Arabidopsis thaliana; identical to SEQ ID NO: 8709
  peptide (1)..(136): Ceres Seq. ID no. 12369951

SEQ ID NO: 33965 - DNA, 1071 bp, Arabidopsis thaliana; identical to SEQ ID NO: 30375
  misc_feature (1)..(1071): Ceres Seq. ID no. 12385474
  misc_feature (1)..(1071): Ortholog of  Ceres SEQ ID NO 13599448 as cited in SEQ ID NO 521
  misc_feature (1)..(1071): Ortholog of  Ceres SEQ ID NO 14311918 as cited in SEQ ID NO 51684
  misc_feature (1)..(1071): Ortholog of  Ceres SEQ ID NO 14307472 as cited in SEQ ID NO 54559
  misc_feature (1)..(1071): Ortholog of  Ceres SEQ ID NO 13596408 as cited in SEQ ID NO 62028

SEQ ID NO: 33966 - protein, 187 aa, Arabidopsis thaliana; identical to SEQ ID NO: 26831
  peptide (1)..(187): Ceres Seq. ID no. 12385475

SEQ ID NO: 33967 - protein, 186 aa, Arabidopsis thaliana; identical to SEQ ID NO: 26832
  peptide (1)..(186): Ceres Seq. ID no. 12385476

SEQ ID NO: 33968 - protein, 177 aa, Arabidopsis thaliana; identical to SEQ ID NO: 26833
  peptide (1)..(177): Ceres Seq. ID no. 12385477

SEQ ID NO: 33969 - DNA, 1266 bp, Arabidopsis thaliana; identical to SEQ ID NO: 30379
  misc_feature (1)..(1266): Ceres Seq. ID no. 12357583
  misc_feature (1)..(1266): Ortholog of  Ceres SEQ ID NO 13597538 as cited in SEQ ID NO 64966

SEQ ID NO: 33970 - protein, 309 aa, Arabidopsis thaliana; identical to SEQ ID NO: 30380
  peptide (1)..(309): Ceres Seq. ID no. 12357584

SEQ ID NO: 33971 - protein, 248 aa, Arabidopsis thaliana; identical to SEQ ID NO: 30381
  peptide (1)..(248): Ceres Seq. ID no. 12357585

SEQ ID NO: 33972 - protein, 221 aa, Arabidopsis thaliana; identical to SEQ ID NO: 30382
  peptide (1)..(221): Ceres Seq. ID no. 12357586

SEQ ID NO: 33973 - DNA, 764 bp, Arabidopsis thaliana; identical to SEQ ID NO: 30383
  misc_feature (1)..(764): Ceres Seq. ID no. 12385516
  misc_feature (1)..(764): Ortholog of  Ceres SEQ ID NO 15172705 as cited in SEQ ID NO 56069
  misc_feature (1)..(764): Ortholog of  Ceres SEQ ID NO 12635657 as cited in SEQ ID NO 0
  misc_feature (1)..(764): Ortholog of  Ceres SEQ ID NO 12635879 as cited in SEQ ID NO 0
  misc_feature (1)..(764): Ortholog of  Ceres SEQ ID NO 13599649 as cited in SEQ ID NO 0
  misc_feature (1)..(764): Ortholog of  Ceres SEQ ID NO 14309205 as cited in SEQ ID NO 0
  misc_feature (1)..(764): Ortholog of  Ceres SEQ ID NO 15177492 as cited in SEQ ID NO 0

SEQ ID NO: 33974 - protein, 194 aa, Arabidopsis thaliana; identical to SEQ ID NO: 30384
  peptide (1)..(194): Ceres Seq. ID no. 12385517

SEQ ID NO: 33975 - protein, 172 aa, Arabidopsis thaliana; identical to SEQ ID NO: 25632
  peptide (1)..(172): Ceres Seq. ID no. 12385518

SEQ ID NO: 33976 - protein, 163 aa, Arabidopsis thaliana; identical to SEQ ID NO: 25633
  peptide (1)..(163): Ceres Seq. ID no. 12385519

SEQ ID NO: 33977 - DNA, 1281 bp, Arabidopsis thaliana; identical to SEQ ID NO: 30387
  misc_feature (1)..(1281): Ceres Seq. ID no. 12321331
  misc_feature (1)..(1281): Ortholog of  Ceres SEQ ID NO 14316124 as cited in SEQ ID NO 50904
  misc_feature (1)..(1281): Ortholog of  Ceres SEQ ID NO 13585382 as cited in SEQ ID NO 63889

SEQ ID NO: 33978 - protein, 325 aa, Arabidopsis thaliana; identical to SEQ ID NO: 30388
  peptide (1)..(325): Ceres Seq. ID no. 12321332

SEQ ID NO: 33979 - protein, 310 aa, Arabidopsis thaliana; identical to SEQ ID NO: 30389
  peptide (1)..(310): Ceres Seq. ID no. 12321333

SEQ ID NO: 33980 - protein, 255 aa, Arabidopsis thaliana; identical to SEQ ID NO: 30390
  peptide (1)..(255): Ceres Seq. ID no. 12321334

SEQ ID NO: 33981 - DNA, 1231 bp, Arabidopsis thaliana; identical to SEQ ID NO: 30391
  misc_feature (1)..(1231): Ceres Seq. ID no. 13500315
  misc_feature (1)..(1231): Ortholog of  Ceres SEQ ID NO 12617391 as cited in SEQ ID NO 64114
  misc_feature (1)..(1231): Ortholog of  Ceres SEQ ID NO 13595922 as cited in SEQ ID NO 69293
  misc_feature (1)..(1231): Ortholog of  Ceres SEQ ID NO 12635496 as cited in SEQ ID NO 0

SEQ ID NO: 33982 - protein, 358 aa, Arabidopsis thaliana; identical to SEQ ID NO: 30392
  peptide (1)..(358): Ceres Seq. ID no. 13500316

SEQ ID NO: 33983 - protein, 228 aa, Arabidopsis thaliana; identical to SEQ ID NO: 30393
  peptide (1)..(228): Ceres Seq. ID no. 13500317

SEQ ID NO: 33984 - protein, 222 aa, Arabidopsis thaliana; identical to SEQ ID NO: 30394
  peptide (1)..(222): Ceres Seq. ID no. 13500318

SEQ ID NO: 33985 - DNA, 997 bp, Arabidopsis thaliana; identical to SEQ ID NO: 30395
  misc_feature (1)..(997): Ceres Seq. ID no. 12336034
  misc_feature (1)..(997): Ortholog of  Ceres SEQ ID NO 12558659 as cited in SEQ ID NO 20727
  misc_feature (1)..(997): Ortholog of  Ceres SEQ ID NO 14301475 as cited in SEQ ID NO 62936
  misc_feature (1)..(997): Ortholog of  Ceres SEQ ID NO 12619999 as cited in SEQ ID NO 66123
  misc_feature (1)..(997): Ortholog of  Ceres SEQ ID NO 13656436 as cited in SEQ ID NO 69154

SEQ ID NO: 33986 - protein, 256 aa, Arabidopsis thaliana; identical to SEQ ID NO: 30396
  peptide (1)..(256): Ceres Seq. ID no. 12336035

SEQ ID NO: 33987 - protein, 211 aa, Arabidopsis thaliana; identical to SEQ ID NO: 30397
  peptide (1)..(211): Ceres Seq. ID no. 12336036

SEQ ID NO: 33988 - protein, 165 aa, Arabidopsis thaliana; identical to SEQ ID NO: 30398
  peptide (1)..(165): Ceres Seq. ID no. 12336037

SEQ ID NO: 33989 - DNA, 1718 bp, Arabidopsis thaliana; identical to SEQ ID NO: 30399
  misc_feature (1)..(1718): Ceres Seq. ID no. 12324349
  misc_feature (1)..(1718): Ortholog of  Ceres SEQ ID NO 13655298 as cited in SEQ ID NO 68914
  misc_feature (1)..(1718): Ortholog of  Ceres SEQ ID NO 13656501 as cited in SEQ ID NO 69206

SEQ ID NO: 33990 - protein, 409 aa, Arabidopsis thaliana; identical to SEQ ID NO: 30400
  peptide (1)..(409): Ceres Seq. ID no. 12324350

SEQ ID NO: 33991 - protein, 381 aa, Arabidopsis thaliana; identical to SEQ ID NO: 30401
  peptide (1)..(381): Ceres Seq. ID no. 12324351

SEQ ID NO: 33992 - protein, 378 aa, Arabidopsis thaliana; identical to SEQ ID NO: 30402
  peptide (1)..(378): Ceres Seq. ID no. 12324352

SEQ ID NO: 33993 - DNA, 1511 bp, Arabidopsis thaliana; identical to SEQ ID NO: 30403
  misc_feature (1)..(1511): Ceres Seq. ID no. 12371675
  misc_feature (1)..(1511): Ortholog of  Ceres SEQ ID NO 14304502 as cited in SEQ ID NO 53212
  misc_feature (1)..(1511): Ortholog of  Ceres SEQ ID NO 15179323 as cited in SEQ ID NO 0

SEQ ID NO: 33994 - protein, 359 aa, Arabidopsis thaliana; identical to SEQ ID NO: 30404
  peptide (1)..(359): Ceres Seq. ID no. 12371676

SEQ ID NO: 33995 - protein, 238 aa, Arabidopsis thaliana; identical to SEQ ID NO: 30405
  peptide (1)..(238): Ceres Seq. ID no. 12371677

SEQ ID NO: 33996 - protein, 235 aa, Arabidopsis thaliana; identical to SEQ ID NO: 30406
  peptide (1)..(235): Ceres Seq. ID no. 12371678

SEQ ID NO: 33997 - DNA, 1070 bp, Arabidopsis thaliana; identical to SEQ ID NO: 30407
  misc_feature (1)..(1070): Ceres Seq. ID no. 12327436
  misc_feature (1)..(1070): Ortholog of  Ceres SEQ ID NO 13581092 as cited in SEQ ID NO 54771
  misc_feature (1)..(1070): Ortholog of  Ceres SEQ ID NO 13594298 as cited in SEQ ID NO 57803
  misc_feature (1)..(1070): Ortholog of  Ceres SEQ ID NO 13503476 as cited in SEQ ID NO 61978
  misc_feature (1)..(1070): Ortholog of  Ceres SEQ ID NO 12578438 as cited in SEQ ID NO 62201
  misc_feature (1)..(1070): Ortholog of  Ceres SEQ ID NO 12617675 as cited in SEQ ID NO 64656

SEQ ID NO: 33998 - protein, 290 aa, Arabidopsis thaliana; identical to SEQ ID NO: 30408
  peptide (1)..(290): Ceres Seq. ID no. 12327437

SEQ ID NO: 33999 - protein, 287 aa, Arabidopsis thaliana; identical to SEQ ID NO: 30409
  peptide (1)..(287): Ceres Seq. ID no. 12327438

SEQ ID NO: 34000 - protein, 280 aa, Arabidopsis thaliana; identical to SEQ ID NO: 30410
  peptide (1)..(280): Ceres Seq. ID no. 12327439

SEQ ID NO: 34001 - DNA, 1350 bp, Arabidopsis thaliana; identical to SEQ ID NO: 30411
  misc_feature (1)..(1350): Ceres Seq. ID no. 13580471
  misc_feature (1)..(1350): Ortholog of  Ceres SEQ ID NO 15171556 as cited in SEQ ID NO 59687
  misc_feature (1)..(1350): Ortholog of  Ceres SEQ ID NO 15177935 as cited in SEQ ID NO 60258
  misc_feature (1)..(1350): Ortholog of  Ceres SEQ ID NO 13659033 as cited in SEQ ID NO 66372
  misc_feature (1)..(1350): Ortholog of  Ceres SEQ ID NO 12625899 as cited in SEQ ID NO 69079
  misc_feature (1)..(1350): Ortholog of  Ceres SEQ ID NO 15180051 as cited in SEQ ID NO 0

SEQ ID NO: 34002 - protein, 224 aa, Arabidopsis thaliana; identical to SEQ ID NO: 30412
  peptide (1)..(224): Ceres Seq. ID no. 15222720

SEQ ID NO: 34003 - protein, 147 aa, Arabidopsis thaliana; identical to SEQ ID NO: 30413
  peptide (1)..(147): Ceres Seq. ID no. 15222721

SEQ ID NO: 34004 - protein, 137 aa, Arabidopsis thaliana; identical to SEQ ID NO: 30414
  peptide (1)..(137): Ceres Seq. ID no. 15222722

SEQ ID NO: 34005 - DNA, 1286 bp, Arabidopsis thaliana; identical to SEQ ID NO: 30415
  misc_feature (1)..(1286): Ceres Seq. ID no. 12326413
  misc_feature (1)..(1286): Ortholog of  Ceres SEQ ID NO 12615296 as cited in SEQ ID NO 62724
  misc_feature (1)..(1286): Ortholog of  Ceres SEQ ID NO 15225093 as cited in SEQ ID NO 65177
  misc_feature (1)..(1286): Ortholog of  Ceres SEQ ID NO 15179532 as cited in SEQ ID NO 0

SEQ ID NO: 34006 - protein, 330 aa, Arabidopsis thaliana; identical to SEQ ID NO: 30416
  peptide (1)..(330): Ceres Seq. ID no. 12326414

SEQ ID NO: 34007 - protein, 288 aa, Arabidopsis thaliana; identical to SEQ ID NO: 30417
  peptide (1)..(288): Ceres Seq. ID no. 12326415

SEQ ID NO: 34008 - protein, 220 aa, Arabidopsis thaliana; identical to SEQ ID NO: 30418
  peptide (1)..(220): Ceres Seq. ID no. 12326416

SEQ ID NO: 34009 - DNA, 1267 bp, Arabidopsis thaliana; identical to SEQ ID NO: 30419
  misc_feature (1)..(1267): Ceres Seq. ID no. 12334784
  misc_feature (1)..(1267): Ortholog of  Ceres SEQ ID NO 12607455 as cited in SEQ ID NO 55208

SEQ ID NO: 34010 - protein, 383 aa, Arabidopsis thaliana; identical to SEQ ID NO: 30420
  peptide (1)..(383): Ceres Seq. ID no. 12334785

SEQ ID NO: 34011 - protein, 365 aa, Arabidopsis thaliana; identical to SEQ ID NO: 30421
  peptide (1)..(365): Ceres Seq. ID no. 12334786

SEQ ID NO: 34012 - protein, 242 aa, Arabidopsis thaliana; identical to SEQ ID NO: 30422
  peptide (1)..(242): Ceres Seq. ID no. 12334787

SEQ ID NO: 34013 - DNA, 1182 bp, Arabidopsis thaliana; identical to SEQ ID NO: 30423
  misc_feature (1)..(1182): Ceres Seq. ID no. 12482670
  misc_feature (1)..(1182): Ortholog of  Ceres SEQ ID NO 13594560 as cited in SEQ ID NO 51329
  misc_feature (1)..(1182): Ortholog of  Ceres SEQ ID NO 12613701 as cited in SEQ ID NO 67983

SEQ ID NO: 34014 - protein, 346 aa, Arabidopsis thaliana; identical to SEQ ID NO: 30424
  peptide (1)..(346): Ceres Seq. ID no. 12482671

SEQ ID NO: 34015 - protein, 294 aa, Arabidopsis thaliana; identical to SEQ ID NO: 30425
  peptide (1)..(294): Ceres Seq. ID no. 12482672

SEQ ID NO: 34016 - protein, 288 aa, Arabidopsis thaliana; identical to SEQ ID NO: 30426
  peptide (1)..(288): Ceres Seq. ID no. 12482673

SEQ ID NO: 34017 - DNA, 1375 bp, Arabidopsis thaliana; identical to SEQ ID NO: 30427
  misc_feature (1)..(1375): Ceres Seq. ID no. 13491061
  misc_feature (1)..(1375): Ortholog of  Ceres SEQ ID NO 12781552 as cited in SEQ ID NO 51997
  misc_feature (1)..(1375): Ortholog of  Ceres SEQ ID NO 13597237 as cited in SEQ ID NO 64136
  misc_feature (1)..(1375): Ortholog of  Ceres SEQ ID NO 13598601 as cited in SEQ ID NO 69129

SEQ ID NO: 34018 - protein, 298 aa, Arabidopsis thaliana; identical to SEQ ID NO: 30428
  peptide (1)..(298): Ceres Seq. ID no. 13491062

SEQ ID NO: 34019 - protein, 297 aa, Arabidopsis thaliana; identical to SEQ ID NO: 30429
  peptide (1)..(297): Ceres Seq. ID no. 13491063

SEQ ID NO: 34020 - protein, 288 aa, Arabidopsis thaliana; identical to SEQ ID NO: 30430
  peptide (1)..(288): Ceres Seq. ID no. 13491064

SEQ ID NO: 34021 - DNA, 1358 bp, Arabidopsis thaliana; identical to SEQ ID NO: 30431
  misc_feature (1)..(1358): Ceres Seq. ID no. 12423111
  misc_feature (1)..(1358): Ortholog of  Ceres SEQ ID NO 15178096 as cited in SEQ ID NO 52497

SEQ ID NO: 34022 - protein, 398 aa, Arabidopsis thaliana; identical to SEQ ID NO: 30432
  peptide (1)..(398): Ceres Seq. ID no. 12423112

SEQ ID NO: 34023 - protein, 371 aa, Arabidopsis thaliana; identical to SEQ ID NO: 30433
  peptide (1)..(371): Ceres Seq. ID no. 12423113

SEQ ID NO: 34024 - protein, 348 aa, Arabidopsis thaliana; identical to SEQ ID NO: 30434
  peptide (1)..(348): Ceres Seq. ID no. 12423114

SEQ ID NO: 34025 - DNA, 711 bp, Arabidopsis thaliana; identical to SEQ ID NO: 30435
  misc_feature (1)..(711): Ceres Seq. ID no. 12482108
  misc_feature (1)..(711): Ortholog of  Ceres SEQ ID NO 13583388 as cited in SEQ ID NO 62058

SEQ ID NO: 34026 - protein, 155 aa, Arabidopsis thaliana; identical to SEQ ID NO: 30436
  peptide (1)..(155): Ceres Seq. ID no. 12482109

SEQ ID NO: 34027 - protein, 110 aa, Arabidopsis thaliana; identical to SEQ ID NO: 30437
  peptide (1)..(110): Ceres Seq. ID no. 12482110

SEQ ID NO: 34028 - DNA, 2369 bp, Arabidopsis thaliana; identical to SEQ ID NO: 30438
  misc_feature (1)..(2369): Ceres Seq. ID no. 12327544
  misc_feature (1)..(2369): Ortholog of  Ceres SEQ ID NO 14315309 as cited in SEQ ID NO 53998
  misc_feature (1)..(2369): Ortholog of  Ceres SEQ ID NO 13638213 as cited in SEQ ID NO 57275

SEQ ID NO: 34029 - protein, 623 aa, Arabidopsis thaliana; identical to SEQ ID NO: 30439
  peptide (1)..(623): Ceres Seq. ID no. 12327545

SEQ ID NO: 34030 - protein, 587 aa, Arabidopsis thaliana; identical to SEQ ID NO: 30440
  peptide (1)..(587): Ceres Seq. ID no. 12327546

SEQ ID NO: 34031 - protein, 582 aa, Arabidopsis thaliana; identical to SEQ ID NO: 30441
  peptide (1)..(582): Ceres Seq. ID no. 12327547

SEQ ID NO: 34032 - DNA, 903 bp, Arabidopsis thaliana; identical to SEQ ID NO: 30442
  misc_feature (1)..(903): Ceres Seq. ID no. 12372123
  misc_feature (1)..(903): Ortholog of  Ceres SEQ ID NO 12466413 as cited in SEQ ID NO 20470
  misc_feature (1)..(903): Ortholog of  Ceres SEQ ID NO 13594684 as cited in SEQ ID NO 52062
  misc_feature (1)..(903): Ortholog of  Ceres SEQ ID NO 13661434 as cited in SEQ ID NO 61387
  misc_feature (1)..(903): Ortholog of  Ceres SEQ ID NO 15178869 as cited in SEQ ID NO 0

SEQ ID NO: 34033 - protein, 228 aa, Arabidopsis thaliana; identical to SEQ ID NO: 30443
  peptide (1)..(228): Ceres Seq. ID no. 12372124

SEQ ID NO: 34034 - protein, 172 aa, Arabidopsis thaliana; identical to SEQ ID NO: 30444
  peptide (1)..(172): Ceres Seq. ID no. 12372125

SEQ ID NO: 34035 - protein, 164 aa, Arabidopsis thaliana; identical to SEQ ID NO: 30445
  peptide (1)..(164): Ceres Seq. ID no. 12372126

SEQ ID NO: 34036 - DNA, 675 bp, Arabidopsis thaliana; identical to SEQ ID NO: 30446
  misc_feature (1)..(675): Ceres Seq. ID no. 12322124
  misc_feature (1)..(675): Ortholog of  Ceres SEQ ID NO 15224286 as cited in SEQ ID NO 62627

SEQ ID NO: 34037 - protein, 135 aa, Arabidopsis thaliana; identical to SEQ ID NO: 30447
  peptide (1)..(135): Ceres Seq. ID no. 12322125

SEQ ID NO: 34038 - protein, 82 aa, Arabidopsis thaliana; identical to SEQ ID NO: 26444
  peptide (1)..(82): Ceres Seq. ID no. 12322126

SEQ ID NO: 34039 - protein, 80 aa, Arabidopsis thaliana; identical to SEQ ID NO: 30449
  peptide (1)..(80): Ceres Seq. ID no. 12322127

SEQ ID NO: 34040 - DNA, 1040 bp, Arabidopsis thaliana; identical to SEQ ID NO: 30450
  misc_feature (1)..(1040): Ceres Seq. ID no. 13492462
  misc_feature (1)..(1040): Ortholog of  Ceres SEQ ID NO 14312281 as cited in SEQ ID NO 59172
  misc_feature (1)..(1040): Ortholog of  Ceres SEQ ID NO 14302299 as cited in SEQ ID NO 68665
  misc_feature (1)..(1040): Ortholog of  Ceres SEQ ID NO 15174396 as cited in SEQ ID NO 0

SEQ ID NO: 34041 - protein, 247 aa, Arabidopsis thaliana; identical to SEQ ID NO: 30451
  peptide (1)..(247): Ceres Seq. ID no. 13492463

SEQ ID NO: 34042 - protein, 199 aa, Arabidopsis thaliana; identical to SEQ ID NO: 30452
  peptide (1)..(199): Ceres Seq. ID no. 13492464

SEQ ID NO: 34043 - DNA, 662 bp, Arabidopsis thaliana; identical to SEQ ID NO: 30453
  misc_feature (1)..(662): Ceres Seq. ID no. 12579870
  misc_feature (1)..(662): Ortholog of  Ceres SEQ ID NO 13600689 as cited in SEQ ID NO 0
  misc_feature (1)..(662): Ortholog of  Ceres SEQ ID NO 15178120 as cited in SEQ ID NO 0

SEQ ID NO: 34044 - protein, 109 aa, Arabidopsis thaliana; identical to SEQ ID NO: 30454
  peptide (1)..(109): Ceres Seq. ID no. 12579871

SEQ ID NO: 34045 - protein, 62 aa, Arabidopsis thaliana; identical to SEQ ID NO: 30455
  peptide (1)..(62): Ceres Seq. ID no. 12579872

SEQ ID NO: 34046 - DNA, 737 bp, Arabidopsis thaliana; identical to SEQ ID NO: 30456
  misc_feature (1)..(737): Ceres Seq. ID no. 13653789
  misc_feature (1)..(737): Ortholog of  Ceres SEQ ID NO 12610954 as cited in SEQ ID NO 55930
  misc_feature (1)..(737): Ortholog of  Ceres SEQ ID NO 12625335 as cited in SEQ ID NO 63326
  misc_feature (1)..(737): Ortholog of  Ceres SEQ ID NO 12566590 as cited in SEQ ID NO 0
  misc_feature (1)..(737): Ortholog of  Ceres SEQ ID NO 14305152 as cited in SEQ ID NO 0
  misc_feature (1)..(737): Ortholog of  Ceres SEQ ID NO 15179949 as cited in SEQ ID NO 0

SEQ ID NO: 34047 - protein, 162 aa, Arabidopsis thaliana; identical to SEQ ID NO: 30457
  peptide (1)..(162): Ceres Seq. ID no. 13653790

SEQ ID NO: 34048 - protein, 110 aa, Arabidopsis thaliana; identical to SEQ ID NO: 30458
  peptide (1)..(110): Ceres Seq. ID no. 13653791

SEQ ID NO: 34049 - DNA, 706 bp, Arabidopsis thaliana; identical to SEQ ID NO: 30459
  misc_feature (1)..(706): Ceres Seq. ID no. 12325438
  misc_feature (1)..(706): Ortholog of  Ceres SEQ ID NO 15172974 as cited in SEQ ID NO 67643

SEQ ID NO: 34050 - protein, 157 aa, Arabidopsis thaliana; identical to SEQ ID NO: 30460
  peptide (1)..(157): Ceres Seq. ID no. 12325439

SEQ ID NO: 34051 - DNA, 904 bp, Arabidopsis thaliana; identical to SEQ ID NO: 30461
  misc_feature (1)..(904): Ceres Seq. ID no. 12323499
  misc_feature (1)..(904): Ortholog of  Ceres SEQ ID NO 13638855 as cited in SEQ ID NO 52073
  misc_feature (1)..(904): Ortholog of  Ceres SEQ ID NO 15179503 as cited in SEQ ID NO 0

SEQ ID NO: 34052 - protein, 252 aa, Arabidopsis thaliana; identical to SEQ ID NO: 30462
  peptide (1)..(252): Ceres Seq. ID no. 12323500

SEQ ID NO: 34053 - protein, 214 aa, Arabidopsis thaliana; identical to SEQ ID NO: 30463
  peptide (1)..(214): Ceres Seq. ID no. 12323501

SEQ ID NO: 34054 - protein, 207 aa, Arabidopsis thaliana; identical to SEQ ID NO: 30464
  peptide (1)..(207): Ceres Seq. ID no. 12323502

SEQ ID NO: 34055 - DNA, 1243 bp, Arabidopsis thaliana; identical to SEQ ID NO: 20950
  misc_feature (1)..(1243): Ceres Seq. ID no. 12394450
  misc_feature (1)..(1243): Ortholog of  Ceres SEQ ID NO 13581579 as cited in SEQ ID NO 58361
  misc_feature (1)..(1243): Ortholog of  Ceres SEQ ID NO 13596474 as cited in SEQ ID NO 62169
  misc_feature (1)..(1243): Ortholog of  Ceres SEQ ID NO 13596969 as cited in SEQ ID NO 63375
  misc_feature (1)..(1243): Ortholog of  Ceres SEQ ID NO 13584480 as cited in SEQ ID NO 64751
  misc_feature (1)..(1243): Ortholog of  Ceres SEQ ID NO 13597519 as cited in SEQ ID NO 64759
  misc_feature (1)..(1243): Ortholog of  Ceres SEQ ID NO 13597870 as cited in SEQ ID NO 64982
  misc_feature (1)..(1243): Ortholog of  Ceres SEQ ID NO 13595926 as cited in SEQ ID NO 67778
  misc_feature (1)..(1243): Ortholog of  Ceres SEQ ID NO 13596362 as cited in SEQ ID NO 67877

SEQ ID NO: 34056 - protein, 345 aa, Arabidopsis thaliana; identical to SEQ ID NO: 20951
  peptide (1)..(345): Ceres Seq. ID no. 12394451

SEQ ID NO: 34057 - protein, 322 aa, Arabidopsis thaliana; identical to SEQ ID NO: 20952
  peptide (1)..(322): Ceres Seq. ID no. 12394452

SEQ ID NO: 34058 - protein, 312 aa, Arabidopsis thaliana; identical to SEQ ID NO: 20953
  peptide (1)..(312): Ceres Seq. ID no. 12394453

SEQ ID NO: 34059 - DNA, 950 bp, Arabidopsis thaliana; identical to SEQ ID NO: 30469
  misc_feature (1)..(950): Ceres Seq. ID no. 13499517
  misc_feature (1)..(950): Ortholog of  Ceres SEQ ID NO 14306349 as cited in SEQ ID NO 59320

SEQ ID NO: 34060 - protein, 195 aa, Arabidopsis thaliana; identical to SEQ ID NO: 30470
  peptide (1)..(195): Ceres Seq. ID no. 13499518

SEQ ID NO: 34061 - protein, 185 aa, Arabidopsis thaliana; identical to SEQ ID NO: 30471
  peptide (1)..(185): Ceres Seq. ID no. 13499519

SEQ ID NO: 34062 - protein, 143 aa, Arabidopsis thaliana; identical to SEQ ID NO: 30472
  peptide (1)..(143): Ceres Seq. ID no. 13499520

SEQ ID NO: 34063 - DNA, 687 bp, Arabidopsis thaliana; identical to SEQ ID NO: 30473
  misc_feature (1)..(687): Ceres Seq. ID no. 12580320
  misc_feature (1)..(687): Ortholog of  Ceres SEQ ID NO 13661089 as cited in SEQ ID NO 61053

SEQ ID NO: 34064 - protein, 95 aa, Arabidopsis thaliana; identical to SEQ ID NO: 30474
  peptide (1)..(95): Ceres Seq. ID no. 12580321

SEQ ID NO: 34065 - protein, 87 aa, Arabidopsis thaliana; identical to SEQ ID NO: 30475
  peptide (1)..(87): Ceres Seq. ID no. 12580322

SEQ ID NO: 34066 - protein, 82 aa, Arabidopsis thaliana; identical to SEQ ID NO: 30476
  peptide (1)..(82): Ceres Seq. ID no. 12580323

SEQ ID NO: 34067 - DNA, 2852 bp, Arabidopsis thaliana; identical to SEQ ID NO: 30477
  misc_feature (1)..(2852): Ceres Seq. ID no. 12422999
  misc_feature (1)..(2852): Ortholog of  Ceres SEQ ID NO 15180432 as cited in SEQ ID NO 0

SEQ ID NO: 34068 - protein, 752 aa, Arabidopsis thaliana; identical to SEQ ID NO: 30478
  peptide (1)..(752): Ceres Seq. ID no. 12423000

SEQ ID NO: 34069 - protein, 751 aa, Arabidopsis thaliana; identical to SEQ ID NO: 30479
  peptide (1)..(751): Ceres Seq. ID no. 12423001

SEQ ID NO: 34070 - protein, 701 aa, Arabidopsis thaliana; identical to SEQ ID NO: 30480
  peptide (1)..(701): Ceres Seq. ID no. 12423002

SEQ ID NO: 34071 - DNA, 2330 bp, Arabidopsis thaliana; identical to SEQ ID NO: 30481
  misc_feature (1)..(2330): Ceres Seq. ID no. 13494306
  misc_feature (1)..(2330): Ortholog of  Ceres SEQ ID NO 14307164 as cited in SEQ ID NO 54775
  misc_feature (1)..(2330): Ortholog of  Ceres SEQ ID NO 13654989 as cited in SEQ ID NO 63117
  misc_feature (1)..(2330): Ortholog of  Ceres SEQ ID NO 13655640 as cited in SEQ ID NO 63844
  misc_feature (1)..(2330): Ortholog of  Ceres SEQ ID NO 13584744 as cited in SEQ ID NO 69137

SEQ ID NO: 34072 - protein, 652 aa, Arabidopsis thaliana; identical to SEQ ID NO: 30482
  peptide (1)..(652): Ceres Seq. ID no. 13494307

SEQ ID NO: 34073 - protein, 415 aa, Arabidopsis thaliana; identical to SEQ ID NO: 30483
  peptide (1)..(415): Ceres Seq. ID no. 13494308

SEQ ID NO: 34074 - DNA, 750 bp, Arabidopsis thaliana; identical to SEQ ID NO: 30484
  misc_feature (1)..(750): Ceres Seq. ID no. 13497622
  misc_feature (1)..(750): Ortholog of  Ceres SEQ ID NO 15227036 as cited in SEQ ID NO 61662
  misc_feature (1)..(750): Ortholog of  Ceres SEQ ID NO 12635268 as cited in SEQ ID NO 0

SEQ ID NO: 34075 - protein, 161 aa, Arabidopsis thaliana; identical to SEQ ID NO: 30485
  peptide (1)..(161): Ceres Seq. ID no. 13497623

SEQ ID NO: 34076 - protein, 144 aa, Arabidopsis thaliana; identical to SEQ ID NO: 30486
  peptide (1)..(144): Ceres Seq. ID no. 13497624

SEQ ID NO: 34077 - protein, 121 aa, Arabidopsis thaliana; identical to SEQ ID NO: 30487
  peptide (1)..(121): Ceres Seq. ID no. 13497625

SEQ ID NO: 34078 - DNA, 1386 bp, Arabidopsis thaliana; identical to SEQ ID NO: 30488
  misc_feature (1)..(1386): Ceres Seq. ID no. 12337305
  misc_feature (1)..(1386): Ortholog of  Ceres SEQ ID NO 14310616 as cited in SEQ ID NO 55699
  misc_feature (1)..(1386): Ortholog of  Ceres SEQ ID NO 13596519 as cited in SEQ ID NO 62572
  misc_feature (1)..(1386): Ortholog of  Ceres SEQ ID NO 12625108 as cited in SEQ ID NO 68102

SEQ ID NO: 34079 - protein, 257 aa, Arabidopsis thaliana; identical to SEQ ID NO: 30489
  peptide (1)..(257): Ceres Seq. ID no. 12337306

SEQ ID NO: 34080 - protein, 255 aa, Arabidopsis thaliana; identical to SEQ ID NO: 30490
  peptide (1)..(255): Ceres Seq. ID no. 12337307

SEQ ID NO: 34081 - protein, 210 aa, Arabidopsis thaliana; identical to SEQ ID NO: 30491
  peptide (1)..(210): Ceres Seq. ID no. 12337308

SEQ ID NO: 34082 - DNA, 669 bp, Arabidopsis thaliana; identical to SEQ ID NO: 30492
  misc_feature (1)..(669): Ceres Seq. ID no. 12340323
  misc_feature (1)..(669): Ortholog of  Ceres SEQ ID NO 13600689 as cited in SEQ ID NO 0

SEQ ID NO: 34083 - protein, 78 aa, Arabidopsis thaliana; identical to SEQ ID NO: 30493
  peptide (1)..(78): Ceres Seq. ID no. 12340324

SEQ ID NO: 34084 - protein, 42 aa, Arabidopsis thaliana; identical to SEQ ID NO: 30494
  peptide (1)..(42): Ceres Seq. ID no. 12340325

SEQ ID NO: 34085 - DNA, 612 bp, Arabidopsis thaliana; identical to SEQ ID NO: 30495
  misc_feature (1)..(612): Ceres Seq. ID no. 12325571
  misc_feature (1)..(612): Ortholog of  Ceres SEQ ID NO 12556948 as cited in SEQ ID NO 54

SEQ ID NO: 34086 - protein, 113 aa, Arabidopsis thaliana; identical to SEQ ID NO: 30496
  peptide (1)..(113): Ceres Seq. ID no. 12325572

SEQ ID NO: 34087 - protein, 80 aa, Arabidopsis thaliana; identical to SEQ ID NO: 30497
  peptide (1)..(80): Ceres Seq. ID no. 12325573

SEQ ID NO: 34088 - protein, 66 aa, Arabidopsis thaliana; identical to SEQ ID NO: 30498
  peptide (1)..(66): Ceres Seq. ID no. 12325574

SEQ ID NO: 34089 - DNA, 2535 bp, Arabidopsis thaliana; identical to SEQ ID NO: 30499
  misc_feature (1)..(2535): Ceres Seq. ID no. 12327659
  misc_feature (1)..(2535): Ortholog of  Ceres SEQ ID NO 15168464 as cited in SEQ ID NO 59187

SEQ ID NO: 34090 - protein, 730 aa, Arabidopsis thaliana; identical to SEQ ID NO: 30500
  peptide (1)..(730): Ceres Seq. ID no. 12327660

SEQ ID NO: 34091 - protein, 720 aa, Arabidopsis thaliana; identical to SEQ ID NO: 30501
  peptide (1)..(720): Ceres Seq. ID no. 12327661

SEQ ID NO: 34092 - protein, 643 aa, Arabidopsis thaliana; identical to SEQ ID NO: 30502
  peptide (1)..(643): Ceres Seq. ID no. 12327662

SEQ ID NO: 34093 - DNA, 940 bp, Arabidopsis thaliana; identical to SEQ ID NO: 30503
  misc_feature (1)..(940): Ceres Seq. ID no. 12385730
  misc_feature (1)..(940): Ortholog of  Ceres SEQ ID NO 13599568 as cited in SEQ ID NO 509
  misc_feature (1)..(940): Ortholog of  Ceres SEQ ID NO 13638595 as cited in SEQ ID NO 52050
  misc_feature (1)..(940): Ortholog of  Ceres SEQ ID NO 13594748 as cited in SEQ ID NO 52114
  misc_feature (1)..(940): Ortholog of  Ceres SEQ ID NO 12623490 as cited in SEQ ID NO 61136
  misc_feature (1)..(940): Ortholog of  Ceres SEQ ID NO 12583993 as cited in SEQ ID NO 68098
  misc_feature (1)..(940): Ortholog of  Ceres SEQ ID NO 13654535 as cited in SEQ ID NO 68227

SEQ ID NO: 34094 - protein, 238 aa, Arabidopsis thaliana; identical to SEQ ID NO: 30504
  peptide (1)..(238): Ceres Seq. ID no. 12385731

SEQ ID NO: 34095 - protein, 219 aa, Arabidopsis thaliana; identical to SEQ ID NO: 30505
  peptide (1)..(219): Ceres Seq. ID no. 12385732

SEQ ID NO: 34096 - protein, 193 aa, Arabidopsis thaliana; identical to SEQ ID NO: 30506
  peptide (1)..(193): Ceres Seq. ID no. 12385733

SEQ ID NO: 34097 - DNA, 735 bp, Arabidopsis thaliana; identical to SEQ ID NO: 30507
  misc_feature (1)..(735): Ceres Seq. ID no. 13489816
  misc_feature (1)..(735): Ortholog of  Ceres SEQ ID NO 14309339 as cited in SEQ ID NO 0

SEQ ID NO: 34098 - protein, 196 aa, Arabidopsis thaliana; identical to SEQ ID NO: 30508
  peptide (1)..(196): Ceres Seq. ID no. 13489817

SEQ ID NO: 34099 - protein, 185 aa, Arabidopsis thaliana; identical to SEQ ID NO: 30509
  peptide (1)..(185): Ceres Seq. ID no. 13489818

SEQ ID NO: 34100 - DNA, 713 bp, Arabidopsis thaliana; identical to SEQ ID NO: 30510
  misc_feature (1)..(713): Ceres Seq. ID no. 12562391
  misc_feature (1)..(713): Ortholog of  Ceres SEQ ID NO 14315388 as cited in SEQ ID NO 54357
  misc_feature (1)..(713): Ortholog of  Ceres SEQ ID NO 14312886 as cited in SEQ ID NO 57142

SEQ ID NO: 34101 - protein, 179 aa, Arabidopsis thaliana; identical to SEQ ID NO: 30511
  peptide (1)..(179): Ceres Seq. ID no. 12562392

SEQ ID NO: 34102 - DNA, 645 bp, Arabidopsis thaliana; identical to SEQ ID NO: 30512
  misc_feature (1)..(645): Ceres Seq. ID no. 12333415
  misc_feature (1)..(645): Ortholog of  Ceres SEQ ID NO 13655287 as cited in SEQ ID NO 63004
  misc_feature (1)..(645): Ortholog of  Ceres SEQ ID NO 15173178 as cited in SEQ ID NO 64574

SEQ ID NO: 34103 - protein, 129 aa, Arabidopsis thaliana; identical to SEQ ID NO: 30513
  peptide (1)..(129): Ceres Seq. ID no. 12333416

SEQ ID NO: 34104 - protein, 97 aa, Arabidopsis thaliana; identical to SEQ ID NO: 30514
  peptide (1)..(97): Ceres Seq. ID no. 12333417

SEQ ID NO: 34105 - protein, 90 aa, Arabidopsis thaliana; identical to SEQ ID NO: 30515
  peptide (1)..(90): Ceres Seq. ID no. 12333418

SEQ ID NO: 34106 - DNA, 903 bp, Arabidopsis thaliana; identical to SEQ ID NO: 30516
  misc_feature (1)..(903): Ceres Seq. ID no. 12422995
  misc_feature (1)..(903): Ortholog of  Ceres SEQ ID NO 14316300 as cited in SEQ ID NO 59995
  misc_feature (1)..(903): Ortholog of  Ceres SEQ ID NO 13662758 as cited in SEQ ID NO 64912
  misc_feature (1)..(903): Ortholog of  Ceres SEQ ID NO 13595881 as cited in SEQ ID NO 67709
  misc_feature (1)..(903): Ortholog of  Ceres SEQ ID NO 12614145 as cited in SEQ ID NO 67937

SEQ ID NO: 34107 - protein, 263 aa, Arabidopsis thaliana; identical to SEQ ID NO: 30517
  peptide (1)..(263): Ceres Seq. ID no. 12422996

SEQ ID NO: 34108 - protein, 259 aa, Arabidopsis thaliana; identical to SEQ ID NO: 30518
  peptide (1)..(259): Ceres Seq. ID no. 12422997

SEQ ID NO: 34109 - protein, 167 aa, Arabidopsis thaliana; identical to SEQ ID NO: 30519
  peptide (1)..(167): Ceres Seq. ID no. 12422998

SEQ ID NO: 34110 - DNA, 871 bp, Arabidopsis thaliana; identical to SEQ ID NO: 30520
  misc_feature (1)..(871): Ceres Seq. ID no. 13621946
  misc_feature (1)..(871): Ortholog of  Ceres SEQ ID NO 13661994 as cited in SEQ ID NO 60568
  misc_feature (1)..(871): Ortholog of  Ceres SEQ ID NO 12584790 as cited in SEQ ID NO 62648

SEQ ID NO: 34111 - protein, 152 aa, Arabidopsis thaliana; identical to SEQ ID NO: 30521
  peptide (1)..(152): Ceres Seq. ID no. 13621947

SEQ ID NO: 34112 - protein, 143 aa, Arabidopsis thaliana; identical to SEQ ID NO: 30522
  peptide (1)..(143): Ceres Seq. ID no. 13621948

SEQ ID NO: 34113 - protein, 121 aa, Arabidopsis thaliana; identical to SEQ ID NO: 30523
  peptide (1)..(121): Ceres Seq. ID no. 13621949

SEQ ID NO: 34114 - DNA, 1076 bp, Arabidopsis thaliana; identical to SEQ ID NO: 30524
  misc_feature (1)..(1076): Ceres Seq. ID no. 13495712
  misc_feature (1)..(1076): Ortholog of  Ceres SEQ ID NO 13662949 as cited in SEQ ID NO 64276

SEQ ID NO: 34115 - protein, 223 aa, Arabidopsis thaliana; identical to SEQ ID NO: 30525
  peptide (1)..(223): Ceres Seq. ID no. 13495713

SEQ ID NO: 34116 - protein, 199 aa, Arabidopsis thaliana; identical to SEQ ID NO: 30526
  peptide (1)..(199): Ceres Seq. ID no. 13495714

SEQ ID NO: 34117 - protein, 167 aa, Arabidopsis thaliana; identical to SEQ ID NO: 30527
  peptide (1)..(167): Ceres Seq. ID no. 13495715

SEQ ID NO: 34118 - DNA, 1000 bp, Arabidopsis thaliana; identical to SEQ ID NO: 30528
  misc_feature (1)..(1000): Ceres Seq. ID no. 12332107
  misc_feature (1)..(1000): Ortholog of  Ceres SEQ ID NO 15169849 as cited in SEQ ID NO 53636
  misc_feature (1)..(1000): Ortholog of  Ceres SEQ ID NO 14307300 as cited in SEQ ID NO 54107

SEQ ID NO: 34119 - protein, 281 aa, Arabidopsis thaliana; identical to SEQ ID NO: 30529
  peptide (1)..(281): Ceres Seq. ID no. 12332108

SEQ ID NO: 34120 - protein, 262 aa, Arabidopsis thaliana; identical to SEQ ID NO: 30530
  peptide (1)..(262): Ceres Seq. ID no. 12332109

SEQ ID NO: 34121 - protein, 160 aa, Arabidopsis thaliana; identical to SEQ ID NO: 30531
  peptide (1)..(160): Ceres Seq. ID no. 12332110

SEQ ID NO: 34122 - DNA, 698 bp, Arabidopsis thaliana; identical to SEQ ID NO: 30532
  misc_feature (1)..(698): Ceres Seq. ID no. 12333385
  misc_feature (1)..(698): Ortholog of  Ceres SEQ ID NO 15178329 as cited in SEQ ID NO 52153

SEQ ID NO: 34123 - protein, 175 aa, Arabidopsis thaliana; identical to SEQ ID NO: 30533
  peptide (1)..(175): Ceres Seq. ID no. 12333386

SEQ ID NO: 34124 - protein, 130 aa, Arabidopsis thaliana; identical to SEQ ID NO: 30534
  peptide (1)..(130): Ceres Seq. ID no. 12333387

SEQ ID NO: 34125 - protein, 120 aa, Arabidopsis thaliana; identical to SEQ ID NO: 30535
  peptide (1)..(120): Ceres Seq. ID no. 12333388

SEQ ID NO: 34126 - DNA, 592 bp, Arabidopsis thaliana; identical to SEQ ID NO: 30536
  misc_feature (1)..(592): Ceres Seq. ID no. 12339207
  misc_feature (1)..(592): Ortholog of  Ceres SEQ ID NO 13662984 as cited in SEQ ID NO 64419

SEQ ID NO: 34127 - protein, 115 aa, Arabidopsis thaliana; identical to SEQ ID NO: 30537
  peptide (1)..(115): Ceres Seq. ID no. 12339208

SEQ ID NO: 34128 - DNA, 855 bp, Arabidopsis thaliana; identical to SEQ ID NO: 30538
  misc_feature (1)..(855): Ceres Seq. ID no. 13489834
  misc_feature (1)..(855): Ortholog of  Ceres SEQ ID NO 13663563 as cited in SEQ ID NO 66853

SEQ ID NO: 34129 - protein, 183 aa, Arabidopsis thaliana; identical to SEQ ID NO: 30539
  peptide (1)..(183): Ceres Seq. ID no. 13489835

SEQ ID NO: 34130 - protein, 150 aa, Arabidopsis thaliana; identical to SEQ ID NO: 30540
  peptide (1)..(150): Ceres Seq. ID no. 13489836

SEQ ID NO: 34131 - protein, 101 aa, Arabidopsis thaliana; identical to SEQ ID NO: 30541
  peptide (1)..(101): Ceres Seq. ID no. 13489837

SEQ ID NO: 34132 - DNA, 901 bp, Arabidopsis thaliana; identical to SEQ ID NO: 30542
  misc_feature (1)..(901): Ceres Seq. ID no. 12332065
  misc_feature (1)..(901): Ortholog of  Ceres SEQ ID NO 14316436 as cited in SEQ ID NO 59213

SEQ ID NO: 34133 - protein, 204 aa, Arabidopsis thaliana; identical to SEQ ID NO: 30543
  peptide (1)..(204): Ceres Seq. ID no. 12332066

SEQ ID NO: 34134 - protein, 183 aa, Arabidopsis thaliana; identical to SEQ ID NO: 30544
  peptide (1)..(183): Ceres Seq. ID no. 12332067

SEQ ID NO: 34135 - protein, 118 aa, Arabidopsis thaliana; identical to SEQ ID NO: 30545
  peptide (1)..(118): Ceres Seq. ID no. 12332068

SEQ ID NO: 34136 - DNA, 1052 bp, Arabidopsis thaliana; identical to SEQ ID NO: 30546
  misc_feature (1)..(1052): Ceres Seq. ID no. 12327211
  misc_feature (1)..(1052): Ortholog of  Ceres SEQ ID NO 13658132 as cited in SEQ ID NO 66758

SEQ ID NO: 34137 - protein, 296 aa, Arabidopsis thaliana; identical to SEQ ID NO: 30547
  peptide (1)..(296): Ceres Seq. ID no. 12327212

SEQ ID NO: 34138 - protein, 289 aa, Arabidopsis thaliana; identical to SEQ ID NO: 30548
  peptide (1)..(289): Ceres Seq. ID no. 12327213

SEQ ID NO: 34139 - protein, 237 aa, Arabidopsis thaliana; identical to SEQ ID NO: 30549
  peptide (1)..(237): Ceres Seq. ID no. 12327214

SEQ ID NO: 34140 - DNA, 955 bp, Arabidopsis thaliana; identical to SEQ ID NO: 30550
  misc_feature (1)..(955): Ceres Seq. ID no. 12579911
  misc_feature (1)..(955): Ortholog of  Ceres SEQ ID NO 13596601 as cited in SEQ ID NO 62486

SEQ ID NO: 34141 - protein, 253 aa, Arabidopsis thaliana; identical to SEQ ID NO: 30551
  peptide (1)..(253): Ceres Seq. ID no. 12579912

SEQ ID NO: 34142 - protein, 230 aa, Arabidopsis thaliana; identical to SEQ ID NO: 30552
  peptide (1)..(230): Ceres Seq. ID no. 12579913

SEQ ID NO: 34143 - protein, 187 aa, Arabidopsis thaliana; identical to SEQ ID NO: 30553
  peptide (1)..(187): Ceres Seq. ID no. 12579914

SEQ ID NO: 34144 - DNA, 836 bp, Arabidopsis thaliana; identical to SEQ ID NO: 30554
  misc_feature (1)..(836): Ceres Seq. ID no. 13489838
  misc_feature (1)..(836): Ortholog of  Ceres SEQ ID NO 12609339 as cited in SEQ ID NO 51780

SEQ ID NO: 34145 - protein, 237 aa, Arabidopsis thaliana; identical to SEQ ID NO: 30555
  peptide (1)..(237): Ceres Seq. ID no. 13489839

SEQ ID NO: 34146 - protein, 221 aa, Arabidopsis thaliana; identical to SEQ ID NO: 30556
  peptide (1)..(221): Ceres Seq. ID no. 13489840

SEQ ID NO: 34147 - protein, 165 aa, Arabidopsis thaliana; identical to SEQ ID NO: 30557
  peptide (1)..(165): Ceres Seq. ID no. 13489841

SEQ ID NO: 34148 - DNA, 691 bp, Arabidopsis thaliana; identical to SEQ ID NO: 30558
  misc_feature (1)..(691): Ceres Seq. ID no. 12332112
  misc_feature (1)..(691): Ortholog of  Ceres SEQ ID NO 15170007 as cited in SEQ ID NO 51348

SEQ ID NO: 34149 - protein, 159 aa, Arabidopsis thaliana; identical to SEQ ID NO: 30559
  peptide (1)..(159): Ceres Seq. ID no. 12332113

SEQ ID NO: 34150 - protein, 121 aa, Arabidopsis thaliana; identical to SEQ ID NO: 30560
  peptide (1)..(121): Ceres Seq. ID no. 12332114

SEQ ID NO: 34151 - DNA, 618 bp, Arabidopsis thaliana; identical to SEQ ID NO: 30561
  misc_feature (1)..(618): Ceres Seq. ID no. 13497742
  misc_feature (1)..(618): Ortholog of  Ceres SEQ ID NO 15174406 as cited in SEQ ID NO 0

SEQ ID NO: 34152 - protein, 118 aa, Arabidopsis thaliana; identical to SEQ ID NO: 30562
  peptide (1)..(118): Ceres Seq. ID no. 13497743

SEQ ID NO: 34153 - protein, 114 aa, Arabidopsis thaliana; identical to SEQ ID NO: 30563
  peptide (1)..(114): Ceres Seq. ID no. 13497744

SEQ ID NO: 34154 - protein, 109 aa, Arabidopsis thaliana; identical to SEQ ID NO: 30564
  peptide (1)..(109): Ceres Seq. ID no. 13497745

SEQ ID NO: 34155 - DNA, 1065 bp, Arabidopsis thaliana; identical to SEQ ID NO: 30565
  misc_feature (1)..(1065): Ceres Seq. ID no. 12370948
  misc_feature (1)..(1065): Ortholog of  Ceres SEQ ID NO 14311950 as cited in SEQ ID NO 51677

SEQ ID NO: 34156 - protein, 271 aa, Arabidopsis thaliana; identical to SEQ ID NO: 30566
  peptide (1)..(271): Ceres Seq. ID no. 12370949

SEQ ID NO: 34157 - protein, 141 aa, Arabidopsis thaliana; identical to SEQ ID NO: 30567
  peptide (1)..(141): Ceres Seq. ID no. 12370950

SEQ ID NO: 34158 - DNA, 1580 bp, Arabidopsis thaliana; identical to SEQ ID NO: 30568
  misc_feature (1)..(1580): Ceres Seq. ID no. 12334488
  misc_feature (1)..(1580): Ortholog of  Ceres SEQ ID NO 14313288 as cited in SEQ ID NO 67419

SEQ ID NO: 34159 - protein, 198 aa, Arabidopsis thaliana; identical to SEQ ID NO: 30569
  peptide (1)..(198): Ceres Seq. ID no. 12334489

SEQ ID NO: 34160 - protein, 197 aa, Arabidopsis thaliana; identical to SEQ ID NO: 30570
  peptide (1)..(197): Ceres Seq. ID no. 12334490

SEQ ID NO: 34161 - protein, 150 aa, Arabidopsis thaliana; identical to SEQ ID NO: 30571
  peptide (1)..(150): Ceres Seq. ID no. 12334491

SEQ ID NO: 34162 - DNA, 1205 bp, Arabidopsis thaliana; identical to SEQ ID NO: 30572
  misc_feature (1)..(1205): Ceres Seq. ID no. 12348519
  misc_feature (1)..(1205): Ortholog of  Ceres SEQ ID NO 14303324 as cited in SEQ ID NO 54563
  misc_feature (1)..(1205): Ortholog of  Ceres SEQ ID NO 14308575 as cited in SEQ ID NO 58782

SEQ ID NO: 34163 - protein, 160 aa, Arabidopsis thaliana; identical to SEQ ID NO: 30573
  peptide (1)..(160): Ceres Seq. ID no. 12348520

SEQ ID NO: 34164 - protein, 156 aa, Arabidopsis thaliana; identical to SEQ ID NO: 30574
  peptide (1)..(156): Ceres Seq. ID no. 12348521

SEQ ID NO: 34165 - protein, 106 aa, Arabidopsis thaliana; identical to SEQ ID NO: 30575
  peptide (1)..(106): Ceres Seq. ID no. 12348522

SEQ ID NO: 34166 - DNA, 1812 bp, Arabidopsis thaliana; identical to SEQ ID NO: 30576
  misc_feature (1)..(1812): Ceres Seq. ID no. 12327219
  misc_feature (1)..(1812): Ortholog of  Ceres SEQ ID NO 14311183 as cited in SEQ ID NO 58495
  misc_feature (1)..(1812): Ortholog of  Ceres SEQ ID NO 13502874 as cited in SEQ ID NO 66298
  misc_feature (1)..(1812): Ortholog of  Ceres SEQ ID NO 12614124 as cited in SEQ ID NO 68392

SEQ ID NO: 34167 - protein, 331 aa, Arabidopsis thaliana; identical to SEQ ID NO: 30577
  peptide (1)..(331): Ceres Seq. ID no. 12327220

SEQ ID NO: 34168 - protein, 239 aa, Arabidopsis thaliana; identical to SEQ ID NO: 30578
  peptide (1)..(239): Ceres Seq. ID no. 12327221

SEQ ID NO: 34169 - protein, 195 aa, Arabidopsis thaliana; identical to SEQ ID NO: 30579
  peptide (1)..(195): Ceres Seq. ID no. 12327222

SEQ ID NO: 34170 - DNA, 1370 bp, Arabidopsis thaliana; identical to SEQ ID NO: 30580
  misc_feature (1)..(1370): Ceres Seq. ID no. 13574978
  misc_feature (1)..(1370): Ortholog of  Ceres SEQ ID NO 12364737 as cited in SEQ ID NO 51089
  misc_feature (1)..(1370): Ortholog of  Ceres SEQ ID NO 14311515 as cited in SEQ ID NO 51680
  misc_feature (1)..(1370): Ortholog of  Ceres SEQ ID NO 13582301 as cited in SEQ ID NO 56509
  misc_feature (1)..(1370): Ortholog of  Ceres SEQ ID NO 14315035 as cited in SEQ ID NO 56880
  misc_feature (1)..(1370): Ortholog of  Ceres SEQ ID NO 13594276 as cited in SEQ ID NO 57728
  misc_feature (1)..(1370): Ortholog of  Ceres SEQ ID NO 13594147 as cited in SEQ ID NO 58975
  misc_feature (1)..(1370): Ortholog of  Ceres SEQ ID NO 13655302 as cited in SEQ ID NO 63307
  misc_feature (1)..(1370): Ortholog of  Ceres SEQ ID NO 13597380 as cited in SEQ ID NO 64054
  misc_feature (1)..(1370): Ortholog of  Ceres SEQ ID NO 12625474 as cited in SEQ ID NO 64169
  misc_feature (1)..(1370): Ortholog of  Ceres SEQ ID NO 13597502 as cited in SEQ ID NO 64681

SEQ ID NO: 34171 - protein, 362 aa, Arabidopsis thaliana; identical to SEQ ID NO: 30581
  peptide (1)..(362): Ceres Seq. ID no. 13574979

SEQ ID NO: 34172 - protein, 359 aa, Arabidopsis thaliana; identical to SEQ ID NO: 30582
  peptide (1)..(359): Ceres Seq. ID no. 13574980

SEQ ID NO: 34173 - protein, 356 aa, Arabidopsis thaliana; identical to SEQ ID NO: 30583
  peptide (1)..(356): Ceres Seq. ID no. 13574981

SEQ ID NO: 34174 - DNA, 1592 bp, Arabidopsis thaliana; identical to SEQ ID NO: 30584
  misc_feature (1)..(1592): Ceres Seq. ID no. 13487835
  misc_feature (1)..(1592): Ortholog of  Ceres SEQ ID NO 13596512 as cited in SEQ ID NO 62074

SEQ ID NO: 34175 - protein, 437 aa, Arabidopsis thaliana; identical to SEQ ID NO: 23044
  peptide (1)..(437): Ceres Seq. ID no. 13487836

SEQ ID NO: 34176 - protein, 296 aa, Arabidopsis thaliana; identical to SEQ ID NO: 23045
  peptide (1)..(296): Ceres Seq. ID no. 13487837

SEQ ID NO: 34177 - DNA, 1337 bp, Arabidopsis thaliana; identical to SEQ ID NO: 30587
  misc_feature (1)..(1337): Ceres Seq. ID no. 12396217
  misc_feature (1)..(1337): Ortholog of  Ceres SEQ ID NO 13595222 as cited in SEQ ID NO 56312
  misc_feature (1)..(1337): Ortholog of  Ceres SEQ ID NO 13654209 as cited in SEQ ID NO 62121
  misc_feature (1)..(1337): Ortholog of  Ceres SEQ ID NO 13596965 as cited in SEQ ID NO 63363

SEQ ID NO: 34178 - protein, 321 aa, Arabidopsis thaliana; identical to SEQ ID NO: 30588
  peptide (1)..(321): Ceres Seq. ID no. 12396218

SEQ ID NO: 34179 - protein, 266 aa, Arabidopsis thaliana; identical to SEQ ID NO: 30589
  peptide (1)..(266): Ceres Seq. ID no. 12396219

SEQ ID NO: 34180 - protein, 183 aa, Arabidopsis thaliana; identical to SEQ ID NO: 30590
  peptide (1)..(183): Ceres Seq. ID no. 12396220

SEQ ID NO: 34181 - DNA, 1378 bp, Arabidopsis thaliana; identical to SEQ ID NO: 30591
  misc_feature (1)..(1378): Ceres Seq. ID no. 12738505
  misc_feature (1)..(1378): Ortholog of  Ceres SEQ ID NO 13597325 as cited in SEQ ID NO 63935

SEQ ID NO: 34182 - protein, 358 aa, Arabidopsis thaliana; identical to SEQ ID NO: 30592
  peptide (1)..(358): Ceres Seq. ID no. 12738506

SEQ ID NO: 34183 - protein, 279 aa, Arabidopsis thaliana; identical to SEQ ID NO: 30593
  peptide (1)..(279): Ceres Seq. ID no. 12738507

SEQ ID NO: 34184 - protein, 272 aa, Arabidopsis thaliana; identical to SEQ ID NO: 30594
  peptide (1)..(272): Ceres Seq. ID no. 12738508

SEQ ID NO: 34185 - DNA, 843 bp, Arabidopsis thaliana; identical to SEQ ID NO: 30595
  misc_feature (1)..(843): Ceres Seq. ID no. 12338037
  misc_feature (1)..(843): Ortholog of  Ceres SEQ ID NO 12610930 as cited in SEQ ID NO 55892

SEQ ID NO: 34186 - protein, 187 aa, Arabidopsis thaliana; identical to SEQ ID NO: 30596
  peptide (1)..(187): Ceres Seq. ID no. 12338038

SEQ ID NO: 34187 - protein, 121 aa, Arabidopsis thaliana; identical to SEQ ID NO: 30597
  peptide (1)..(121): Ceres Seq. ID no. 12338039

SEQ ID NO: 34188 - DNA, 1262 bp, Arabidopsis thaliana; identical to SEQ ID NO: 30598
  misc_feature (1)..(1262): Ceres Seq. ID no. 12395955
  misc_feature (1)..(1262): Ortholog of  Ceres SEQ ID NO 15225131 as cited in SEQ ID NO 65974

SEQ ID NO: 34189 - protein, 270 aa, Arabidopsis thaliana; identical to SEQ ID NO: 30599
  peptide (1)..(270): Ceres Seq. ID no. 12395956

SEQ ID NO: 34190 - protein, 221 aa, Arabidopsis thaliana; identical to SEQ ID NO: 30600
  peptide (1)..(221): Ceres Seq. ID no. 12395957

SEQ ID NO: 34191 - protein, 211 aa, Arabidopsis thaliana; identical to SEQ ID NO: 30601
  peptide (1)..(211): Ceres Seq. ID no. 12395958

SEQ ID NO: 34192 - DNA, 756 bp, Arabidopsis thaliana; identical to SEQ ID NO: 30602
  misc_feature (1)..(756): Ceres Seq. ID no. 12562490
  misc_feature (1)..(756): Ortholog of  Ceres SEQ ID NO 15173608 as cited in SEQ ID NO 57605

SEQ ID NO: 34193 - protein, 198 aa, Arabidopsis thaliana; identical to SEQ ID NO: 30603
  peptide (1)..(198): Ceres Seq. ID no. 12562491

SEQ ID NO: 34194 - protein, 166 aa, Arabidopsis thaliana; identical to SEQ ID NO: 30604
  peptide (1)..(166): Ceres Seq. ID no. 12562492

SEQ ID NO: 34195 - DNA, 1086 bp, Arabidopsis thaliana; identical to SEQ ID NO: 30605
  misc_feature (1)..(1086): Ceres Seq. ID no. 12333091
  misc_feature (1)..(1086): Ortholog of  Ceres SEQ ID NO 14314390 as cited in SEQ ID NO 57717

SEQ ID NO: 34196 - protein, 275 aa, Arabidopsis thaliana; identical to SEQ ID NO: 30606
  peptide (1)..(275): Ceres Seq. ID no. 12333092

SEQ ID NO: 34197 - protein, 186 aa, Arabidopsis thaliana; identical to SEQ ID NO: 30607
  peptide (1)..(186): Ceres Seq. ID no. 12333093

SEQ ID NO: 34198 - DNA, 657 bp, Arabidopsis thaliana; identical to SEQ ID NO: 30608
  misc_feature (1)..(657): Ceres Seq. ID no. 13504784
  misc_feature (1)..(657): Ortholog of  Ceres SEQ ID NO 13663563 as cited in SEQ ID NO 66853

SEQ ID NO: 34199 - protein, 218 aa, Arabidopsis thaliana; identical to SEQ ID NO: 30609
  peptide (1)..(218): Ceres Seq. ID no. 13504785

SEQ ID NO: 34200 - protein, 183 aa, Arabidopsis thaliana; identical to SEQ ID NO: 30610
  peptide (1)..(183): Ceres Seq. ID no. 13504786

SEQ ID NO: 34201 - protein, 181 aa, Arabidopsis thaliana; identical to SEQ ID NO: 30611
  peptide (1)..(181): Ceres Seq. ID no. 13504787

SEQ ID NO: 34202 - DNA, 821 bp, Arabidopsis thaliana; identical to SEQ ID NO: 30612
  misc_feature (1)..(821): Ceres Seq. ID no. 12333094
  misc_feature (1)..(821): Ortholog of  Ceres SEQ ID NO 14301603 as cited in SEQ ID NO 67721
  misc_feature (1)..(821): Ortholog of  Ceres SEQ ID NO 13596128 as cited in SEQ ID NO 67831

SEQ ID NO: 34203 - protein, 225 aa, Arabidopsis thaliana; identical to SEQ ID NO: 30613
  peptide (1)..(225): Ceres Seq. ID no. 12333095

SEQ ID NO: 34204 - protein, 220 aa, Arabidopsis thaliana; identical to SEQ ID NO: 30614
  peptide (1)..(220): Ceres Seq. ID no. 12333096

SEQ ID NO: 34205 - protein, 207 aa, Arabidopsis thaliana; identical to SEQ ID NO: 30615
  peptide (1)..(207): Ceres Seq. ID no. 12333097

SEQ ID NO: 34206 - DNA, 2185 bp, Arabidopsis thaliana; identical to SEQ ID NO: 30616
  misc_feature (1)..(2185): Ceres Seq. ID no. 13591907
  misc_feature (1)..(2185): Ortholog of  Ceres SEQ ID NO 15171235 as cited in SEQ ID NO 52469
  misc_feature (1)..(2185): Ortholog of  Ceres SEQ ID NO 15172705 as cited in SEQ ID NO 56069
  misc_feature (1)..(2185): Ortholog of  Ceres SEQ ID NO 12635657 as cited in SEQ ID NO 0
  misc_feature (1)..(2185): Ortholog of  Ceres SEQ ID NO 12635879 as cited in SEQ ID NO 0
  misc_feature (1)..(2185): Ortholog of  Ceres SEQ ID NO 13599649 as cited in SEQ ID NO 0
  misc_feature (1)..(2185): Ortholog of  Ceres SEQ ID NO 14309205 as cited in SEQ ID NO 0
  misc_feature (1)..(2185): Ortholog of  Ceres SEQ ID NO 15177492 as cited in SEQ ID NO 0

SEQ ID NO: 34207 - protein, 446 aa, Arabidopsis thaliana; identical to SEQ ID NO: 30617
  peptide (1)..(446): Ceres Seq. ID no. 13591908

SEQ ID NO: 34208 - protein, 338 aa, Arabidopsis thaliana; identical to SEQ ID NO: 30618
  peptide (1)..(338): Ceres Seq. ID no. 13591909

SEQ ID NO: 34209 - protein, 253 aa, Arabidopsis thaliana; identical to SEQ ID NO: 30619
  peptide (1)..(253): Ceres Seq. ID no. 13591910

SEQ ID NO: 34210 - DNA, 1056 bp, Arabidopsis thaliana; identical to SEQ ID NO: 30620
  misc_feature (1)..(1056): Ceres Seq. ID no. 12396833
  misc_feature (1)..(1056): Ortholog of  Ceres SEQ ID NO 13656486 as cited in SEQ ID NO 69202

SEQ ID NO: 34211 - protein, 153 aa, Arabidopsis thaliana; identical to SEQ ID NO: 30621
  peptide (1)..(153): Ceres Seq. ID no. 12396834

SEQ ID NO: 34212 - protein, 143 aa, Arabidopsis thaliana; identical to SEQ ID NO: 30622
  peptide (1)..(143): Ceres Seq. ID no. 12396835

SEQ ID NO: 34213 - protein, 117 aa, Arabidopsis thaliana; identical to SEQ ID NO: 30623
  peptide (1)..(117): Ceres Seq. ID no. 12396836

SEQ ID NO: 34214 - DNA, 1657 bp, Arabidopsis thaliana; identical to SEQ ID NO: 30624
  misc_feature (1)..(1657): Ceres Seq. ID no. 13487118
  misc_feature (1)..(1657): Ortholog of  Ceres SEQ ID NO 15224473 as cited in SEQ ID NO 66479

SEQ ID NO: 34215 - protein, 438 aa, Arabidopsis thaliana; identical to SEQ ID NO: 30625
  peptide (1)..(438): Ceres Seq. ID no. 13487119

SEQ ID NO: 34216 - protein, 429 aa, Arabidopsis thaliana; identical to SEQ ID NO: 30626
  peptide (1)..(429): Ceres Seq. ID no. 13487120

SEQ ID NO: 34217 - protein, 424 aa, Arabidopsis thaliana; identical to SEQ ID NO: 30627
  peptide (1)..(424): Ceres Seq. ID no. 13487121

SEQ ID NO: 34218 - DNA, 757 bp, Arabidopsis thaliana; identical to SEQ ID NO: 30628
  misc_feature (1)..(757): Ceres Seq. ID no. 12396975
  misc_feature (1)..(757): Ortholog of  Ceres SEQ ID NO 12624607 as cited in SEQ ID NO 61454

SEQ ID NO: 34219 - protein, 163 aa, Arabidopsis thaliana; identical to SEQ ID NO: 30629
  peptide (1)..(163): Ceres Seq. ID no. 12396976

SEQ ID NO: 34220 - protein, 157 aa, Arabidopsis thaliana; identical to SEQ ID NO: 30630
  peptide (1)..(157): Ceres Seq. ID no. 12396977

SEQ ID NO: 34221 - protein, 156 aa, Arabidopsis thaliana; identical to SEQ ID NO: 30631
  peptide (1)..(156): Ceres Seq. ID no. 12396978

SEQ ID NO: 34222 - DNA, 1828 bp, Arabidopsis thaliana; identical to SEQ ID NO: 30632
  misc_feature (1)..(1828): Ceres Seq. ID no. 13612923
  misc_feature (1)..(1828): Ortholog of  Ceres SEQ ID NO 13503610 as cited in SEQ ID NO 62416
  misc_feature (1)..(1828): Ortholog of  Ceres SEQ ID NO 13657610 as cited in SEQ ID NO 66165
  misc_feature (1)..(1828): Ortholog of  Ceres SEQ ID NO 13598312 as cited in SEQ ID NO 68448
  misc_feature (1)..(1828): Ortholog of  Ceres SEQ ID NO 13596100 as cited in SEQ ID NO 68573

SEQ ID NO: 34223 - protein, 529 aa, Arabidopsis thaliana [sequence omitted]

SEQ ID NO: 34224 - protein, 397 aa, Arabidopsis thaliana; identical to SEQ ID NO: 30634
  peptide (1)..(397): Ceres Seq. ID no. 13612925

SEQ ID NO: 34225 - protein, 352 aa, Arabidopsis thaliana; identical to SEQ ID NO: 30635
  peptide (1)..(352): Ceres Seq. ID no. 13612926

SEQ ID NO: 34226 - DNA, 1214 bp, Arabidopsis thaliana; identical to SEQ ID NO: 30636
  misc_feature (1)..(1214): Ceres Seq. ID no. 12333327
  misc_feature (1)..(1214): Ortholog of  Ceres SEQ ID NO 14315440 as cited in SEQ ID NO 57161

SEQ ID NO: 34227 - protein, 171 aa, Arabidopsis thaliana; identical to SEQ ID NO: 30637
  peptide (1)..(171): Ceres Seq. ID no. 12333328

SEQ ID NO: 34228 - protein, 136 aa, Arabidopsis thaliana; identical to SEQ ID NO: 30638
  peptide (1)..(136): Ceres Seq. ID no. 12333329

SEQ ID NO: 34229 - protein, 124 aa, Arabidopsis thaliana; identical to SEQ ID NO: 30639
  peptide (1)..(124): Ceres Seq. ID no. 12333330

SEQ ID NO: 34230 - DNA, 1093 bp, Arabidopsis thaliana; identical to SEQ ID NO: 30640
  misc_feature (1)..(1093): Ceres Seq. ID no. 12357818
  misc_feature (1)..(1093): Ortholog of  Ceres SEQ ID NO 14315553 as cited in SEQ ID NO 60445
  misc_feature (1)..(1093): Ortholog of  Ceres SEQ ID NO 13598045 as cited in SEQ ID NO 66822

SEQ ID NO: 34231 - protein, 246 aa, Arabidopsis thaliana; identical to SEQ ID NO: 26243
  peptide (1)..(246): Ceres Seq. ID no. 12357819

SEQ ID NO: 34232 - protein, 164 aa, Arabidopsis thaliana; identical to SEQ ID NO: 26244
  peptide (1)..(164): Ceres Seq. ID no. 12357820

SEQ ID NO: 34233 - protein, 138 aa, Arabidopsis thaliana; identical to SEQ ID NO: 30643
  peptide (1)..(138): Ceres Seq. ID no. 12357821

SEQ ID NO: 34234 - DNA, 1590 bp, Arabidopsis thaliana; identical to SEQ ID NO: 30644
  misc_feature (1)..(1590): Ceres Seq. ID no. 13580307
  misc_feature (1)..(1590): Ortholog of  Ceres SEQ ID NO 14311535 as cited in SEQ ID NO 51559
  misc_feature (1)..(1590): Ortholog of  Ceres SEQ ID NO 15176200 as cited in SEQ ID NO 55188

SEQ ID NO: 34235 - protein, 470 aa, Arabidopsis thaliana; identical to SEQ ID NO: 30645
  peptide (1)..(470): Ceres Seq. ID no. 13580308

SEQ ID NO: 34236 - protein, 469 aa, Arabidopsis thaliana; identical to SEQ ID NO: 30646
  peptide (1)..(469): Ceres Seq. ID no. 13580309

SEQ ID NO: 34237 - protein, 454 aa, Arabidopsis thaliana; identical to SEQ ID NO: 30647
  peptide (1)..(454): Ceres Seq. ID no. 13580310

SEQ ID NO: 34238 - DNA, 1508 bp, Arabidopsis thaliana; identical to SEQ ID NO: 30648
  misc_feature (1)..(1508): Ceres Seq. ID no. 12388503
  misc_feature (1)..(1508): Ortholog of  Ceres SEQ ID NO 15178228 as cited in SEQ ID NO 58330
  misc_feature (1)..(1508): Ortholog of  Ceres SEQ ID NO 13596635 as cited in SEQ ID NO 62488

SEQ ID NO: 34239 - protein, 323 aa, Arabidopsis thaliana; identical to SEQ ID NO: 30649
  peptide (1)..(323): Ceres Seq. ID no. 12388504

SEQ ID NO: 34240 - protein, 191 aa, Arabidopsis thaliana; identical to SEQ ID NO: 30650
  peptide (1)..(191): Ceres Seq. ID no. 12388505

SEQ ID NO: 34241 - protein, 170 aa, Arabidopsis thaliana; identical to SEQ ID NO: 30651
  peptide (1)..(170): Ceres Seq. ID no. 12388506

SEQ ID NO: 34242 - DNA, 1196 bp, Arabidopsis thaliana; identical to SEQ ID NO: 30652
  misc_feature (1)..(1196): Ceres Seq. ID no. 13509751
  misc_feature (1)..(1196): Ortholog of  Ceres SEQ ID NO 13598413 as cited in SEQ ID NO 68934

SEQ ID NO: 34243 - protein, 272 aa, Arabidopsis thaliana; identical to SEQ ID NO: 30653
  peptide (1)..(272): Ceres Seq. ID no. 13509752

SEQ ID NO: 34244 - DNA, 2435 bp, Arabidopsis thaliana; identical to SEQ ID NO: 30654
  misc_feature (1)..(2435): Ceres Seq. ID no. 12327293
  misc_feature (1)..(2435): Ortholog of  Ceres SEQ ID NO 12627433 as cited in SEQ ID NO 61601

SEQ ID NO: 34245 - protein, 727 aa, Arabidopsis thaliana; identical to SEQ ID NO: 30655
  peptide (1)..(727): Ceres Seq. ID no. 12327294

SEQ ID NO: 34246 - protein, 650 aa, Arabidopsis thaliana; identical to SEQ ID NO: 30656
  peptide (1)..(650): Ceres Seq. ID no. 12327295

SEQ ID NO: 34247 - protein, 592 aa, Arabidopsis thaliana; identical to SEQ ID NO: 30657
  peptide (1)..(592): Ceres Seq. ID no. 12327296

SEQ ID NO: 34248 - DNA, 1582 bp, Arabidopsis thaliana; identical to SEQ ID NO: 30658
  misc_feature (1)..(1582): Ceres Seq. ID no. 12339796
  misc_feature (1)..(1582): Ortholog of  Ceres SEQ ID NO 12586556 as cited in SEQ ID NO 64667
  misc_feature (1)..(1582): Ortholog of  Ceres SEQ ID NO 13660894 as cited in SEQ ID NO 67475

SEQ ID NO: 34249 - protein, 431 aa, Arabidopsis thaliana; identical to SEQ ID NO: 30659
  peptide (1)..(431): Ceres Seq. ID no. 12339797

SEQ ID NO: 34250 - protein, 429 aa, Arabidopsis thaliana; identical to SEQ ID NO: 30660
  peptide (1)..(429): Ceres Seq. ID no. 12339798

SEQ ID NO: 34251 - protein, 418 aa, Arabidopsis thaliana; identical to SEQ ID NO: 30661
  peptide (1)..(418): Ceres Seq. ID no. 12339799

SEQ ID NO: 34252 - DNA, 1274 bp, Arabidopsis thaliana; identical to SEQ ID NO: 30662
  misc_feature (1)..(1274): Ceres Seq. ID no. 12394774
  misc_feature (1)..(1274): Ortholog of  Ceres SEQ ID NO 15176230 as cited in SEQ ID NO 58796
  misc_feature (1)..(1274): Ortholog of  Ceres SEQ ID NO 14308156 as cited in SEQ ID NO 59006
  misc_feature (1)..(1274): Ortholog of  Ceres SEQ ID NO 13596321 as cited in SEQ ID NO 67976

SEQ ID NO: 34253 - protein, 362 aa, Arabidopsis thaliana; identical to SEQ ID NO: 30663
  peptide (1)..(362): Ceres Seq. ID no. 12394775

SEQ ID NO: 34254 - protein, 334 aa, Arabidopsis thaliana; identical to SEQ ID NO: 30664
  peptide (1)..(334): Ceres Seq. ID no. 12394776

SEQ ID NO: 34255 - protein, 309 aa, Arabidopsis thaliana; identical to SEQ ID NO: 30665
  peptide (1)..(309): Ceres Seq. ID no. 12394777

SEQ ID NO: 34256 - DNA, 865 bp, Arabidopsis thaliana; identical to SEQ ID NO: 30666
  misc_feature (1)..(865): Ceres Seq. ID no. 12603611
  misc_feature (1)..(865): Ortholog of  Ceres SEQ ID NO 14303437 as cited in SEQ ID NO 54411
  misc_feature (1)..(865): Ortholog of  Ceres SEQ ID NO 12611816 as cited in SEQ ID NO 56754
  misc_feature (1)..(865): Ortholog of  Ceres SEQ ID NO 15170943 as cited in SEQ ID NO 59454

SEQ ID NO: 34257 - protein, 190 aa, Arabidopsis thaliana; identical to SEQ ID NO: 30667
  peptide (1)..(190): Ceres Seq. ID no. 12603612

SEQ ID NO: 34258 - DNA, 1371 bp, Arabidopsis thaliana; identical to SEQ ID NO: 30668
  misc_feature (1)..(1371): Ceres Seq. ID no. 12722627
  misc_feature (1)..(1371): Ortholog of  Ceres SEQ ID NO 15179015 as cited in SEQ ID NO 0
  misc_feature (1)..(1371): Ortholog of  Ceres SEQ ID NO 15179613 as cited in SEQ ID NO 0

SEQ ID NO: 34259 - protein, 303 aa, Arabidopsis thaliana; identical to SEQ ID NO: 30669
  peptide (1)..(303): Ceres Seq. ID no. 12722628

SEQ ID NO: 34260 - protein, 247 aa, Arabidopsis thaliana; identical to SEQ ID NO: 30670
  peptide (1)..(247): Ceres Seq. ID no. 12722629

SEQ ID NO: 34261 - protein, 245 aa, Arabidopsis thaliana; identical to SEQ ID NO: 30671
  peptide (1)..(245): Ceres Seq. ID no. 12722630

SEQ ID NO: 34262 - DNA, 1359 bp, Arabidopsis thaliana; identical to SEQ ID NO: 30672
  misc_feature (1)..(1359): Ceres Seq. ID no. 12384828
  misc_feature (1)..(1359): Ortholog of  Ceres SEQ ID NO 13503476 as cited in SEQ ID NO 61978
  misc_feature (1)..(1359): Ortholog of  Ceres SEQ ID NO 12578438 as cited in SEQ ID NO 62201
  misc_feature (1)..(1359): Ortholog of  Ceres SEQ ID NO 12617675 as cited in SEQ ID NO 64656

SEQ ID NO: 34263 - protein, 333 aa, Arabidopsis thaliana; identical to SEQ ID NO: 30673
  peptide (1)..(333): Ceres Seq. ID no. 12384829

SEQ ID NO: 34264 - protein, 323 aa, Arabidopsis thaliana; identical to SEQ ID NO: 30674
  peptide (1)..(323): Ceres Seq. ID no. 12384830

SEQ ID NO: 34265 - protein, 238 aa, Arabidopsis thaliana; identical to SEQ ID NO: 30675
  peptide (1)..(238): Ceres Seq. ID no. 12384831

SEQ ID NO: 34266 - DNA, 1810 bp, Arabidopsis thaliana; identical to SEQ ID NO: 30676
  misc_feature (1)..(1810): Ceres Seq. ID no. 12327223
  misc_feature (1)..(1810): Ortholog of  Ceres SEQ ID NO 15169264 as cited in SEQ ID NO 55026
  misc_feature (1)..(1810): Ortholog of  Ceres SEQ ID NO 15224709 as cited in SEQ ID NO 68627

SEQ ID NO: 34267 - protein, 522 aa, Arabidopsis thaliana; identical to SEQ ID NO: 30677
  peptide (1)..(522): Ceres Seq. ID no. 12327224

SEQ ID NO: 34268 - protein, 503 aa, Arabidopsis thaliana; identical to SEQ ID NO: 30678
  peptide (1)..(503): Ceres Seq. ID no. 12327225

SEQ ID NO: 34269 - protein, 461 aa, Arabidopsis thaliana; identical to SEQ ID NO: 30679
  peptide (1)..(461): Ceres Seq. ID no. 12327226

SEQ ID NO: 34270 - DNA, 921 bp, Arabidopsis thaliana; identical to SEQ ID NO: 30680
  misc_feature (1)..(921): Ceres Seq. ID no. 12385734
  misc_feature (1)..(921): Ortholog of  Ceres SEQ ID NO 13582619 as cited in SEQ ID NO 56520
  misc_feature (1)..(921): Ortholog of  Ceres SEQ ID NO 13660872 as cited in SEQ ID NO 60830
  misc_feature (1)..(921): Ortholog of  Ceres SEQ ID NO 12616221 as cited in SEQ ID NO 63291

SEQ ID NO: 34271 - protein, 268 aa, Arabidopsis thaliana; identical to SEQ ID NO: 30681
  peptide (1)..(268): Ceres Seq. ID no. 12385735

SEQ ID NO: 34272 - protein, 201 aa, Arabidopsis thaliana; identical to SEQ ID NO: 30682
  peptide (1)..(201): Ceres Seq. ID no. 12385736

SEQ ID NO: 34273 - protein, 158 aa, Arabidopsis thaliana; identical to SEQ ID NO: 30683
  peptide (1)..(158): Ceres Seq. ID no. 12385737

SEQ ID NO: 34274 - DNA, 1781 bp, Arabidopsis thaliana; identical to SEQ ID NO: 30684
  misc_feature (1)..(1781): Ceres Seq. ID no. 12372041
  misc_feature (1)..(1781): Ortholog of  Ceres SEQ ID NO 13659971 as cited in SEQ ID NO 67565
  misc_feature (1)..(1781): Ortholog of  Ceres SEQ ID NO 13500385 as cited in SEQ ID NO 67583

SEQ ID NO: 34275 - protein, 523 aa, Arabidopsis thaliana; identical to SEQ ID NO: 30685
  peptide (1)..(523): Ceres Seq. ID no. 12372042

SEQ ID NO: 34276 - protein, 426 aa, Arabidopsis thaliana; identical to SEQ ID NO: 30686
  peptide (1)..(426): Ceres Seq. ID no. 12372043

SEQ ID NO: 34277 - protein, 384 aa, Arabidopsis thaliana; identical to SEQ ID NO: 30687
  peptide (1)..(384): Ceres Seq. ID no. 12372044

SEQ ID NO: 34278 - DNA, 711 bp, Arabidopsis thaliana; identical to SEQ ID NO: 30688
  misc_feature (1)..(711): Ceres Seq. ID no. 12321740
  misc_feature (1)..(711): Ortholog of  Ceres SEQ ID NO 13594809 as cited in SEQ ID NO 51847
  misc_feature (1)..(711): Ortholog of  Ceres SEQ ID NO 12617639 as cited in SEQ ID NO 65219
  misc_feature (1)..(711): Ortholog of  Ceres SEQ ID NO 14309033 as cited in SEQ ID NO 0
  misc_feature (1)..(711): Ortholog of  Ceres SEQ ID NO 15173998 as cited in SEQ ID NO 0
  misc_feature (1)..(711): Ortholog of  Ceres SEQ ID NO 15178333 as cited in SEQ ID NO 0

SEQ ID NO: 34279 - protein, 168 aa, Arabidopsis thaliana; identical to SEQ ID NO: 30689
  peptide (1)..(168): Ceres Seq. ID no. 12321741

SEQ ID NO: 34280 - protein, 136 aa, Arabidopsis thaliana; identical to SEQ ID NO: 25481
  peptide (1)..(136): Ceres Seq. ID no. 12321742

SEQ ID NO: 34281 - protein, 111 aa, Arabidopsis thaliana; identical to SEQ ID NO: 25482
  peptide (1)..(111): Ceres Seq. ID no. 12321743

SEQ ID NO: 34282 - DNA, 1207 bp, Arabidopsis thaliana; identical to SEQ ID NO: 30692
  misc_feature (1)..(1207): Ceres Seq. ID no. 13486911
  misc_feature (1)..(1207): Ortholog of  Ceres SEQ ID NO 14308107 as cited in SEQ ID NO 59030
  misc_feature (1)..(1207): Ortholog of  Ceres SEQ ID NO 15226612 as cited in SEQ ID NO 62700

SEQ ID NO: 34283 - protein, 362 aa, Arabidopsis thaliana; identical to SEQ ID NO: 30693
  peptide (1)..(362): Ceres Seq. ID no. 13486912

SEQ ID NO: 34284 - protein, 350 aa, Arabidopsis thaliana; identical to SEQ ID NO: 30694
  peptide (1)..(350): Ceres Seq. ID no. 13486913

SEQ ID NO: 34285 - protein, 309 aa, Arabidopsis thaliana; identical to SEQ ID NO: 30695
  peptide (1)..(309): Ceres Seq. ID no. 13486914

SEQ ID NO: 34286 - DNA, 2350 bp, Arabidopsis thaliana; identical to SEQ ID NO: 30696
  misc_feature (1)..(2350): Ceres Seq. ID no. 13488462
  misc_feature (1)..(2350): Ortholog of  Ceres SEQ ID NO 15169346 as cited in SEQ ID NO 53994

SEQ ID NO: 34287 - protein, 691 aa, Arabidopsis thaliana; identical to SEQ ID NO: 30697
  peptide (1)..(691): Ceres Seq. ID no. 13488463

SEQ ID NO: 34288 - protein, 690 aa, Arabidopsis thaliana; identical to SEQ ID NO: 30698
  peptide (1)..(690): Ceres Seq. ID no. 13488464

SEQ ID NO: 34289 - DNA, 1597 bp, Arabidopsis thaliana; identical to SEQ ID NO: 30699
  misc_feature (1)..(1597): Ceres Seq. ID no. 13491734
  misc_feature (1)..(1597): Ortholog of  Ceres SEQ ID NO 13663060 as cited in SEQ ID NO 60964
  misc_feature (1)..(1597): Ortholog of  Ceres SEQ ID NO 13655298 as cited in SEQ ID NO 68914

SEQ ID NO: 34290 - protein, 407 aa, Arabidopsis thaliana; identical to SEQ ID NO: 30700
  peptide (1)..(407): Ceres Seq. ID no. 13491735

SEQ ID NO: 34291 - protein, 371 aa, Arabidopsis thaliana; identical to SEQ ID NO: 30701
  peptide (1)..(371): Ceres Seq. ID no. 13491736

SEQ ID NO: 34292 - protein, 337 aa, Arabidopsis thaliana; identical to SEQ ID NO: 30702
  peptide (1)..(337): Ceres Seq. ID no. 13491737

SEQ ID NO: 34293 - DNA, 1878 bp, Arabidopsis thaliana; identical to SEQ ID NO: 30703
  misc_feature (1)..(1878): Ceres Seq. ID no. 12639121
  misc_feature (1)..(1878): Ortholog of  Ceres SEQ ID NO 13504578 as cited in SEQ ID NO 59850

SEQ ID NO: 34294 - protein, 505 aa, Arabidopsis thaliana; identical to SEQ ID NO: 30704
  peptide (1)..(505): Ceres Seq. ID no. 12639122

SEQ ID NO: 34295 - protein, 482 aa, Arabidopsis thaliana; identical to SEQ ID NO: 30705
  peptide (1)..(482): Ceres Seq. ID no. 12639123

SEQ ID NO: 34296 - protein, 318 aa, Arabidopsis thaliana; identical to SEQ ID NO: 30706
  peptide (1)..(318): Ceres Seq. ID no. 12639124

SEQ ID NO: 34297 - DNA, 1833 bp, Arabidopsis thaliana; identical to SEQ ID NO: 30707
  misc_feature (1)..(1833): Ceres Seq. ID no. 13509854
  misc_feature (1)..(1833): Ortholog of  Ceres SEQ ID NO 13663419 as cited in SEQ ID NO 66561

SEQ ID NO: 34298 - protein, 510 aa, Arabidopsis thaliana; identical to SEQ ID NO: 30708
  peptide (1)..(510): Ceres Seq. ID no. 13509855

SEQ ID NO: 34299 - protein, 455 aa, Arabidopsis thaliana; identical to SEQ ID NO: 30709
  peptide (1)..(455): Ceres Seq. ID no. 13509856

SEQ ID NO: 34300 - protein, 395 aa, Arabidopsis thaliana; identical to SEQ ID NO: 30710
  peptide (1)..(395): Ceres Seq. ID no. 13509857

SEQ ID NO: 34301 - DNA, 1221 bp, Arabidopsis thaliana; identical to SEQ ID NO: 30711
  misc_feature (1)..(1221): Ceres Seq. ID no. 13490421
  misc_feature (1)..(1221): Ortholog of  Ceres SEQ ID NO 13598427 as cited in SEQ ID NO 60899

SEQ ID NO: 34302 - protein, 209 aa, Arabidopsis thaliana; identical to SEQ ID NO: 30712
  peptide (1)..(209): Ceres Seq. ID no. 13490422

SEQ ID NO: 34303 - protein, 149 aa, Arabidopsis thaliana; identical to SEQ ID NO: 30713
  peptide (1)..(149): Ceres Seq. ID no. 13490423

SEQ ID NO: 34304 - DNA, 679 bp, Arabidopsis thaliana; identical to SEQ ID NO: 30714
  misc_feature (1)..(679): Ceres Seq. ID no. 12321380
  misc_feature (1)..(679): Ortholog of  Ceres SEQ ID NO 12557737 as cited in SEQ ID NO 81

SEQ ID NO: 34305 - protein, 146 aa, Arabidopsis thaliana; identical to SEQ ID NO: 30715
  peptide (1)..(146): Ceres Seq. ID no. 12321381

SEQ ID NO: 34306 - protein, 116 aa, Arabidopsis thaliana; identical to SEQ ID NO: 30716
  peptide (1)..(116): Ceres Seq. ID no. 12321382

SEQ ID NO: 34307 - protein, 79 aa, Arabidopsis thaliana; identical to SEQ ID NO: 30717
  peptide (1)..(79): Ceres Seq. ID no. 12321383

SEQ ID NO: 34308 - DNA, 738 bp, Arabidopsis thaliana; identical to SEQ ID NO: 30718
  misc_feature (1)..(738): Ceres Seq. ID no. 12326890
  misc_feature (1)..(738): Ortholog of  Ceres SEQ ID NO 15178860 as cited in SEQ ID NO 0

SEQ ID NO: 34309 - protein, 147 aa, Arabidopsis thaliana; identical to SEQ ID NO: 30719
  peptide (1)..(147): Ceres Seq. ID no. 12326891

SEQ ID NO: 34310 - protein, 123 aa, Arabidopsis thaliana; identical to SEQ ID NO: 30720
  peptide (1)..(123): Ceres Seq. ID no. 12326892

SEQ ID NO: 34311 - protein, 102 aa, Arabidopsis thaliana; identical to SEQ ID NO: 29920
  peptide (1)..(102): Ceres Seq. ID no. 12326893

SEQ ID NO: 34312 - DNA, 1680 bp, Arabidopsis thaliana; identical to SEQ ID NO: 30722
  misc_feature (1)..(1680): Ceres Seq. ID no. 12343531
  misc_feature (1)..(1680): Ortholog of  Ceres SEQ ID NO 13660872 as cited in SEQ ID NO 60830
  misc_feature (1)..(1680): Ortholog of  Ceres SEQ ID NO 12616221 as cited in SEQ ID NO 63291

SEQ ID NO: 34313 - protein, 364 aa, Arabidopsis thaliana; identical to SEQ ID NO: 30723
  peptide (1)..(364): Ceres Seq. ID no. 12343532

SEQ ID NO: 34314 - protein, 226 aa, Arabidopsis thaliana; identical to SEQ ID NO: 30724
  peptide (1)..(226): Ceres Seq. ID no. 12343533

SEQ ID NO: 34315 - DNA, 931 bp, Arabidopsis thaliana; identical to SEQ ID NO: 30725
  misc_feature (1)..(931): Ceres Seq. ID no. 13490184
  misc_feature (1)..(931): Ortholog of  Ceres SEQ ID NO 15174190 as cited in SEQ ID NO 64430

SEQ ID NO: 34316 - protein, 226 aa, Arabidopsis thaliana; identical to SEQ ID NO: 30726
  peptide (1)..(226): Ceres Seq. ID no. 13490185

SEQ ID NO: 34317 - protein, 132 aa, Arabidopsis thaliana; identical to SEQ ID NO: 30727
  peptide (1)..(132): Ceres Seq. ID no. 13490186

SEQ ID NO: 34318 - DNA, 1235 bp, Arabidopsis thaliana; identical to SEQ ID NO: 22288
  misc_feature (1)..(1235): Ceres Seq. ID no. 12324896
  misc_feature (1)..(1235): Ortholog of  Ceres SEQ ID NO 12636774 as cited in SEQ ID NO 372
  misc_feature (1)..(1235): Ortholog of  Ceres SEQ ID NO 13582350 as cited in SEQ ID NO 56734
  misc_feature (1)..(1235): Ortholog of  Ceres SEQ ID NO 12476493 as cited in SEQ ID NO 58163
  misc_feature (1)..(1235): Ortholog of  Ceres SEQ ID NO 13597295 as cited in SEQ ID NO 63743
  misc_feature (1)..(1235): Ortholog of  Ceres SEQ ID NO 12617090 as cited in SEQ ID NO 64005
  misc_feature (1)..(1235): Ortholog of  Ceres SEQ ID NO 13597233 as cited in SEQ ID NO 64370

SEQ ID NO: 34319 - protein, 329 aa, Arabidopsis thaliana; identical to SEQ ID NO: 22289
  peptide (1)..(329): Ceres Seq. ID no. 12324897

SEQ ID NO: 34320 - protein, 325 aa, Arabidopsis thaliana; identical to SEQ ID NO: 22290
  peptide (1)..(325): Ceres Seq. ID no. 12324898

SEQ ID NO: 34321 - protein, 254 aa, Arabidopsis thaliana; identical to SEQ ID NO: 22291
  peptide (1)..(254): Ceres Seq. ID no. 12324899

SEQ ID NO: 34322 - DNA, 1389 bp, Arabidopsis thaliana; identical to SEQ ID NO: 22445
  misc_feature (1)..(1389): Ceres Seq. ID no. 12394789
  misc_feature (1)..(1389): Ortholog of  Ceres SEQ ID NO 13502952 as cited in SEQ ID NO 62271
  misc_feature (1)..(1389): Ortholog of  Ceres SEQ ID NO 13502973 as cited in SEQ ID NO 68052
  misc_feature (1)..(1389): Ortholog of  Ceres SEQ ID NO 13596000 as cited in SEQ ID NO 68188

SEQ ID NO: 34323 - protein, 387 aa, Arabidopsis thaliana; identical to SEQ ID NO: 22446
  peptide (1)..(387): Ceres Seq. ID no. 12394790

SEQ ID NO: 34324 - protein, 373 aa, Arabidopsis thaliana; identical to SEQ ID NO: 22447
  peptide (1)..(373): Ceres Seq. ID no. 12394791

SEQ ID NO: 34325 - protein, 214 aa, Arabidopsis thaliana; identical to SEQ ID NO: 22448
  peptide (1)..(214): Ceres Seq. ID no. 12394792

SEQ ID NO: 34326 - DNA, 722 bp, Arabidopsis thaliana; identical to SEQ ID NO: 30736
  misc_feature (1)..(722): Ceres Seq. ID no. 12332196
  misc_feature (1)..(722): Ortholog of  Ceres SEQ ID NO 12624105 as cited in SEQ ID NO 61361
  misc_feature (1)..(722): Ortholog of  Ceres SEQ ID NO 14309166 as cited in SEQ ID NO 0

SEQ ID NO: 34327 - protein, 175 aa, Arabidopsis thaliana; identical to SEQ ID NO: 30737
  peptide (1)..(175): Ceres Seq. ID no. 12332197

SEQ ID NO: 34328 - DNA, 780 bp, Arabidopsis thaliana; identical to SEQ ID NO: 30738
  misc_feature (1)..(780): Ceres Seq. ID no. 12334285
  misc_feature (1)..(780): Ortholog of  Ceres SEQ ID NO 13598227 as cited in SEQ ID NO 61591
  misc_feature (1)..(780): Ortholog of  Ceres SEQ ID NO 12584790 as cited in SEQ ID NO 62648
  misc_feature (1)..(780): Ortholog of  Ceres SEQ ID NO 13545965 as cited in SEQ ID NO 67378

SEQ ID NO: 34329 - protein, 153 aa, Arabidopsis thaliana; identical to SEQ ID NO: 30739
  peptide (1)..(153): Ceres Seq. ID no. 12334286

SEQ ID NO: 34330 - protein, 120 aa, Arabidopsis thaliana; identical to SEQ ID NO: 30740
  peptide (1)..(120): Ceres Seq. ID no. 12334287

SEQ ID NO: 34331 - protein, 114 aa, Arabidopsis thaliana; identical to SEQ ID NO: 30741
  peptide (1)..(114): Ceres Seq. ID no. 12334288

SEQ ID NO: 34332 - DNA, 1235 bp, Arabidopsis thaliana; identical to SEQ ID NO: 30742
  misc_feature (1)..(1235): Ceres Seq. ID no. 13490261
  misc_feature (1)..(1235): Ortholog of  Ceres SEQ ID NO 12615217 as cited in SEQ ID NO 62470

SEQ ID NO: 34333 - protein, 275 aa, Arabidopsis thaliana; identical to SEQ ID NO: 30743
  peptide (1)..(275): Ceres Seq. ID no. 13490262

SEQ ID NO: 34334 - protein, 173 aa, Arabidopsis thaliana; identical to SEQ ID NO: 30744
  peptide (1)..(173): Ceres Seq. ID no. 13490263

SEQ ID NO: 34335 - protein, 150 aa, Arabidopsis thaliana; identical to SEQ ID NO: 30745
  peptide (1)..(150): Ceres Seq. ID no. 13490264

SEQ ID NO: 34336 - DNA, 1298 bp, Arabidopsis thaliana; identical to SEQ ID NO: 30746
  misc_feature (1)..(1298): Ceres Seq. ID no. 12370642
  misc_feature (1)..(1298): Ortholog of  Ceres SEQ ID NO 13594298 as cited in SEQ ID NO 57803
  misc_feature (1)..(1298): Ortholog of  Ceres SEQ ID NO 13503476 as cited in SEQ ID NO 61978
  misc_feature (1)..(1298): Ortholog of  Ceres SEQ ID NO 12578438 as cited in SEQ ID NO 62201
  misc_feature (1)..(1298): Ortholog of  Ceres SEQ ID NO 12617675 as cited in SEQ ID NO 64656

SEQ ID NO: 34337 - protein, 332 aa, Arabidopsis thaliana; identical to SEQ ID NO: 30747
  peptide (1)..(332): Ceres Seq. ID no. 12370643

SEQ ID NO: 34338 - protein, 322 aa, Arabidopsis thaliana; identical to SEQ ID NO: 30748
  peptide (1)..(322): Ceres Seq. ID no. 12370644

SEQ ID NO: 34339 - DNA, 1290 bp, Arabidopsis thaliana; identical to SEQ ID NO: 30749
  misc_feature (1)..(1290): Ceres Seq. ID no. 13576771
  misc_feature (1)..(1290): Ortholog of  Ceres SEQ ID NO 13597533 as cited in SEQ ID NO 64942

SEQ ID NO: 34340 - protein, 265 aa, Arabidopsis thaliana; identical to SEQ ID NO: 30750
  peptide (1)..(265): Ceres Seq. ID no. 13576772

SEQ ID NO: 34341 - protein, 259 aa, Arabidopsis thaliana; identical to SEQ ID NO: 30751
  peptide (1)..(259): Ceres Seq. ID no. 13576773

SEQ ID NO: 34342 - protein, 214 aa, Arabidopsis thaliana; identical to SEQ ID NO: 30752
  peptide (1)..(214): Ceres Seq. ID no. 13576774

SEQ ID NO: 34343 - DNA, 1293 bp, Arabidopsis thaliana; identical to SEQ ID NO: 30753
  misc_feature (1)..(1293): Ceres Seq. ID no. 13489292
  misc_feature (1)..(1293): Ortholog of  Ceres SEQ ID NO 14311001 as cited in SEQ ID NO 53717
  misc_feature (1)..(1293): Ortholog of  Ceres SEQ ID NO 13595833 as cited in SEQ ID NO 59877
  misc_feature (1)..(1293): Ortholog of  Ceres SEQ ID NO 13654452 as cited in SEQ ID NO 65792
  misc_feature (1)..(1293): Ortholog of  Ceres SEQ ID NO 13573778 as cited in SEQ ID NO 0

SEQ ID NO: 34344 - protein, 365 aa, Arabidopsis thaliana; identical to SEQ ID NO: 30754
  peptide (1)..(365): Ceres Seq. ID no. 13489293

SEQ ID NO: 34345 - protein, 341 aa, Arabidopsis thaliana; identical to SEQ ID NO: 30755
  peptide (1)..(341): Ceres Seq. ID no. 13489294

SEQ ID NO: 34346 - protein, 323 aa, Arabidopsis thaliana; identical to SEQ ID NO: 30756
  peptide (1)..(323): Ceres Seq. ID no. 13489295

SEQ ID NO: 34347 - DNA, 1430 bp, Arabidopsis thaliana; identical to SEQ ID NO: 30757
  misc_feature (1)..(1430): Ceres Seq. ID no. 12422339
  misc_feature (1)..(1430): Ortholog of  Ceres SEQ ID NO 14302287 as cited in SEQ ID NO 68134
  misc_feature (1)..(1430): Ortholog of  Ceres SEQ ID NO 14309328 as cited in SEQ ID NO 0

SEQ ID NO: 34348 - protein, 373 aa, Arabidopsis thaliana; identical to SEQ ID NO: 30758
  peptide (1)..(373): Ceres Seq. ID no. 12422340

SEQ ID NO: 34349 - protein, 368 aa, Arabidopsis thaliana; identical to SEQ ID NO: 30759
  peptide (1)..(368): Ceres Seq. ID no. 12422341

SEQ ID NO: 34350 - protein, 362 aa, Arabidopsis thaliana; identical to SEQ ID NO: 30760
  peptide (1)..(362): Ceres Seq. ID no. 12422342

SEQ ID NO: 34351 - DNA, 1280 bp, Arabidopsis thaliana; identical to SEQ ID NO: 30761
  misc_feature (1)..(1280): Ceres Seq. ID no. 12323503
  misc_feature (1)..(1280): Ortholog of  Ceres SEQ ID NO 14313097 as cited in SEQ ID NO 58902

SEQ ID NO: 34352 - protein, 365 aa, Arabidopsis thaliana; identical to SEQ ID NO: 30762
  peptide (1)..(365): Ceres Seq. ID no. 12323504

SEQ ID NO: 34353 - protein, 364 aa, Arabidopsis thaliana; identical to SEQ ID NO: 30763
  peptide (1)..(364): Ceres Seq. ID no. 12323505

SEQ ID NO: 34354 - protein, 323 aa, Arabidopsis thaliana; identical to SEQ ID NO: 30764
  peptide (1)..(323): Ceres Seq. ID no. 12323506

SEQ ID NO: 34355 - DNA, 1608 bp, Arabidopsis thaliana; identical to SEQ ID NO: 30765
  misc_feature (1)..(1608): Ceres Seq. ID no. 12340059
  misc_feature (1)..(1608): Ortholog of  Ceres SEQ ID NO 14316049 as cited in SEQ ID NO 67036
  misc_feature (1)..(1608): Ortholog of  Ceres SEQ ID NO 14313252 as cited in SEQ ID NO 67134

SEQ ID NO: 34356 - protein, 210 aa, Arabidopsis thaliana; identical to SEQ ID NO: 30766
  peptide (1)..(210): Ceres Seq. ID no. 12340060

SEQ ID NO: 34357 - protein, 209 aa, Arabidopsis thaliana; identical to SEQ ID NO: 30767
  peptide (1)..(209): Ceres Seq. ID no. 12340061

SEQ ID NO: 34358 - protein, 195 aa, Arabidopsis thaliana; identical to SEQ ID NO: 30768
  peptide (1)..(195): Ceres Seq. ID no. 12340062

SEQ ID NO: 34359 - DNA, 1437 bp, Arabidopsis thaliana; identical to SEQ ID NO: 30769
  misc_feature (1)..(1437): Ceres Seq. ID no. 12338079
  misc_feature (1)..(1437): Ortholog of  Ceres SEQ ID NO 13639243 as cited in SEQ ID NO 56820
  misc_feature (1)..(1437): Ortholog of  Ceres SEQ ID NO 13496409 as cited in SEQ ID NO 65697

SEQ ID NO: 34360 - protein, 357 aa, Arabidopsis thaliana; identical to SEQ ID NO: 30770
  peptide (1)..(357): Ceres Seq. ID no. 12338080

SEQ ID NO: 34361 - protein, 195 aa, Arabidopsis thaliana; identical to SEQ ID NO: 24160
  peptide (1)..(195): Ceres Seq. ID no. 12338081

SEQ ID NO: 34362 - DNA, 1191 bp, Arabidopsis thaliana; identical to SEQ ID NO: 30772
  misc_feature (1)..(1191): Ceres Seq. ID no. 13497360
  misc_feature (1)..(1191): Ortholog of  Ceres SEQ ID NO 13600141 as cited in SEQ ID NO 0

SEQ ID NO: 34363 - protein, 333 aa, Arabidopsis thaliana; identical to SEQ ID NO: 30773
  peptide (1)..(333): Ceres Seq. ID no. 13497361

SEQ ID NO: 34364 - protein, 300 aa, Arabidopsis thaliana; identical to SEQ ID NO: 30774
  peptide (1)..(300): Ceres Seq. ID no. 13497362

SEQ ID NO: 34365 - protein, 248 aa, Arabidopsis thaliana; identical to SEQ ID NO: 30775
  peptide (1)..(248): Ceres Seq. ID no. 13497363

SEQ ID NO: 34366 - DNA, 1536 bp, Arabidopsis thaliana; identical to SEQ ID NO: 30776
  misc_feature (1)..(1536): Ceres Seq. ID no. 12335031
  misc_feature (1)..(1536): Ortholog of  Ceres SEQ ID NO 15172495 as cited in SEQ ID NO 60316

SEQ ID NO: 34367 - protein, 445 aa, Arabidopsis thaliana; identical to SEQ ID NO: 30777
  peptide (1)..(445): Ceres Seq. ID no. 12335032

SEQ ID NO: 34368 - protein, 405 aa, Arabidopsis thaliana; identical to SEQ ID NO: 30778
  peptide (1)..(405): Ceres Seq. ID no. 12335033

SEQ ID NO: 34369 - protein, 400 aa, Arabidopsis thaliana; identical to SEQ ID NO: 30779
  peptide (1)..(400): Ceres Seq. ID no. 12335034

SEQ ID NO: 34370 - DNA, 1169 bp, Arabidopsis thaliana; identical to SEQ ID NO: 30780
  misc_feature (1)..(1169): Ceres Seq. ID no. 13486807
  misc_feature (1)..(1169): Ortholog of  Ceres SEQ ID NO 13599496 as cited in SEQ ID NO 0

SEQ ID NO: 34371 - protein, 338 aa, Arabidopsis thaliana; identical to SEQ ID NO: 30781
  peptide (1)..(338): Ceres Seq. ID no. 13486808

SEQ ID NO: 34372 - protein, 334 aa, Arabidopsis thaliana; identical to SEQ ID NO: 30782
  peptide (1)..(334): Ceres Seq. ID no. 13486809

SEQ ID NO: 34373 - protein, 242 aa, Arabidopsis thaliana; identical to SEQ ID NO: 30783
  peptide (1)..(242): Ceres Seq. ID no. 13486810

SEQ ID NO: 34374 - DNA, 1466 bp, Arabidopsis thaliana; identical to SEQ ID NO: 30784
  misc_feature (1)..(1466): Ceres Seq. ID no. 13486703
  misc_feature (1)..(1466): Ortholog of  Ceres SEQ ID NO 14304838 as cited in SEQ ID NO 59750

SEQ ID NO: 34375 - protein, 363 aa, Arabidopsis thaliana; identical to SEQ ID NO: 30785
  peptide (1)..(363): Ceres Seq. ID no. 13486704

SEQ ID NO: 34376 - protein, 327 aa, Arabidopsis thaliana; identical to SEQ ID NO: 30786
  peptide (1)..(327): Ceres Seq. ID no. 13486705

SEQ ID NO: 34377 - protein, 324 aa, Arabidopsis thaliana; identical to SEQ ID NO: 30787
  peptide (1)..(324): Ceres Seq. ID no. 13486706

SEQ ID NO: 34378 - DNA, 1148 bp, Arabidopsis thaliana; identical to SEQ ID NO: 30788
  misc_feature (1)..(1148): Ceres Seq. ID no. 13491548
  misc_feature (1)..(1148): Ortholog of  Ceres SEQ ID NO 14311671 as cited in SEQ ID NO 51251
  misc_feature (1)..(1148): Ortholog of  Ceres SEQ ID NO 14304791 as cited in SEQ ID NO 53562
  misc_feature (1)..(1148): Ortholog of  Ceres SEQ ID NO 14307355 as cited in SEQ ID NO 54610
  misc_feature (1)..(1148): Ortholog of  Ceres SEQ ID NO 13594298 as cited in SEQ ID NO 57803
  misc_feature (1)..(1148): Ortholog of  Ceres SEQ ID NO 13503476 as cited in SEQ ID NO 61978
  misc_feature (1)..(1148): Ortholog of  Ceres SEQ ID NO 12578438 as cited in SEQ ID NO 62201
  misc_feature (1)..(1148): Ortholog of  Ceres SEQ ID NO 12617675 as cited in SEQ ID NO 64656

SEQ ID NO: 34379 - protein, 299 aa, Arabidopsis thaliana; identical to SEQ ID NO: 30789
  peptide (1)..(299): Ceres Seq. ID no. 13491549

SEQ ID NO: 34380 - protein, 269 aa, Arabidopsis thaliana; identical to SEQ ID NO: 21034
  peptide (1)..(269): Ceres Seq. ID no. 13491550

SEQ ID NO: 34381 - protein, 199 aa, Arabidopsis thaliana; identical to SEQ ID NO: 21035
  peptide (1)..(199): Ceres Seq. ID no. 13491551

SEQ ID NO: 34382 - DNA, 1458 bp, Arabidopsis thaliana; identical to SEQ ID NO: 30792
  misc_feature (1)..(1458): Ceres Seq. ID no. 13487675
  misc_feature (1)..(1458): Ortholog of  Ceres SEQ ID NO 15168545 as cited in SEQ ID NO 57829
  misc_feature (1)..(1458): Ortholog of  Ceres SEQ ID NO 15168468 as cited in SEQ ID NO 58115
  misc_feature (1)..(1458): Ortholog of  Ceres SEQ ID NO 13596440 as cited in SEQ ID NO 68769

SEQ ID NO: 34383 - protein, 327 aa, Arabidopsis thaliana; identical to SEQ ID NO: 30793
  peptide (1)..(327): Ceres Seq. ID no. 13487676

SEQ ID NO: 34384 - protein, 302 aa, Arabidopsis thaliana; identical to SEQ ID NO: 30794
  peptide (1)..(302): Ceres Seq. ID no. 13487677

SEQ ID NO: 34385 - protein, 250 aa, Arabidopsis thaliana; identical to SEQ ID NO: 30795
  peptide (1)..(250): Ceres Seq. ID no. 13487678

SEQ ID NO: 34386 - DNA, 2496 bp, Arabidopsis thaliana; identical to SEQ ID NO: 30796
  misc_feature (1)..(2496): Ceres Seq. ID no. 12561218
  misc_feature (1)..(2496): Ortholog of  Ceres SEQ ID NO 15178931 as cited in SEQ ID NO 1125
  misc_feature (1)..(2496): Ortholog of  Ceres SEQ ID NO 13596648 as cited in SEQ ID NO 63080
  misc_feature (1)..(2496): Ortholog of  Ceres SEQ ID NO 13584744 as cited in SEQ ID NO 69137
  misc_feature (1)..(2496): Ortholog of  Ceres SEQ ID NO 15179672 as cited in SEQ ID NO 0

SEQ ID NO: 34387 - protein, 615 aa, Arabidopsis thaliana; identical to SEQ ID NO: 30797
  peptide (1)..(615): Ceres Seq. ID no. 12561219

SEQ ID NO: 34388 - protein, 610 aa, Arabidopsis thaliana; identical to SEQ ID NO: 30798
  peptide (1)..(610): Ceres Seq. ID no. 12561220

SEQ ID NO: 34389 - protein, 530 aa, Arabidopsis thaliana; identical to SEQ ID NO: 30799
  peptide (1)..(530): Ceres Seq. ID no. 12561221

SEQ ID NO: 34390 - DNA, 606 bp, Arabidopsis thaliana; identical to SEQ ID NO: 30800
  misc_feature (1)..(606): Ceres Seq. ID no. 12333083
  misc_feature (1)..(606): Ortholog of  Ceres SEQ ID NO 12556948 as cited in SEQ ID NO 54

SEQ ID NO: 34391 - protein, 113 aa, Arabidopsis thaliana; identical to SEQ ID NO: 30801
  peptide (1)..(113): Ceres Seq. ID no. 12333084

SEQ ID NO: 34392 - protein, 80 aa, Arabidopsis thaliana; identical to SEQ ID NO: 30802
  peptide (1)..(80): Ceres Seq. ID no. 12333085

SEQ ID NO: 34393 - protein, 66 aa, Arabidopsis thaliana; identical to SEQ ID NO: 30803
  peptide (1)..(66): Ceres Seq. ID no. 12333086

SEQ ID NO: 34394 - DNA, 703 bp, Arabidopsis thaliana; identical to SEQ ID NO: 30804
  misc_feature (1)..(703): Ceres Seq. ID no. 13489872
  misc_feature (1)..(703): Ortholog of  Ceres SEQ ID NO 13600689 as cited in SEQ ID NO 0
  misc_feature (1)..(703): Ortholog of  Ceres SEQ ID NO 15178120 as cited in SEQ ID NO 0

SEQ ID NO: 34395 - protein, 119 aa, Arabidopsis thaliana; identical to SEQ ID NO: 30805
  peptide (1)..(119): Ceres Seq. ID no. 13489873

SEQ ID NO: 34396 - DNA, 705 bp, Arabidopsis thaliana; identical to SEQ ID NO: 30806
  misc_feature (1)..(705): Ceres Seq. ID no. 12332216
  misc_feature (1)..(705): Ortholog of  Ceres SEQ ID NO 15176693 as cited in SEQ ID NO 1078
  misc_feature (1)..(705): Ortholog of  Ceres SEQ ID NO 12615074 as cited in SEQ ID NO 62676
  misc_feature (1)..(705): Ortholog of  Ceres SEQ ID NO 13598819 as cited in SEQ ID NO 0
  misc_feature (1)..(705): Ortholog of  Ceres SEQ ID NO 13600371 as cited in SEQ ID NO 0

SEQ ID NO: 34397 - protein, 150 aa, Arabidopsis thaliana; identical to SEQ ID NO: 30807
  peptide (1)..(150): Ceres Seq. ID no. 12332217

SEQ ID NO: 34398 - protein, 131 aa, Arabidopsis thaliana; identical to SEQ ID NO: 30808
  peptide (1)..(131): Ceres Seq. ID no. 12332218

SEQ ID NO: 34399 - protein, 120 aa, Arabidopsis thaliana; identical to SEQ ID NO: 30809
  peptide (1)..(120): Ceres Seq. ID no. 12332219

SEQ ID NO: 34400 - DNA, 1020 bp, Arabidopsis thaliana; identical to SEQ ID NO: 30810
  misc_feature (1)..(1020): Ceres Seq. ID no. 12489584
  misc_feature (1)..(1020): Ortholog of  Ceres SEQ ID NO 14304689 as cited in SEQ ID NO 53265
  misc_feature (1)..(1020): Ortholog of  Ceres SEQ ID NO 14307820 as cited in SEQ ID NO 53938
  misc_feature (1)..(1020): Ortholog of  Ceres SEQ ID NO 15177137 as cited in SEQ ID NO 55030
  misc_feature (1)..(1020): Ortholog of  Ceres SEQ ID NO 14302407 as cited in SEQ ID NO 66891
  misc_feature (1)..(1020): Ortholog of  Ceres SEQ ID NO 13599557 as cited in SEQ ID NO 0

SEQ ID NO: 34401 - protein, 271 aa, Arabidopsis thaliana; identical to SEQ ID NO: 30811
  peptide (1)..(271): Ceres Seq. ID no. 12489585

SEQ ID NO: 34402 - protein, 185 aa, Arabidopsis thaliana; identical to SEQ ID NO: 30812
  peptide (1)..(185): Ceres Seq. ID no. 12489586

SEQ ID NO: 34403 - protein, 174 aa, Arabidopsis thaliana; identical to SEQ ID NO: 30813
  peptide (1)..(174): Ceres Seq. ID no. 12489587

SEQ ID NO: 34404 - DNA, 1081 bp, Arabidopsis thaliana; identical to SEQ ID NO: 30814
  misc_feature (1)..(1081): Ceres Seq. ID no. 13489874
  misc_feature (1)..(1081): Ortholog of  Ceres SEQ ID NO 13596163 as cited in SEQ ID NO 60864
  misc_feature (1)..(1081): Ortholog of  Ceres SEQ ID NO 15226347 as cited in SEQ ID NO 61639

SEQ ID NO: 34405 - protein, 222 aa, Arabidopsis thaliana; identical to SEQ ID NO: 30815
  peptide (1)..(222): Ceres Seq. ID no. 13489875

SEQ ID NO: 34406 - protein, 167 aa, Arabidopsis thaliana; identical to SEQ ID NO: 30816
  peptide (1)..(167): Ceres Seq. ID no. 13489876

SEQ ID NO: 34407 - protein, 117 aa, Arabidopsis thaliana; identical to SEQ ID NO: 30817
  peptide (1)..(117): Ceres Seq. ID no. 13489877

SEQ ID NO: 34408 - DNA, 782 bp, Arabidopsis thaliana; identical to SEQ ID NO: 30818
  misc_feature (1)..(782): Ceres Seq. ID no. 12323507
  misc_feature (1)..(782): Ortholog of  Ceres SEQ ID NO 12627215 as cited in SEQ ID NO 60976
  misc_feature (1)..(782): Ortholog of  Ceres SEQ ID NO 13654980 as cited in SEQ ID NO 63094
  misc_feature (1)..(782): Ortholog of  Ceres SEQ ID NO 15174852 as cited in SEQ ID NO 67166
  misc_feature (1)..(782): Ortholog of  Ceres SEQ ID NO 12589584 as cited in SEQ ID NO 0
  misc_feature (1)..(782): Ortholog of  Ceres SEQ ID NO 12635657 as cited in SEQ ID NO 0
  misc_feature (1)..(782): Ortholog of  Ceres SEQ ID NO 12635879 as cited in SEQ ID NO 0
  misc_feature (1)..(782): Ortholog of  Ceres SEQ ID NO 13599649 as cited in SEQ ID NO 0
  misc_feature (1)..(782): Ortholog of  Ceres SEQ ID NO 14309404 as cited in SEQ ID NO 0

SEQ ID NO: 34409 - protein, 218 aa, Arabidopsis thaliana; identical to SEQ ID NO: 30819
  peptide (1)..(218): Ceres Seq. ID no. 12323508

SEQ ID NO: 34410 - protein, 201 aa, Arabidopsis thaliana; identical to SEQ ID NO: 30820
  peptide (1)..(201): Ceres Seq. ID no. 12323509

SEQ ID NO: 34411 - DNA, 954 bp, Arabidopsis thaliana; identical to SEQ ID NO: 30821
  misc_feature (1)..(954): Ceres Seq. ID no. 12357683
  misc_feature (1)..(954): Ortholog of  Ceres SEQ ID NO 15170792 as cited in SEQ ID NO 52707

SEQ ID NO: 34412 - protein, 279 aa, Arabidopsis thaliana; identical to SEQ ID NO: 30822
  peptide (1)..(279): Ceres Seq. ID no. 12357684

SEQ ID NO: 34413 - protein, 220 aa, Arabidopsis thaliana; identical to SEQ ID NO: 30823
  peptide (1)..(220): Ceres Seq. ID no. 12357685

SEQ ID NO: 34414 - protein, 217 aa, Arabidopsis thaliana; identical to SEQ ID NO: 30824
  peptide (1)..(217): Ceres Seq. ID no. 12357686

SEQ ID NO: 34415 - DNA, 1157 bp, Arabidopsis thaliana; identical to SEQ ID NO: 30825
  misc_feature (1)..(1157): Ceres Seq. ID no. 12423136
  misc_feature (1)..(1157): Ortholog of  Ceres SEQ ID NO 13656155 as cited in SEQ ID NO 64609

SEQ ID NO: 34416 - protein, 117 aa, Arabidopsis thaliana; identical to SEQ ID NO: 30826
  peptide (1)..(117): Ceres Seq. ID no. 12423137

SEQ ID NO: 34417 - protein, 110 aa, Arabidopsis thaliana; identical to SEQ ID NO: 30827
  peptide (1)..(110): Ceres Seq. ID no. 12423138

SEQ ID NO: 34418 - protein, 85 aa, Arabidopsis thaliana; identical to SEQ ID NO: 30828
  peptide (1)..(85): Ceres Seq. ID no. 12423139

SEQ ID NO: 34419 - DNA, 636 bp, Arabidopsis thaliana; identical to SEQ ID NO: 30829
  misc_feature (1)..(636): Ceres Seq. ID no. 12325146
  misc_feature (1)..(636): Ortholog of  Ceres SEQ ID NO 14301855 as cited in SEQ ID NO 61528

SEQ ID NO: 34420 - protein, 160 aa, Arabidopsis thaliana; identical to SEQ ID NO: 30830
  peptide (1)..(160): Ceres Seq. ID no. 12325147

SEQ ID NO: 34421 - protein, 153 aa, Arabidopsis thaliana; identical to SEQ ID NO: 30831
  peptide (1)..(153): Ceres Seq. ID no. 12325148

SEQ ID NO: 34422 - protein, 123 aa, Arabidopsis thaliana; identical to SEQ ID NO: 30832
  peptide (1)..(123): Ceres Seq. ID no. 12325149

SEQ ID NO: 34423 - DNA, 818 bp, Arabidopsis thaliana; identical to SEQ ID NO: 30833
  misc_feature (1)..(818): Ceres Seq. ID no. 12466495
  misc_feature (1)..(818): Ortholog of  Ceres SEQ ID NO 13599568 as cited in SEQ ID NO 509
  misc_feature (1)..(818): Ortholog of  Ceres SEQ ID NO 13638595 as cited in SEQ ID NO 52050
  misc_feature (1)..(818): Ortholog of  Ceres SEQ ID NO 13594748 as cited in SEQ ID NO 52114
  misc_feature (1)..(818): Ortholog of  Ceres SEQ ID NO 12623490 as cited in SEQ ID NO 61136
  misc_feature (1)..(818): Ortholog of  Ceres SEQ ID NO 12583993 as cited in SEQ ID NO 68098

SEQ ID NO: 34424 - protein, 233 aa, Arabidopsis thaliana; identical to SEQ ID NO: 30834
  peptide (1)..(233): Ceres Seq. ID no. 12466496

SEQ ID NO: 34425 - protein, 227 aa, Arabidopsis thaliana; identical to SEQ ID NO: 30835
  peptide (1)..(227): Ceres Seq. ID no. 12466497

SEQ ID NO: 34426 - DNA, 1041 bp, Arabidopsis thaliana; identical to SEQ ID NO: 30836
  misc_feature (1)..(1041): Ceres Seq. ID no. 13490044
  misc_feature (1)..(1041): Ortholog of  Ceres SEQ ID NO 15175425 as cited in SEQ ID NO 0

SEQ ID NO: 34427 - protein, 198 aa, Arabidopsis thaliana; identical to SEQ ID NO: 30837
  peptide (1)..(198): Ceres Seq. ID no. 13490045

SEQ ID NO: 34428 - DNA, 784 bp, Arabidopsis thaliana; identical to SEQ ID NO: 30838
  misc_feature (1)..(784): Ceres Seq. ID no. 12332255
  misc_feature (1)..(784): Ortholog of  Ceres SEQ ID NO 15168553 as cited in SEQ ID NO 57750

SEQ ID NO: 34429 - protein, 194 aa, Arabidopsis thaliana; identical to SEQ ID NO: 30839
  peptide (1)..(194): Ceres Seq. ID no. 12332256

SEQ ID NO: 34430 - protein, 170 aa, Arabidopsis thaliana; identical to SEQ ID NO: 30840
  peptide (1)..(170): Ceres Seq. ID no. 12332257

SEQ ID NO: 34431 - protein, 168 aa, Arabidopsis thaliana; identical to SEQ ID NO: 30841
  peptide (1)..(168): Ceres Seq. ID no. 12332258

SEQ ID NO: 34432 - DNA, 965 bp, Arabidopsis thaliana; identical to SEQ ID NO: 30842
  misc_feature (1)..(965): Ceres Seq. ID no. 13491928
  misc_feature (1)..(965): Ortholog of  Ceres SEQ ID NO 13597338 as cited in SEQ ID NO 64272

SEQ ID NO: 34433 - protein, 202 aa, Arabidopsis thaliana; identical to SEQ ID NO: 24242
  peptide (1)..(202): Ceres Seq. ID no. 13491929

SEQ ID NO: 34434 - protein, 190 aa, Arabidopsis thaliana; identical to SEQ ID NO: 24243
  peptide (1)..(190): Ceres Seq. ID no. 13491930

SEQ ID NO: 34435 - protein, 180 aa, Arabidopsis thaliana; identical to SEQ ID NO: 24244
  peptide (1)..(180): Ceres Seq. ID no. 13491931

SEQ ID NO: 34436 - DNA, 673 bp, Arabidopsis thaliana; identical to SEQ ID NO: 30846
  misc_feature (1)..(673): Ceres Seq. ID no. 12322661
  misc_feature (1)..(673): Ortholog of  Ceres SEQ ID NO 14307370 as cited in SEQ ID NO 54127
  misc_feature (1)..(673): Ortholog of  Ceres SEQ ID NO 13596338 as cited in SEQ ID NO 68005

SEQ ID NO: 34437 - protein, 141 aa, Arabidopsis thaliana; identical to SEQ ID NO: 30847
  peptide (1)..(141): Ceres Seq. ID no. 12322662

SEQ ID NO: 34438 - protein, 131 aa, Arabidopsis thaliana; identical to SEQ ID NO: 30848
  peptide (1)..(131): Ceres Seq. ID no. 12322663

SEQ ID NO: 34439 - protein, 105 aa, Arabidopsis thaliana; identical to SEQ ID NO: 30849
  peptide (1)..(105): Ceres Seq. ID no. 12322664

SEQ ID NO: 34440 - DNA, 1333 bp, Arabidopsis thaliana; identical to SEQ ID NO: 30850
  misc_feature (1)..(1333): Ceres Seq. ID no. 13504694
  misc_feature (1)..(1333): Ortholog of  Ceres SEQ ID NO 13596474 as cited in SEQ ID NO 62169
  misc_feature (1)..(1333): Ortholog of  Ceres SEQ ID NO 13598714 as cited in SEQ ID NO 62656
  misc_feature (1)..(1333): Ortholog of  Ceres SEQ ID NO 13597519 as cited in SEQ ID NO 64759
  misc_feature (1)..(1333): Ortholog of  Ceres SEQ ID NO 13597870 as cited in SEQ ID NO 64982
  misc_feature (1)..(1333): Ortholog of  Ceres SEQ ID NO 13587054 as cited in SEQ ID NO 0

SEQ ID NO: 34441 - protein, 363 aa, Arabidopsis thaliana; identical to SEQ ID NO: 30851
  peptide (1)..(363): Ceres Seq. ID no. 13504695

SEQ ID NO: 34442 - protein, 350 aa, Arabidopsis thaliana; identical to SEQ ID NO: 30852
  peptide (1)..(350): Ceres Seq. ID no. 13504696

SEQ ID NO: 34443 - protein, 346 aa, Arabidopsis thaliana; identical to SEQ ID NO: 30853
  peptide (1)..(346): Ceres Seq. ID no. 13504697

SEQ ID NO: 34444 - DNA, 2484 bp, Arabidopsis thaliana; identical to SEQ ID NO: 30854
  misc_feature (1)..(2484): Ceres Seq. ID no. 12327297
  misc_feature (1)..(2484): Ortholog of  Ceres SEQ ID NO 14313151 as cited in SEQ ID NO 54664

SEQ ID NO: 34445 - protein, 748 aa, Arabidopsis thaliana; identical to SEQ ID NO: 30855
  peptide (1)..(748): Ceres Seq. ID no. 12327298

SEQ ID NO: 34446 - protein, 675 aa, Arabidopsis thaliana; identical to SEQ ID NO: 30856
  peptide (1)..(675): Ceres Seq. ID no. 12327299

SEQ ID NO: 34447 - protein, 657 aa, Arabidopsis thaliana; identical to SEQ ID NO: 30857
  peptide (1)..(657): Ceres Seq. ID no. 12327300

SEQ ID NO: 34448 - DNA, 841 bp, Arabidopsis thaliana; identical to SEQ ID NO: 30858
  misc_feature (1)..(841): Ceres Seq. ID no. 13591613
  misc_feature (1)..(841): Ortholog of  Ceres SEQ ID NO 14305994 as cited in SEQ ID NO 52280
  misc_feature (1)..(841): Ortholog of  Ceres SEQ ID NO 14306255 as cited in SEQ ID NO 56917

SEQ ID NO: 34449 - protein, 191 aa, Arabidopsis thaliana; identical to SEQ ID NO: 30859
  peptide (1)..(191): Ceres Seq. ID no. 13591614

SEQ ID NO: 34450 - DNA, 665 bp, Arabidopsis thaliana; identical to SEQ ID NO: 30860
  misc_feature (1)..(665): Ceres Seq. ID no. 12323110
  misc_feature (1)..(665): Ortholog of  Ceres SEQ ID NO 15174142 as cited in SEQ ID NO 64367

SEQ ID NO: 34451 - protein, 153 aa, Arabidopsis thaliana; identical to SEQ ID NO: 30861
  peptide (1)..(153): Ceres Seq. ID no. 12323111

SEQ ID NO: 34452 - protein, 88 aa, Arabidopsis thaliana; identical to SEQ ID NO: 30862
  peptide (1)..(88): Ceres Seq. ID no. 12323112

SEQ ID NO: 34453 - DNA, 1593 bp, Arabidopsis thaliana; identical to SEQ ID NO: 30863
  misc_feature (1)..(1593): Ceres Seq. ID no. 12322908
  misc_feature (1)..(1593): Ortholog of  Ceres SEQ ID NO 14312176 as cited in SEQ ID NO 59203

SEQ ID NO: 34454 - protein, 307 aa, Arabidopsis thaliana; identical to SEQ ID NO: 30864
  peptide (1)..(307): Ceres Seq. ID no. 12322909

SEQ ID NO: 34455 - protein, 300 aa, Arabidopsis thaliana; identical to SEQ ID NO: 30865
  peptide (1)..(300): Ceres Seq. ID no. 12322910

SEQ ID NO: 34456 - protein, 282 aa, Arabidopsis thaliana; identical to SEQ ID NO: 30866
  peptide (1)..(282): Ceres Seq. ID no. 12322911

SEQ ID NO: 34457 - DNA, 838 bp, Arabidopsis thaliana; identical to SEQ ID NO: 30867
  misc_feature (1)..(838): Ceres Seq. ID no. 12335427
  misc_feature (1)..(838): Ortholog of  Ceres SEQ ID NO 15168314 as cited in SEQ ID NO 60142

SEQ ID NO: 34458 - protein, 204 aa, Arabidopsis thaliana; identical to SEQ ID NO: 30868
  peptide (1)..(204): Ceres Seq. ID no. 12335428

SEQ ID NO: 34459 - protein, 169 aa, Arabidopsis thaliana; identical to SEQ ID NO: 24678
  peptide (1)..(169): Ceres Seq. ID no. 12335429

SEQ ID NO: 34460 - protein, 145 aa, Arabidopsis thaliana; identical to SEQ ID NO: 24679
  peptide (1)..(145): Ceres Seq. ID no. 12335430

SEQ ID NO: 34461 - DNA, 776 bp, Arabidopsis thaliana; identical to SEQ ID NO: 30871
  misc_feature (1)..(776): Ceres Seq. ID no. 12332230
  misc_feature (1)..(776): Ortholog of  Ceres SEQ ID NO 15173516 as cited in SEQ ID NO 61801

SEQ ID NO: 34462 - protein, 165 aa, Arabidopsis thaliana; identical to SEQ ID NO: 30872
  peptide (1)..(165): Ceres Seq. ID no. 12332231

SEQ ID NO: 34463 - protein, 144 aa, Arabidopsis thaliana; identical to SEQ ID NO: 30873
  peptide (1)..(144): Ceres Seq. ID no. 12332232

SEQ ID NO: 34464 - DNA, 834 bp, Arabidopsis thaliana; identical to SEQ ID NO: 30874
  misc_feature (1)..(834): Ceres Seq. ID no. 13489264
  misc_feature (1)..(834): Ortholog of  Ceres SEQ ID NO 13660598 as cited in SEQ ID NO 67591

SEQ ID NO: 34465 - protein, 184 aa, Arabidopsis thaliana; identical to SEQ ID NO: 30875
  peptide (1)..(184): Ceres Seq. ID no. 13489265

SEQ ID NO: 34466 - protein, 170 aa, Arabidopsis thaliana; identical to SEQ ID NO: 30876
  peptide (1)..(170): Ceres Seq. ID no. 13489266

SEQ ID NO: 34467 - protein, 153 aa, Arabidopsis thaliana; identical to SEQ ID NO: 30877
  peptide (1)..(153): Ceres Seq. ID no. 13489267

SEQ ID NO: 34468 - DNA, 806 bp, Arabidopsis thaliana; identical to SEQ ID NO: 30878
  misc_feature (1)..(806): Ceres Seq. ID no. 12332172
  misc_feature (1)..(806): Ortholog of  Ceres SEQ ID NO 14303374 as cited in SEQ ID NO 54088
  misc_feature (1)..(806): Ortholog of  Ceres SEQ ID NO 13639250 as cited in SEQ ID NO 56555
  misc_feature (1)..(806): Ortholog of  Ceres SEQ ID NO 15177034 as cited in SEQ ID NO 60024
  misc_feature (1)..(806): Ortholog of  Ceres SEQ ID NO 13598257 as cited in SEQ ID NO 63008
  misc_feature (1)..(806): Ortholog of  Ceres SEQ ID NO 13597309 as cited in SEQ ID NO 63851
  misc_feature (1)..(806): Ortholog of  Ceres SEQ ID NO 12599167 as cited in SEQ ID NO 64443

SEQ ID NO: 34469 - protein, 210 aa, Arabidopsis thaliana; identical to SEQ ID NO: 30879
  peptide (1)..(210): Ceres Seq. ID no. 12332173

SEQ ID NO: 34470 - DNA, 1407 bp, Arabidopsis thaliana; identical to SEQ ID NO: 30880
  misc_feature (1)..(1407): Ceres Seq. ID no. 13486967
  misc_feature (1)..(1407): Ortholog of  Ceres SEQ ID NO 13598282 as cited in SEQ ID NO 68138

SEQ ID NO: 34471 - protein, 360 aa, Arabidopsis thaliana; identical to SEQ ID NO: 30881
  peptide (1)..(360): Ceres Seq. ID no. 13486968

SEQ ID NO: 34472 - protein, 358 aa, Arabidopsis thaliana; identical to SEQ ID NO: 30882
  peptide (1)..(358): Ceres Seq. ID no. 13486969

SEQ ID NO: 34473 - protein, 352 aa, Arabidopsis thaliana; identical to SEQ ID NO: 30883
  peptide (1)..(352): Ceres Seq. ID no. 13486970

SEQ ID NO: 34474 - DNA, 694 bp, Arabidopsis thaliana; identical to SEQ ID NO: 30884
  misc_feature (1)..(694): Ceres Seq. ID no. 12422743
  misc_feature (1)..(694): Ortholog of  Ceres SEQ ID NO 15175146 as cited in SEQ ID NO 0

SEQ ID NO: 34475 - protein, 129 aa, Arabidopsis thaliana; identical to SEQ ID NO: 30885
  peptide (1)..(129): Ceres Seq. ID no. 12422744

SEQ ID NO: 34476 - DNA, 1200 bp, Arabidopsis thaliana; identical to SEQ ID NO: 30886
  misc_feature (1)..(1200): Ceres Seq. ID no. 12371656
  misc_feature (1)..(1200): Ortholog of  Ceres SEQ ID NO 14303600 as cited in SEQ ID NO 64632
  misc_feature (1)..(1200): Ortholog of  Ceres SEQ ID NO 14302776 as cited in SEQ ID NO 66919

SEQ ID NO: 34477 - protein, 298 aa, Arabidopsis thaliana; identical to SEQ ID NO: 30887
  peptide (1)..(298): Ceres Seq. ID no. 12371657

SEQ ID NO: 34478 - protein, 273 aa, Arabidopsis thaliana; identical to SEQ ID NO: 30888
  peptide (1)..(273): Ceres Seq. ID no. 12371658

SEQ ID NO: 34479 - protein, 262 aa, Arabidopsis thaliana; identical to SEQ ID NO: 30889
  peptide (1)..(262): Ceres Seq. ID no. 12371659

SEQ ID NO: 34480 - DNA, 1501 bp, Arabidopsis thaliana; identical to SEQ ID NO: 30890
  misc_feature (1)..(1501): Ceres Seq. ID no. 12321354
  misc_feature (1)..(1501): Ortholog of  Ceres SEQ ID NO 14314792 as cited in SEQ ID NO 56837

SEQ ID NO: 34481 - protein, 375 aa, Arabidopsis thaliana; identical to SEQ ID NO: 30891
  peptide (1)..(375): Ceres Seq. ID no. 12321355

SEQ ID NO: 34482 - protein, 328 aa, Arabidopsis thaliana; identical to SEQ ID NO: 30892
  peptide (1)..(328): Ceres Seq. ID no. 12321356

SEQ ID NO: 34483 - protein, 327 aa, Arabidopsis thaliana; identical to SEQ ID NO: 30893
  peptide (1)..(327): Ceres Seq. ID no. 12321357

SEQ ID NO: 34484 - DNA, 540 bp, Arabidopsis thaliana; identical to SEQ ID NO: 26058
  misc_feature (1)..(540): Ceres Seq. ID no. 12599931
  misc_feature (1)..(540): Ortholog of  Ceres SEQ ID NO 12608605 as cited in SEQ ID NO 58240

SEQ ID NO: 34485 - protein, 93 aa, Arabidopsis thaliana; identical to SEQ ID NO: 26059
  peptide (1)..(93): Ceres Seq. ID no. 12599932

SEQ ID NO: 34486 - DNA, 844 bp, Arabidopsis thaliana; identical to SEQ ID NO: 30896
  misc_feature (1)..(844): Ceres Seq. ID no. 12337495
  misc_feature (1)..(844): Ortholog of  Ceres SEQ ID NO 13594613 as cited in SEQ ID NO 52127

SEQ ID NO: 34487 - protein, 222 aa, Arabidopsis thaliana; identical to SEQ ID NO: 30897
  peptide (1)..(222): Ceres Seq. ID no. 12337496

SEQ ID NO: 34488 - protein, 206 aa, Arabidopsis thaliana; identical to SEQ ID NO: 30898
  peptide (1)..(206): Ceres Seq. ID no. 12337497

SEQ ID NO: 34489 - DNA, 869 bp, Arabidopsis thaliana; identical to SEQ ID NO: 30899
  misc_feature (1)..(869): Ceres Seq. ID no. 12332915
  misc_feature (1)..(869): Ortholog of  Ceres SEQ ID NO 12609656 as cited in SEQ ID NO 51891
  misc_feature (1)..(869): Ortholog of  Ceres SEQ ID NO 13664337 as cited in SEQ ID NO 61267
  misc_feature (1)..(869): Ortholog of  Ceres SEQ ID NO 15224278 as cited in SEQ ID NO 63590
  misc_feature (1)..(869): Ortholog of  Ceres SEQ ID NO 12635152 as cited in SEQ ID NO 0

SEQ ID NO: 34490 - protein, 207 aa, Arabidopsis thaliana; identical to SEQ ID NO: 30900
  peptide (1)..(207): Ceres Seq. ID no. 12332916

SEQ ID NO: 34491 - protein, 167 aa, Arabidopsis thaliana; identical to SEQ ID NO: 30901
  peptide (1)..(167): Ceres Seq. ID no. 12332917

SEQ ID NO: 34492 - DNA, 856 bp, Arabidopsis thaliana; identical to SEQ ID NO: 30902
  misc_feature (1)..(856): Ceres Seq. ID no. 12421566
  misc_feature (1)..(856): Ortholog of  Ceres SEQ ID NO 13580026 as cited in SEQ ID NO 62641

SEQ ID NO: 34493 - protein, 187 aa, Arabidopsis thaliana; identical to SEQ ID NO: 30903
  peptide (1)..(187): Ceres Seq. ID no. 12421567

SEQ ID NO: 34494 - protein, 167 aa, Arabidopsis thaliana; identical to SEQ ID NO: 30904
  peptide (1)..(167): Ceres Seq. ID no. 12421568

SEQ ID NO: 34495 - protein, 166 aa, Arabidopsis thaliana; identical to SEQ ID NO: 30905
  peptide (1)..(166): Ceres Seq. ID no. 12421569

SEQ ID NO: 34496 - DNA, 1210 bp, Arabidopsis thaliana; identical to SEQ ID NO: 30906
  misc_feature (1)..(1210): Ceres Seq. ID no. 12482053
  misc_feature (1)..(1210): Ortholog of  Ceres SEQ ID NO 12636774 as cited in SEQ ID NO 372
  misc_feature (1)..(1210): Ortholog of  Ceres SEQ ID NO 12562215 as cited in SEQ ID NO 20489
  misc_feature (1)..(1210): Ortholog of  Ceres SEQ ID NO 13595548 as cited in SEQ ID NO 51024
  misc_feature (1)..(1210): Ortholog of  Ceres SEQ ID NO 13582350 as cited in SEQ ID NO 56734
  misc_feature (1)..(1210): Ortholog of  Ceres SEQ ID NO 12476493 as cited in SEQ ID NO 58163
  misc_feature (1)..(1210): Ortholog of  Ceres SEQ ID NO 13597295 as cited in SEQ ID NO 63743
  misc_feature (1)..(1210): Ortholog of  Ceres SEQ ID NO 12617090 as cited in SEQ ID NO 64005
  misc_feature (1)..(1210): Ortholog of  Ceres SEQ ID NO 13597439 as cited in SEQ ID NO 64081
  misc_feature (1)..(1210): Ortholog of  Ceres SEQ ID NO 13599438 as cited in SEQ ID NO 0
  misc_feature (1)..(1210): Ortholog of  Ceres SEQ ID NO 13623850 as cited in SEQ ID NO 0

SEQ ID NO: 34497 - protein, 310 aa, Arabidopsis thaliana; identical to SEQ ID NO: 30907
  peptide (1)..(310): Ceres Seq. ID no. 12482054

SEQ ID NO: 34498 - protein, 302 aa, Arabidopsis thaliana; identical to SEQ ID NO: 30908
  peptide (1)..(302): Ceres Seq. ID no. 12482055

SEQ ID NO: 34499 - protein, 283 aa, Arabidopsis thaliana; identical to SEQ ID NO: 30909
  peptide (1)..(283): Ceres Seq. ID no. 12482056

SEQ ID NO: 34500 - DNA, 1333 bp, Arabidopsis thaliana; identical to SEQ ID NO: 30910
  misc_feature (1)..(1333): Ceres Seq. ID no. 12370509
  misc_feature (1)..(1333): Ortholog of  Ceres SEQ ID NO 13597638 as cited in SEQ ID NO 65448
  misc_feature (1)..(1333): Ortholog of  Ceres SEQ ID NO 14302772 as cited in SEQ ID NO 69055

SEQ ID NO: 34501 - protein, 352 aa, Arabidopsis thaliana; identical to SEQ ID NO: 30911
  peptide (1)..(352): Ceres Seq. ID no. 12370510

SEQ ID NO: 34502 - protein, 315 aa, Arabidopsis thaliana; identical to SEQ ID NO: 30912
  peptide (1)..(315): Ceres Seq. ID no. 12370511

SEQ ID NO: 34503 - protein, 212 aa, Arabidopsis thaliana; identical to SEQ ID NO: 30913
  peptide (1)..(212): Ceres Seq. ID no. 12370512

SEQ ID NO: 34504 - DNA, 1903 bp, Arabidopsis thaliana; identical to SEQ ID NO: 30914
  misc_feature (1)..(1903): Ceres Seq. ID no. 12384905
  misc_feature (1)..(1903): Ortholog of  Ceres SEQ ID NO 15174547 as cited in SEQ ID NO 59586
  misc_feature (1)..(1903): Ortholog of  Ceres SEQ ID NO 15169470 as cited in SEQ ID NO 66036

SEQ ID NO: 34505 - protein, 549 aa, Arabidopsis thaliana; identical to SEQ ID NO: 30915
  peptide (1)..(549): Ceres Seq. ID no. 12384906

SEQ ID NO: 34506 - protein, 525 aa, Arabidopsis thaliana; identical to SEQ ID NO: 30916
  peptide (1)..(525): Ceres Seq. ID no. 12384907

SEQ ID NO: 34507 - protein, 365 aa, Arabidopsis thaliana; identical to SEQ ID NO: 30917
  peptide (1)..(365): Ceres Seq. ID no. 12384908

SEQ ID NO: 34508 - DNA, 1132 bp, Arabidopsis thaliana; identical to SEQ ID NO: 30918
  misc_feature (1)..(1132): Ceres Seq. ID no. 12326010
  misc_feature (1)..(1132): Ortholog of  Ceres SEQ ID NO 13639033 as cited in SEQ ID NO 55960

SEQ ID NO: 34509 - protein, 261 aa, Arabidopsis thaliana; identical to SEQ ID NO: 30919
  peptide (1)..(261): Ceres Seq. ID no. 12326011

SEQ ID NO: 34510 - protein, 258 aa, Arabidopsis thaliana; identical to SEQ ID NO: 30920
  peptide (1)..(258): Ceres Seq. ID no. 12326012

SEQ ID NO: 34511 - protein, 256 aa, Arabidopsis thaliana; identical to SEQ ID NO: 30921
  peptide (1)..(256): Ceres Seq. ID no. 12326013

SEQ ID NO: 34512 - DNA, 1337 bp, Arabidopsis thaliana; identical to SEQ ID NO: 30922
  misc_feature (1)..(1337): Ceres Seq. ID no. 12321402
  misc_feature (1)..(1337): Ortholog of  Ceres SEQ ID NO 14310483 as cited in SEQ ID NO 58376
  misc_feature (1)..(1337): Ortholog of  Ceres SEQ ID NO 13654451 as cited in SEQ ID NO 67881

SEQ ID NO: 34513 - protein, 386 aa, Arabidopsis thaliana; identical to SEQ ID NO: 30923
  peptide (1)..(386): Ceres Seq. ID no. 12321403

SEQ ID NO: 34514 - protein, 329 aa, Arabidopsis thaliana; identical to SEQ ID NO: 30924
  peptide (1)..(329): Ceres Seq. ID no. 12321404

SEQ ID NO: 34515 - protein, 317 aa, Arabidopsis thaliana; identical to SEQ ID NO: 30925
  peptide (1)..(317): Ceres Seq. ID no. 12321405

SEQ ID NO: 34516 - DNA, 1373 bp, Arabidopsis thaliana; identical to SEQ ID NO: 30926
  misc_feature (1)..(1373): Ceres Seq. ID no. 12372173
  misc_feature (1)..(1373): Ortholog of  Ceres SEQ ID NO 14313471 as cited in SEQ ID NO 64513
  misc_feature (1)..(1373): Ortholog of  Ceres SEQ ID NO 13591377 as cited in SEQ ID NO 66534

SEQ ID NO: 34517 - protein, 380 aa, Arabidopsis thaliana; identical to SEQ ID NO: 30927
  peptide (1)..(380): Ceres Seq. ID no. 12372174

SEQ ID NO: 34518 - protein, 362 aa, Arabidopsis thaliana; identical to SEQ ID NO: 30928
  peptide (1)..(362): Ceres Seq. ID no. 12372175

SEQ ID NO: 34519 - protein, 351 aa, Arabidopsis thaliana; identical to SEQ ID NO: 30929
  peptide (1)..(351): Ceres Seq. ID no. 12372176

SEQ ID NO: 34520 - DNA, 1571 bp, Arabidopsis thaliana; identical to SEQ ID NO: 30930
  misc_feature (1)..(1571): Ceres Seq. ID no. 13486971
  misc_feature (1)..(1571): Ortholog of  Ceres SEQ ID NO 15179007 as cited in SEQ ID NO 1038
  misc_feature (1)..(1571): Ortholog of  Ceres SEQ ID NO 15226449 as cited in SEQ ID NO 58879
  misc_feature (1)..(1571): Ortholog of  Ceres SEQ ID NO 13597146 as cited in SEQ ID NO 63311

SEQ ID NO: 34521 - protein, 470 aa, Arabidopsis thaliana; identical to SEQ ID NO: 30931
  peptide (1)..(470): Ceres Seq. ID no. 13486972

SEQ ID NO: 34522 - protein, 457 aa, Arabidopsis thaliana; identical to SEQ ID NO: 30932
  peptide (1)..(457): Ceres Seq. ID no. 13486973

SEQ ID NO: 34523 - protein, 238 aa, Arabidopsis thaliana; identical to SEQ ID NO: 30933
  peptide (1)..(238): Ceres Seq. ID no. 13486974

SEQ ID NO: 34524 - DNA, 1180 bp, Arabidopsis thaliana; identical to SEQ ID NO: 30934
  misc_feature (1)..(1180): Ceres Seq. ID no. 13504734
  misc_feature (1)..(1180): Ortholog of  Ceres SEQ ID NO 15180043 as cited in SEQ ID NO 0

SEQ ID NO: 34525 - protein, 320 aa, Arabidopsis thaliana; identical to SEQ ID NO: 30935
  peptide (1)..(320): Ceres Seq. ID no. 13504735

SEQ ID NO: 34526 - protein, 266 aa, Arabidopsis thaliana; identical to SEQ ID NO: 26377
  peptide (1)..(266): Ceres Seq. ID no. 13504736

SEQ ID NO: 34527 - protein, 261 aa, Arabidopsis thaliana; identical to SEQ ID NO: 26378
  peptide (1)..(261): Ceres Seq. ID no. 13504737

SEQ ID NO: 34528 - DNA, 1016 bp, Arabidopsis thaliana; identical to SEQ ID NO: 30938
  misc_feature (1)..(1016): Ceres Seq. ID no. 13489860
  misc_feature (1)..(1016): Ortholog of  Ceres SEQ ID NO 12557432 as cited in SEQ ID NO 92
  misc_feature (1)..(1016): Ortholog of  Ceres SEQ ID NO 15224319 as cited in SEQ ID NO 66044
  misc_feature (1)..(1016): Ortholog of  Ceres SEQ ID NO 13598045 as cited in SEQ ID NO 66822

SEQ ID NO: 34529 - protein, 250 aa, Arabidopsis thaliana; identical to SEQ ID NO: 30939
  peptide (1)..(250): Ceres Seq. ID no. 13489861

SEQ ID NO: 34530 - protein, 226 aa, Arabidopsis thaliana; identical to SEQ ID NO: 30940
  peptide (1)..(226): Ceres Seq. ID no. 13489862

SEQ ID NO: 34531 - protein, 186 aa, Arabidopsis thaliana; identical to SEQ ID NO: 30941
  peptide (1)..(186): Ceres Seq. ID no. 13489863

SEQ ID NO: 34532 - DNA, 3198 bp, Arabidopsis thaliana; identical to SEQ ID NO: 30942
  misc_feature (1)..(3198): Ceres Seq. ID no. 13579859
  misc_feature (1)..(3198): Ortholog of  Ceres SEQ ID NO 14304202 as cited in SEQ ID NO 56346
  misc_feature (1)..(3198): Ortholog of  Ceres SEQ ID NO 14304159 as cited in SEQ ID NO 56494
  misc_feature (1)..(3198): Ortholog of  Ceres SEQ ID NO 14314198 as cited in SEQ ID NO 57472
  misc_feature (1)..(3198): Ortholog of  Ceres SEQ ID NO 12623915 as cited in SEQ ID NO 61013
  misc_feature (1)..(3198): Ortholog of  Ceres SEQ ID NO 14302314 as cited in SEQ ID NO 62543
  misc_feature (1)..(3198): Ortholog of  Ceres SEQ ID NO 13598391 as cited in SEQ ID NO 62769

SEQ ID NO: 34533 - protein, 274 aa, Arabidopsis thaliana; identical to SEQ ID NO: 30943
  peptide (1)..(274): Ceres Seq. ID no. 13579860

SEQ ID NO: 34534 - protein, 207 aa, Arabidopsis thaliana; identical to SEQ ID NO: 30944
  peptide (1)..(207): Ceres Seq. ID no. 13579861

SEQ ID NO: 34535 - protein, 156 aa, Arabidopsis thaliana; identical to SEQ ID NO: 30945
  peptide (1)..(156): Ceres Seq. ID no. 13579862

SEQ ID NO: 34536 - DNA, 641 bp, Arabidopsis thaliana; identical to SEQ ID NO: 30946
  misc_feature (1)..(641): Ceres Seq. ID no. 12420660
  misc_feature (1)..(641): Ortholog of  Ceres SEQ ID NO 12422485 as cited in SEQ ID NO 20557

SEQ ID NO: 34537 - protein, 132 aa, Arabidopsis thaliana; identical to SEQ ID NO: 30947
  peptide (1)..(132): Ceres Seq. ID no. 12420661

SEQ ID NO: 34538 - protein, 106 aa, Arabidopsis thaliana; identical to SEQ ID NO: 30948
  peptide (1)..(106): Ceres Seq. ID no. 12420662

SEQ ID NO: 34539 - protein, 80 aa, Arabidopsis thaliana; identical to SEQ ID NO: 30949
  peptide (1)..(80): Ceres Seq. ID no. 12420663

SEQ ID NO: 34540 - DNA, 908 bp, Arabidopsis thaliana; identical to SEQ ID NO: 30950
  misc_feature (1)..(908): Ceres Seq. ID no. 12396500
  misc_feature (1)..(908): Ortholog of  Ceres SEQ ID NO 12616162 as cited in SEQ ID NO 63260

SEQ ID NO: 34541 - protein, 276 aa, Arabidopsis thaliana; identical to SEQ ID NO: 30951
  peptide (1)..(276): Ceres Seq. ID no. 12396501

SEQ ID NO: 34542 - protein, 261 aa, Arabidopsis thaliana; identical to SEQ ID NO: 30952
  peptide (1)..(261): Ceres Seq. ID no. 12396502

SEQ ID NO: 34543 - protein, 176 aa, Arabidopsis thaliana; identical to SEQ ID NO: 30953
  peptide (1)..(176): Ceres Seq. ID no. 12396503

SEQ ID NO: 34544 - DNA, 1300 bp, Arabidopsis thaliana; identical to SEQ ID NO: 30954
  misc_feature (1)..(1300): Ceres Seq. ID no. 12326352
  misc_feature (1)..(1300): Ortholog of  Ceres SEQ ID NO 14308787 as cited in SEQ ID NO 55614
  misc_feature (1)..(1300): Ortholog of  Ceres SEQ ID NO 13656547 as cited in SEQ ID NO 65935

SEQ ID NO: 34545 - protein, 296 aa, Arabidopsis thaliana; identical to SEQ ID NO: 30955
  peptide (1)..(296): Ceres Seq. ID no. 12326353
  misc_feature (262)..(262): Xaa is any aa, unknown or other

SEQ ID NO: 34546 - protein, 262 aa, Arabidopsis thaliana; identical to SEQ ID NO: 30956
  peptide (1)..(262): Ceres Seq. ID no. 12326354
  misc_feature (228)..(228): Xaa is any aa, unknown or other

SEQ ID NO: 34547 - protein, 223 aa, Arabidopsis thaliana; identical to SEQ ID NO: 30957
  peptide (1)..(223): Ceres Seq. ID no. 12326355
  misc_feature (189)..(189): Xaa is any aa, unknown or other

SEQ ID NO: 34548 - DNA, 1512 bp, Arabidopsis thaliana; identical to SEQ ID NO: 30958
  misc_feature (1)..(1512): Ceres Seq. ID no. 13591994
  misc_feature (1)..(1512): Ortholog of  Ceres SEQ ID NO 13654285 as cited in SEQ ID NO 68661

SEQ ID NO: 34549 - protein, 325 aa, Arabidopsis thaliana; identical to SEQ ID NO: 30959
  peptide (1)..(325): Ceres Seq. ID no. 13591995

SEQ ID NO: 34550 - protein, 258 aa, Arabidopsis thaliana; identical to SEQ ID NO: 30960
  peptide (1)..(258): Ceres Seq. ID no. 13591996

SEQ ID NO: 34551 - protein, 255 aa, Arabidopsis thaliana; identical to SEQ ID NO: 30961
  peptide (1)..(255): Ceres Seq. ID no. 13591997

SEQ ID NO: 34552 - DNA, 1232 bp, Arabidopsis thaliana; identical to SEQ ID NO: 30962
  misc_feature (1)..(1232): Ceres Seq. ID no. 12324969
  misc_feature (1)..(1232): Ortholog of  Ceres SEQ ID NO 15177091 as cited in SEQ ID NO 52140
  misc_feature (1)..(1232): Ortholog of  Ceres SEQ ID NO 15172539 as cited in SEQ ID NO 57333
  misc_feature (1)..(1232): Ortholog of  Ceres SEQ ID NO 14315951 as cited in SEQ ID NO 57634
  misc_feature (1)..(1232): Ortholog of  Ceres SEQ ID NO 13597324 as cited in SEQ ID NO 64842
  misc_feature (1)..(1232): Ortholog of  Ceres SEQ ID NO 13658672 as cited in SEQ ID NO 66627

SEQ ID NO: 34553 - protein, 303 aa, Arabidopsis thaliana; identical to SEQ ID NO: 30963
  peptide (1)..(303): Ceres Seq. ID no. 12324970

SEQ ID NO: 34554 - protein, 165 aa, Arabidopsis thaliana; identical to SEQ ID NO: 29319
  peptide (1)..(165): Ceres Seq. ID no. 12324971

SEQ ID NO: 34555 - DNA, 977 bp, Arabidopsis thaliana; identical to SEQ ID NO: 30965
  misc_feature (1)..(977): Ceres Seq. ID no. 12322916
  misc_feature (1)..(977): Ortholog of  Ceres SEQ ID NO 15174082 as cited in SEQ ID NO 61896
  misc_feature (1)..(977): Ortholog of  Ceres SEQ ID NO 13655598 as cited in SEQ ID NO 64077
  misc_feature (1)..(977): Ortholog of  Ceres SEQ ID NO 15179351 as cited in SEQ ID NO 0
  misc_feature (1)..(977): Ortholog of  Ceres SEQ ID NO 15180408 as cited in SEQ ID NO 0

SEQ ID NO: 34556 - protein, 250 aa, Arabidopsis thaliana; identical to SEQ ID NO: 30966
  peptide (1)..(250): Ceres Seq. ID no. 12322917

SEQ ID NO: 34557 - DNA, 1310 bp, Arabidopsis thaliana; identical to SEQ ID NO: 30967
  misc_feature (1)..(1310): Ceres Seq. ID no. 12697154
  misc_feature (1)..(1310): Ortholog of  Ceres SEQ ID NO 15171289 as cited in SEQ ID NO 51570

SEQ ID NO: 34558 - protein, 320 aa, Arabidopsis thaliana; identical to SEQ ID NO: 24922
  peptide (1)..(320): Ceres Seq. ID no. 12697155

SEQ ID NO: 34559 - protein, 312 aa, Arabidopsis thaliana; identical to SEQ ID NO: 24923
  peptide (1)..(312): Ceres Seq. ID no. 12697156

SEQ ID NO: 34560 - protein, 166 aa, Arabidopsis thaliana; identical to SEQ ID NO: 24924
  peptide (1)..(166): Ceres Seq. ID no. 12697157

SEQ ID NO: 34561 - DNA, 1117 bp, Arabidopsis thaliana; identical to SEQ ID NO: 30971
  misc_feature (1)..(1117): Ceres Seq. ID no. 12321756
  misc_feature (1)..(1117): Ortholog of  Ceres SEQ ID NO 14306439 as cited in SEQ ID NO 53628
  misc_feature (1)..(1117): Ortholog of  Ceres SEQ ID NO 12611235 as cited in SEQ ID NO 56101
  misc_feature (1)..(1117): Ortholog of  Ceres SEQ ID NO 15226202 as cited in SEQ ID NO 65001
  misc_feature (1)..(1117): Ortholog of  Ceres SEQ ID NO 15177896 as cited in SEQ ID NO 0

SEQ ID NO: 34562 - protein, 256 aa, Arabidopsis thaliana; identical to SEQ ID NO: 30972
  peptide (1)..(256): Ceres Seq. ID no. 12321757

SEQ ID NO: 34563 - protein, 248 aa, Arabidopsis thaliana; identical to SEQ ID NO: 30973
  peptide (1)..(248): Ceres Seq. ID no. 12321758

SEQ ID NO: 34564 - protein, 240 aa, Arabidopsis thaliana; identical to SEQ ID NO: 30974
  peptide (1)..(240): Ceres Seq. ID no. 12321759

SEQ ID NO: 34565 - DNA, 1433 bp, Arabidopsis thaliana; identical to SEQ ID NO: 30975
  misc_feature (1)..(1433): Ceres Seq. ID no. 12324574
  misc_feature (1)..(1433): Ortholog of  Ceres SEQ ID NO 13597805 as cited in SEQ ID NO 64186

SEQ ID NO: 34566 - protein, 383 aa, Arabidopsis thaliana; identical to SEQ ID NO: 30976
  peptide (1)..(383): Ceres Seq. ID no. 12324575

SEQ ID NO: 34567 - protein, 382 aa, Arabidopsis thaliana; identical to SEQ ID NO: 30977
  peptide (1)..(382): Ceres Seq. ID no. 12324576

SEQ ID NO: 34568 - protein, 376 aa, Arabidopsis thaliana; identical to SEQ ID NO: 30978
  peptide (1)..(376): Ceres Seq. ID no. 12324577

SEQ ID NO: 34569 - DNA, 822 bp, Arabidopsis thaliana; identical to SEQ ID NO: 30979
  misc_feature (1)..(822): Ceres Seq. ID no. 12321976
  misc_feature (1)..(822): Ortholog of  Ceres SEQ ID NO 13639278 as cited in SEQ ID NO 59801
  misc_feature (1)..(822): Ortholog of  Ceres SEQ ID NO 12598299 as cited in SEQ ID NO 68409

SEQ ID NO: 34570 - protein, 215 aa, Arabidopsis thaliana; identical to SEQ ID NO: 30980
  peptide (1)..(215): Ceres Seq. ID no. 12321977

SEQ ID NO: 34571 - protein, 198 aa, Arabidopsis thaliana; identical to SEQ ID NO: 30981
  peptide (1)..(198): Ceres Seq. ID no. 12321978

SEQ ID NO: 34572 - protein, 137 aa, Arabidopsis thaliana; identical to SEQ ID NO: 30982
  peptide (1)..(137): Ceres Seq. ID no. 12321979

SEQ ID NO: 34573 - DNA, 1168 bp, Arabidopsis thaliana; identical to SEQ ID NO: 30983
  misc_feature (1)..(1168): Ceres Seq. ID no. 12324578
  misc_feature (1)..(1168): Ortholog of  Ceres SEQ ID NO 13594435 as cited in SEQ ID NO 57977

SEQ ID NO: 34574 - protein, 231 aa, Arabidopsis thaliana; identical to SEQ ID NO: 30984
  peptide (1)..(231): Ceres Seq. ID no. 12324579

SEQ ID NO: 34575 - protein, 215 aa, Arabidopsis thaliana; identical to SEQ ID NO: 30985
  peptide (1)..(215): Ceres Seq. ID no. 12324580

SEQ ID NO: 34576 - protein, 176 aa, Arabidopsis thaliana; identical to SEQ ID NO: 30986
  peptide (1)..(176): Ceres Seq. ID no. 12324581

SEQ ID NO: 34577 - DNA, 941 bp, Arabidopsis thaliana; identical to SEQ ID NO: 30987
  misc_feature (1)..(941): Ceres Seq. ID no. 12340295
  misc_feature (1)..(941): Ortholog of  Ceres SEQ ID NO 12610385 as cited in SEQ ID NO 55938

SEQ ID NO: 34578 - protein, 85 aa, Arabidopsis thaliana; identical to SEQ ID NO: 30988
  peptide (1)..(85): Ceres Seq. ID no. 12340296

SEQ ID NO: 34579 - protein, 75 aa, Arabidopsis thaliana; identical to SEQ ID NO: 30989
  peptide (1)..(75): Ceres Seq. ID no. 12340297

SEQ ID NO: 34580 - protein, 62 aa, Arabidopsis thaliana; identical to SEQ ID NO: 30990
  peptide (1)..(62): Ceres Seq. ID no. 12340298

SEQ ID NO: 34581 - DNA, 1219 bp, Arabidopsis thaliana; identical to SEQ ID NO: 30991
  misc_feature (1)..(1219): Ceres Seq. ID no. 12481880
  misc_feature (1)..(1219): Ortholog of  Ceres SEQ ID NO 14306066 as cited in SEQ ID NO 57378

SEQ ID NO: 34582 - protein, 263 aa, Arabidopsis thaliana; identical to SEQ ID NO: 30992
  peptide (1)..(263): Ceres Seq. ID no. 12481881

SEQ ID NO: 34583 - protein, 238 aa, Arabidopsis thaliana; identical to SEQ ID NO: 30993
  peptide (1)..(238): Ceres Seq. ID no. 12481882

SEQ ID NO: 34584 - protein, 234 aa, Arabidopsis thaliana; identical to SEQ ID NO: 30994
  peptide (1)..(234): Ceres Seq. ID no. 12481883

SEQ ID NO: 34585 - DNA, 905 bp, Arabidopsis thaliana; identical to SEQ ID NO: 30995
  misc_feature (1)..(905): Ceres Seq. ID no. 13490791
  misc_feature (1)..(905): Ortholog of  Ceres SEQ ID NO 14306110 as cited in SEQ ID NO 1363

SEQ ID NO: 34586 - protein, 202 aa, Arabidopsis thaliana; identical to SEQ ID NO: 30996
  peptide (1)..(202): Ceres Seq. ID no. 13490792

SEQ ID NO: 34587 - protein, 200 aa, Arabidopsis thaliana; identical to SEQ ID NO: 30997
  peptide (1)..(200): Ceres Seq. ID no. 13490793

SEQ ID NO: 34588 - protein, 194 aa, Arabidopsis thaliana; identical to SEQ ID NO: 30998
  peptide (1)..(194): Ceres Seq. ID no. 13490794

SEQ ID NO: 34589 - DNA, 1904 bp, Arabidopsis thaliana; identical to SEQ ID NO: 30999
  misc_feature (1)..(1904): Ceres Seq. ID no. 12338555
  misc_feature (1)..(1904): Ortholog of  Ceres SEQ ID NO 15170655 as cited in SEQ ID NO 67069

SEQ ID NO: 34590 - protein, 466 aa, Arabidopsis thaliana; identical to SEQ ID NO: 31000
  peptide (1)..(466): Ceres Seq. ID no. 12338557

SEQ ID NO: 34591 - protein, 450 aa, Arabidopsis thaliana; identical to SEQ ID NO: 31001
  peptide (1)..(450): Ceres Seq. ID no. 12338558

SEQ ID NO: 34592 - protein, 234 aa, Arabidopsis thaliana; identical to SEQ ID NO: 31002
  peptide (1)..(234): Ceres Seq. ID no. 12338559

SEQ ID NO: 34593 - DNA, 1698 bp, Arabidopsis thaliana; identical to SEQ ID NO: 31003
  misc_feature (1)..(1698): Ceres Seq. ID no. 12396660
  misc_feature (1)..(1698): Ortholog of  Ceres SEQ ID NO 14304276 as cited in SEQ ID NO 53407

SEQ ID NO: 34594 - protein, 430 aa, Arabidopsis thaliana; identical to SEQ ID NO: 31004
  peptide (1)..(430): Ceres Seq. ID no. 12396661

SEQ ID NO: 34595 - protein, 394 aa, Arabidopsis thaliana; identical to SEQ ID NO: 31005
  peptide (1)..(394): Ceres Seq. ID no. 12396662

SEQ ID NO: 34596 - protein, 276 aa, Arabidopsis thaliana; identical to SEQ ID NO: 31006
  peptide (1)..(276): Ceres Seq. ID no. 12396663

SEQ ID NO: 34597 - DNA, 991 bp, Arabidopsis thaliana; identical to SEQ ID NO: 31007
  misc_feature (1)..(991): Ceres Seq. ID no. 13645938
  misc_feature (1)..(991): Ortholog of  Ceres SEQ ID NO 13656286 as cited in SEQ ID NO 69168
  misc_feature (1)..(991): Ortholog of  Ceres SEQ ID NO 15174351 as cited in SEQ ID NO 0

SEQ ID NO: 34598 - protein, 226 aa, Arabidopsis thaliana; identical to SEQ ID NO: 31008
  peptide (1)..(226): Ceres Seq. ID no. 13645939

SEQ ID NO: 34599 - protein, 207 aa, Arabidopsis thaliana; identical to SEQ ID NO: 31009
  peptide (1)..(207): Ceres Seq. ID no. 13645940

SEQ ID NO: 34600 - protein, 175 aa, Arabidopsis thaliana; identical to SEQ ID NO: 31010
  peptide (1)..(175): Ceres Seq. ID no. 13645941

SEQ ID NO: 34601 - DNA, 1266 bp, Arabidopsis thaliana; identical to SEQ ID NO: 31011
  misc_feature (1)..(1266): Ceres Seq. ID no. 13497673
  misc_feature (1)..(1266): Ortholog of  Ceres SEQ ID NO 15178797 as cited in SEQ ID NO 1152
  misc_feature (1)..(1266): Ortholog of  Ceres SEQ ID NO 15175688 as cited in SEQ ID NO 60465
  misc_feature (1)..(1266): Ortholog of  Ceres SEQ ID NO 13495628 as cited in SEQ ID NO 60727

SEQ ID NO: 34602 - protein, 325 aa, Arabidopsis thaliana; identical to SEQ ID NO: 31012
  peptide (1)..(325): Ceres Seq. ID no. 13497674

SEQ ID NO: 34603 - protein, 164 aa, Arabidopsis thaliana; identical to SEQ ID NO: 31013
  peptide (1)..(164): Ceres Seq. ID no. 13497675

SEQ ID NO: 34604 - DNA, 1336 bp, Arabidopsis thaliana; identical to SEQ ID NO: 31014
  misc_feature (1)..(1336): Ceres Seq. ID no. 12322726
  misc_feature (1)..(1336): Ortholog of  Ceres SEQ ID NO 14308417 as cited in SEQ ID NO 55357

SEQ ID NO: 34605 - protein, 339 aa, Arabidopsis thaliana; identical to SEQ ID NO: 31015
  peptide (1)..(339): Ceres Seq. ID no. 12322727

SEQ ID NO: 34606 - protein, 305 aa, Arabidopsis thaliana; identical to SEQ ID NO: 31016
  peptide (1)..(305): Ceres Seq. ID no. 12322728

SEQ ID NO: 34607 - protein, 172 aa, Arabidopsis thaliana; identical to SEQ ID NO: 31017
  peptide (1)..(172): Ceres Seq. ID no. 12322729

SEQ ID NO: 34608 - DNA, 789 bp, Arabidopsis thaliana; identical to SEQ ID NO: 31018
  misc_feature (1)..(789): Ceres Seq. ID no. 12397073
  misc_feature (1)..(789): Ortholog of  Ceres SEQ ID NO 12588828 as cited in SEQ ID NO 1280

SEQ ID NO: 34609 - protein, 70 aa, Arabidopsis thaliana; identical to SEQ ID NO: 31019
  peptide (1)..(70): Ceres Seq. ID no. 12397074

SEQ ID NO: 34610 - protein, 49 aa, Arabidopsis thaliana; identical to SEQ ID NO: 31020
  peptide (1)..(49): Ceres Seq. ID no. 12397075

SEQ ID NO: 34611 - DNA, 670 bp, Arabidopsis thaliana; identical to SEQ ID NO: 31021
  misc_feature (1)..(670): Ceres Seq. ID no. 12601447
  misc_feature (1)..(670): Ortholog of  Ceres SEQ ID NO 15178884 as cited in SEQ ID NO 0

SEQ ID NO: 34612 - protein, 223 aa, Arabidopsis thaliana; identical to SEQ ID NO: 31022
  peptide (1)..(223): Ceres Seq. ID no. 12601448

SEQ ID NO: 34613 - protein, 213 aa, Arabidopsis thaliana; identical to SEQ ID NO: 31023
  peptide (1)..(213): Ceres Seq. ID no. 12601449

SEQ ID NO: 34614 - DNA, 2380 bp, Arabidopsis thaliana; identical to SEQ ID NO: 31024
  misc_feature (1)..(2380): Ceres Seq. ID no. 12330997
  misc_feature (1)..(2380): Ortholog of  Ceres SEQ ID NO 13654989 as cited in SEQ ID NO 63117
  misc_feature (1)..(2380): Ortholog of  Ceres SEQ ID NO 13584744 as cited in SEQ ID NO 69137

SEQ ID NO: 34615 - protein, 319 aa, Arabidopsis thaliana; identical to SEQ ID NO: 31025
  peptide (1)..(319): Ceres Seq. ID no. 12330998

SEQ ID NO: 34616 - protein, 311 aa, Arabidopsis thaliana; identical to SEQ ID NO: 31026
  peptide (1)..(311): Ceres Seq. ID no. 12330999

SEQ ID NO: 34617 - protein, 307 aa, Arabidopsis thaliana; identical to SEQ ID NO: 31027
  peptide (1)..(307): Ceres Seq. ID no. 12331000

SEQ ID NO: 34618 - DNA, 977 bp, Arabidopsis thaliana; identical to SEQ ID NO: 31028
  misc_feature (1)..(977): Ceres Seq. ID no. 12322651
  misc_feature (1)..(977): Ortholog of  Ceres SEQ ID NO 14312228 as cited in SEQ ID NO 59237

SEQ ID NO: 34619 - protein, 231 aa, Arabidopsis thaliana; identical to SEQ ID NO: 31029
  peptide (1)..(231): Ceres Seq. ID no. 12322652

SEQ ID NO: 34620 - protein, 227 aa, Arabidopsis thaliana; identical to SEQ ID NO: 31030
  peptide (1)..(227): Ceres Seq. ID no. 12322653

SEQ ID NO: 34621 - protein, 184 aa, Arabidopsis thaliana; identical to SEQ ID NO: 31031
  peptide (1)..(184): Ceres Seq. ID no. 12322654

SEQ ID NO: 34622 - DNA, 621 bp, Arabidopsis thaliana; identical to SEQ ID NO: 31032
  misc_feature (1)..(621): Ceres Seq. ID no. 12559532
  misc_feature (1)..(621): Ortholog of  Ceres SEQ ID NO 15169443 as cited in SEQ ID NO 58785

SEQ ID NO: 34623 - protein, 115 aa, Arabidopsis thaliana; identical to SEQ ID NO: 31033
  peptide (1)..(115): Ceres Seq. ID no. 12559533

SEQ ID NO: 34624 - DNA, 1051 bp, Arabidopsis thaliana; identical to SEQ ID NO: 31034
  misc_feature (1)..(1051): Ceres Seq. ID no. 12579915
  misc_feature (1)..(1051): Ortholog of  Ceres SEQ ID NO 13656147 as cited in SEQ ID NO 64422
  misc_feature (1)..(1051): Ortholog of  Ceres SEQ ID NO 13596496 as cited in SEQ ID NO 68639

SEQ ID NO: 34625 - protein, 148 aa, Arabidopsis thaliana; identical to SEQ ID NO: 31035
  peptide (1)..(148): Ceres Seq. ID no. 12579916

SEQ ID NO: 34626 - protein, 116 aa, Arabidopsis thaliana; identical to SEQ ID NO: 31036
  peptide (1)..(116): Ceres Seq. ID no. 12579917

SEQ ID NO: 34627 - protein, 100 aa, Arabidopsis thaliana; identical to SEQ ID NO: 31037
  peptide (1)..(100): Ceres Seq. ID no. 12579918

SEQ ID NO: 34628 - DNA, 752 bp, Arabidopsis thaliana; identical to SEQ ID NO: 31038
  misc_feature (1)..(752): Ceres Seq. ID no. 13487050
  misc_feature (1)..(752): Ortholog of  Ceres SEQ ID NO 12609890 as cited in SEQ ID NO 51792
  misc_feature (1)..(752): Ortholog of  Ceres SEQ ID NO 12597253 as cited in SEQ ID NO 62959
  misc_feature (1)..(752): Ortholog of  Ceres SEQ ID NO 15173341 as cited in SEQ ID NO 63800
  misc_feature (1)..(752): Ortholog of  Ceres SEQ ID NO 12635416 as cited in SEQ ID NO 0
  misc_feature (1)..(752): Ortholog of  Ceres SEQ ID NO 12635564 as cited in SEQ ID NO 0
  misc_feature (1)..(752): Ortholog of  Ceres SEQ ID NO 12636917 as cited in SEQ ID NO 0
  misc_feature (1)..(752): Ortholog of  Ceres SEQ ID NO 14309430 as cited in SEQ ID NO 0

SEQ ID NO: 34629 - protein, 150 aa, Arabidopsis thaliana; identical to SEQ ID NO: 31039
  peptide (1)..(150): Ceres Seq. ID no. 13487051

SEQ ID NO: 34630 - protein, 122 aa, Arabidopsis thaliana; identical to SEQ ID NO: 31040
  peptide (1)..(122): Ceres Seq. ID no. 13487052

SEQ ID NO: 34631 - protein, 90 aa, Arabidopsis thaliana; identical to SEQ ID NO: 31041
  peptide (1)..(90): Ceres Seq. ID no. 13487053

SEQ ID NO: 34632 - DNA, 1517 bp, Arabidopsis thaliana; identical to SEQ ID NO: 31042
  misc_feature (1)..(1517): Ceres Seq. ID no. 12322684
  misc_feature (1)..(1517): Ortholog of  Ceres SEQ ID NO 12609146 as cited in SEQ ID NO 52118
  misc_feature (1)..(1517): Ortholog of  Ceres SEQ ID NO 13638136 as cited in SEQ ID NO 58644
  misc_feature (1)..(1517): Ortholog of  Ceres SEQ ID NO 15225826 as cited in SEQ ID NO 64774
  misc_feature (1)..(1517): Ortholog of  Ceres SEQ ID NO 13599119 as cited in SEQ ID NO 0

SEQ ID NO: 34633 - protein, 383 aa, Arabidopsis thaliana; identical to SEQ ID NO: 31043
  peptide (1)..(383): Ceres Seq. ID no. 12322685

SEQ ID NO: 34634 - protein, 294 aa, Arabidopsis thaliana; identical to SEQ ID NO: 31044
  peptide (1)..(294): Ceres Seq. ID no. 12322686

SEQ ID NO: 34635 - DNA, 860 bp, Arabidopsis thaliana; identical to SEQ ID NO: 31045
  misc_feature (1)..(860): Ceres Seq. ID no. 13591956
  misc_feature (1)..(860): Ortholog of  Ceres SEQ ID NO 13638595 as cited in SEQ ID NO 52050
  misc_feature (1)..(860): Ortholog of  Ceres SEQ ID NO 14301870 as cited in SEQ ID NO 61501
  misc_feature (1)..(860): Ortholog of  Ceres SEQ ID NO 12583993 as cited in SEQ ID NO 68098

SEQ ID NO: 34636 - protein, 208 aa, Arabidopsis thaliana; identical to SEQ ID NO: 23207
  peptide (1)..(208): Ceres Seq. ID no. 13591957

SEQ ID NO: 34637 - protein, 110 aa, Arabidopsis thaliana; identical to SEQ ID NO: 31047
  peptide (1)..(110): Ceres Seq. ID no. 13591958

SEQ ID NO: 34638 - DNA, 1720 bp, Arabidopsis thaliana; identical to SEQ ID NO: 31048
  misc_feature (1)..(1720): Ceres Seq. ID no. 12579466
  misc_feature (1)..(1720): Ortholog of  Ceres SEQ ID NO 15226473 as cited in SEQ ID NO 50919
  misc_feature (1)..(1720): Ortholog of  Ceres SEQ ID NO 13639704 as cited in SEQ ID NO 51325
  misc_feature (1)..(1720): Ortholog of  Ceres SEQ ID NO 13661747 as cited in SEQ ID NO 60578
  misc_feature (1)..(1720): Ortholog of  Ceres SEQ ID NO 13661672 as cited in SEQ ID NO 61462
  misc_feature (1)..(1720): Ortholog of  Ceres SEQ ID NO 13599646 as cited in SEQ ID NO 0

SEQ ID NO: 34639 - protein, 478 aa, Arabidopsis thaliana; identical to SEQ ID NO: 31049
  peptide (1)..(478): Ceres Seq. ID no. 12579467

SEQ ID NO: 34640 - protein, 466 aa, Arabidopsis thaliana; identical to SEQ ID NO: 31050
  peptide (1)..(466): Ceres Seq. ID no. 12579468

SEQ ID NO: 34641 - protein, 441 aa, Arabidopsis thaliana; identical to SEQ ID NO: 31051
  peptide (1)..(441): Ceres Seq. ID no. 12579469

SEQ ID NO: 34642 - DNA, 689 bp, Arabidopsis thaliana; identical to SEQ ID NO: 31052
  misc_feature (1)..(689): Ceres Seq. ID no. 12322670
  misc_feature (1)..(689): Ortholog of  Ceres SEQ ID NO 12609863 as cited in SEQ ID NO 52056
  misc_feature (1)..(689): Ortholog of  Ceres SEQ ID NO 13661859 as cited in SEQ ID NO 61611

SEQ ID NO: 34643 - protein, 167 aa, Arabidopsis thaliana; identical to SEQ ID NO: 31053
  peptide (1)..(167): Ceres Seq. ID no. 12322671

SEQ ID NO: 34644 - protein, 98 aa, Arabidopsis thaliana; identical to SEQ ID NO: 31054
  peptide (1)..(98): Ceres Seq. ID no. 12322672

SEQ ID NO: 34645 - DNA, 701 bp, Arabidopsis thaliana; identical to SEQ ID NO: 31055
  misc_feature (1)..(701): Ceres Seq. ID no. 13592829
  misc_feature (1)..(701): Ortholog of  Ceres SEQ ID NO 13661797 as cited in SEQ ID NO 61647

SEQ ID NO: 34646 - protein, 158 aa, Arabidopsis thaliana; identical to SEQ ID NO: 31056
  peptide (1)..(158): Ceres Seq. ID no. 15221171

SEQ ID NO: 34647 - protein, 144 aa, Arabidopsis thaliana; identical to SEQ ID NO: 31057
  peptide (1)..(144): Ceres Seq. ID no. 15221172

SEQ ID NO: 34648 - DNA, 960 bp, Arabidopsis thaliana; identical to SEQ ID NO: 31058
  misc_feature (1)..(960): Ceres Seq. ID no. 12339034
  misc_feature (1)..(960): Ortholog of  Ceres SEQ ID NO 13647648 as cited in SEQ ID NO 20346
  misc_feature (1)..(960): Ortholog of  Ceres SEQ ID NO 15179852 as cited in SEQ ID NO 66623

SEQ ID NO: 34649 - protein, 269 aa, Arabidopsis thaliana; identical to SEQ ID NO: 31059
  peptide (1)..(269): Ceres Seq. ID no. 12339035

SEQ ID NO: 34650 - protein, 255 aa, Arabidopsis thaliana; identical to SEQ ID NO: 31060
  peptide (1)..(255): Ceres Seq. ID no. 12339037

SEQ ID NO: 34651 - protein, 222 aa, Arabidopsis thaliana; identical to SEQ ID NO: 31061
  peptide (1)..(222): Ceres Seq. ID no. 12339038

SEQ ID NO: 34652 - DNA, 800 bp, Arabidopsis thaliana; identical to SEQ ID NO: 31062
  misc_feature (1)..(800): Ceres Seq. ID no. 12321377
  misc_feature (1)..(800): Ortholog of  Ceres SEQ ID NO 13598422 as cited in SEQ ID NO 68856

SEQ ID NO: 34653 - protein, 170 aa, Arabidopsis thaliana; identical to SEQ ID NO: 31063
  peptide (1)..(170): Ceres Seq. ID no. 12321378

SEQ ID NO: 34654 - protein, 121 aa, Arabidopsis thaliana; identical to SEQ ID NO: 31064
  peptide (1)..(121): Ceres Seq. ID no. 12321379

SEQ ID NO: 34655 - DNA, 999 bp, Arabidopsis thaliana; identical to SEQ ID NO: 31065
  misc_feature (1)..(999): Ceres Seq. ID no. 12321788
  misc_feature (1)..(999): Ortholog of  Ceres SEQ ID NO 14305591 as cited in SEQ ID NO 0

SEQ ID NO: 34656 - protein, 201 aa, Arabidopsis thaliana; identical to SEQ ID NO: 31066
  peptide (1)..(201): Ceres Seq. ID no. 12321789

SEQ ID NO: 34657 - protein, 146 aa, Arabidopsis thaliana; identical to SEQ ID NO: 31067
  peptide (1)..(146): Ceres Seq. ID no. 12321790

SEQ ID NO: 34658 - protein, 136 aa, Arabidopsis thaliana; identical to SEQ ID NO: 31068
  peptide (1)..(136): Ceres Seq. ID no. 12321791

SEQ ID NO: 34659 - DNA, 736 bp, Arabidopsis thaliana; identical to SEQ ID NO: 31069
  misc_feature (1)..(736): Ceres Seq. ID no. 13650656
  misc_feature (1)..(736): Ortholog of  Ceres SEQ ID NO 13581866 as cited in SEQ ID NO 52179
  misc_feature (1)..(736): Ortholog of  Ceres SEQ ID NO 14315451 as cited in SEQ ID NO 59289

SEQ ID NO: 34660 - protein, 166 aa, Arabidopsis thaliana; identical to SEQ ID NO: 29350
  peptide (1)..(166): Ceres Seq. ID no. 13650657

SEQ ID NO: 34661 - DNA, 750 bp, Arabidopsis thaliana; identical to SEQ ID NO: 31071
  misc_feature (1)..(750): Ceres Seq. ID no. 13500273
  misc_feature (1)..(750): Ortholog of  Ceres SEQ ID NO 14309169 as cited in SEQ ID NO 0

SEQ ID NO: 34662 - protein, 170 aa, Arabidopsis thaliana; identical to SEQ ID NO: 31072
  peptide (1)..(170): Ceres Seq. ID no. 13500274

SEQ ID NO: 34663 - protein, 148 aa, Arabidopsis thaliana; identical to SEQ ID NO: 31073
  peptide (1)..(148): Ceres Seq. ID no. 13500275

SEQ ID NO: 34664 - DNA, 1112 bp, Arabidopsis thaliana; identical to SEQ ID NO: 31074
  misc_feature (1)..(1112): Ceres Seq. ID no. 12396985
  misc_feature (1)..(1112): Ortholog of  Ceres SEQ ID NO 15179996 as cited in SEQ ID NO 0

SEQ ID NO: 34665 - protein, 302 aa, Arabidopsis thaliana; identical to SEQ ID NO: 31075
  peptide (1)..(302): Ceres Seq. ID no. 12396986

SEQ ID NO: 34666 - protein, 188 aa, Arabidopsis thaliana; identical to SEQ ID NO: 31076
  peptide (1)..(188): Ceres Seq. ID no. 12396987

SEQ ID NO: 34667 - protein, 172 aa, Arabidopsis thaliana; identical to SEQ ID NO: 31077
  peptide (1)..(172): Ceres Seq. ID no. 12396988

SEQ ID NO: 34668 - DNA, 1838 bp, Arabidopsis thaliana; identical to SEQ ID NO: 31078
  misc_feature (1)..(1838): Ceres Seq. ID no. 12322952
  misc_feature (1)..(1838): Ortholog of  Ceres SEQ ID NO 15173355 as cited in SEQ ID NO 61844

SEQ ID NO: 34669 - protein, 377 aa, Arabidopsis thaliana; identical to SEQ ID NO: 31079
  peptide (1)..(377): Ceres Seq. ID no. 12322953

SEQ ID NO: 34670 - protein, 355 aa, Arabidopsis thaliana; identical to SEQ ID NO: 31080
  peptide (1)..(355): Ceres Seq. ID no. 12322954

SEQ ID NO: 34671 - protein, 245 aa, Arabidopsis thaliana; identical to SEQ ID NO: 31081
  peptide (1)..(245): Ceres Seq. ID no. 12322955

SEQ ID NO: 34672 - DNA, 699 bp, Arabidopsis thaliana; identical to SEQ ID NO: 31082
  misc_feature (1)..(699): Ceres Seq. ID no. 12322132
  misc_feature (1)..(699): Ortholog of  Ceres SEQ ID NO 13594979 as cited in SEQ ID NO 56172

SEQ ID NO: 34673 - protein, 117 aa, Arabidopsis thaliana; identical to SEQ ID NO: 31083
  peptide (1)..(117): Ceres Seq. ID no. 12322133

SEQ ID NO: 34674 - DNA, 687 bp, Arabidopsis thaliana; identical to SEQ ID NO: 31084
  misc_feature (1)..(687): Ceres Seq. ID no. 13499600
  misc_feature (1)..(687): Ortholog of  Ceres SEQ ID NO 13598157 as cited in SEQ ID NO 61570

SEQ ID NO: 34675 - protein, 111 aa, Arabidopsis thaliana; identical to SEQ ID NO: 31085
  peptide (1)..(111): Ceres Seq. ID no. 13499601

SEQ ID NO: 34676 - DNA, 1390 bp, Arabidopsis thaliana; identical to SEQ ID NO: 31086
  misc_feature (1)..(1390): Ceres Seq. ID no. 12489610
  misc_feature (1)..(1390): Ortholog of  Ceres SEQ ID NO 15176596 as cited in SEQ ID NO 55168
  misc_feature (1)..(1390): Ortholog of  Ceres SEQ ID NO 14301576 as cited in SEQ ID NO 62362

SEQ ID NO: 34677 - protein, 369 aa, Arabidopsis thaliana; identical to SEQ ID NO: 31087
  peptide (1)..(369): Ceres Seq. ID no. 12489611

SEQ ID NO: 34678 - protein, 365 aa, Arabidopsis thaliana; identical to SEQ ID NO: 31088
  peptide (1)..(365): Ceres Seq. ID no. 12489612

SEQ ID NO: 34679 - protein, 255 aa, Arabidopsis thaliana; identical to SEQ ID NO: 31089
  peptide (1)..(255): Ceres Seq. ID no. 12489613

SEQ ID NO: 34680 - DNA, 1195 bp, Arabidopsis thaliana; identical to SEQ ID NO: 31090
  misc_feature (1)..(1195): Ceres Seq. ID no. 12333949
  misc_feature (1)..(1195): Ortholog of  Ceres SEQ ID NO 15227260 as cited in SEQ ID NO 69285

SEQ ID NO: 34681 - protein, 222 aa, Arabidopsis thaliana; identical to SEQ ID NO: 31091
  peptide (1)..(222): Ceres Seq. ID no. 12333950

SEQ ID NO: 34682 - protein, 213 aa, Arabidopsis thaliana; identical to SEQ ID NO: 31092
  peptide (1)..(213): Ceres Seq. ID no. 12333951

SEQ ID NO: 34683 - protein, 195 aa, Arabidopsis thaliana; identical to SEQ ID NO: 31093
  peptide (1)..(195): Ceres Seq. ID no. 12333952

SEQ ID NO: 34684 - DNA, 761 bp, Arabidopsis thaliana; identical to SEQ ID NO: 31094
  misc_feature (1)..(761): Ceres Seq. ID no. 12397086
  misc_feature (1)..(761): Ortholog of  Ceres SEQ ID NO 13596727 as cited in SEQ ID NO 63000

SEQ ID NO: 34685 - protein, 178 aa, Arabidopsis thaliana; identical to SEQ ID NO: 31095
  peptide (1)..(178): Ceres Seq. ID no. 12397087

SEQ ID NO: 34686 - protein, 158 aa, Arabidopsis thaliana; identical to SEQ ID NO: 31096
  peptide (1)..(158): Ceres Seq. ID no. 12397088

SEQ ID NO: 34687 - protein, 115 aa, Arabidopsis thaliana; identical to SEQ ID NO: 31097
  peptide (1)..(115): Ceres Seq. ID no. 12397089

SEQ ID NO: 34688 - DNA, 1684 bp, Arabidopsis thaliana; identical to SEQ ID NO: 31098
  misc_feature (1)..(1684): Ceres Seq. ID no. 13497681
  misc_feature (1)..(1684): Ortholog of  Ceres SEQ ID NO 13597334 as cited in SEQ ID NO 64244
  misc_feature (1)..(1684): Ortholog of  Ceres SEQ ID NO 14303165 as cited in SEQ ID NO 65181
  misc_feature (1)..(1684): Ortholog of  Ceres SEQ ID NO 15224550 as cited in SEQ ID NO 0

SEQ ID NO: 34689 - protein, 409 aa, Arabidopsis thaliana; identical to SEQ ID NO: 31099
  peptide (1)..(409): Ceres Seq. ID no. 13497682

SEQ ID NO: 34690 - protein, 366 aa, Arabidopsis thaliana; identical to SEQ ID NO: 31100
  peptide (1)..(366): Ceres Seq. ID no. 13497683

SEQ ID NO: 34691 - protein, 318 aa, Arabidopsis thaliana; identical to SEQ ID NO: 31101
  peptide (1)..(318): Ceres Seq. ID no. 13497684

SEQ ID NO: 34692 - DNA, 1241 bp, Arabidopsis thaliana; identical to SEQ ID NO: 31102
  misc_feature (1)..(1241): Ceres Seq. ID no. 12321288
  misc_feature (1)..(1241): Ortholog of  Ceres SEQ ID NO 15177091 as cited in SEQ ID NO 52140
  misc_feature (1)..(1241): Ortholog of  Ceres SEQ ID NO 15172539 as cited in SEQ ID NO 57333
  misc_feature (1)..(1241): Ortholog of  Ceres SEQ ID NO 14315951 as cited in SEQ ID NO 57634
  misc_feature (1)..(1241): Ortholog of  Ceres SEQ ID NO 13597324 as cited in SEQ ID NO 64842
  misc_feature (1)..(1241): Ortholog of  Ceres SEQ ID NO 13658672 as cited in SEQ ID NO 66627

SEQ ID NO: 34693 - protein, 296 aa, Arabidopsis thaliana; identical to SEQ ID NO: 31103
  peptide (1)..(296): Ceres Seq. ID no. 12321289

SEQ ID NO: 34694 - protein, 155 aa, Arabidopsis thaliana; identical to SEQ ID NO: 31104
  peptide (1)..(155): Ceres Seq. ID no. 12321290

SEQ ID NO: 34695 - DNA, 2221 bp, Arabidopsis thaliana; identical to SEQ ID NO: 31105
  misc_feature (1)..(2221): Ceres Seq. ID no. 13645720
  misc_feature (1)..(2221): Ortholog of  Ceres SEQ ID NO 13657677 as cited in SEQ ID NO 66119

SEQ ID NO: 34696 - protein, 630 aa, Arabidopsis thaliana; identical to SEQ ID NO: 31106
  peptide (1)..(630): Ceres Seq. ID no. 13645721

SEQ ID NO: 34697 - protein, 559 aa, Arabidopsis thaliana; identical to SEQ ID NO: 31107
  peptide (1)..(559): Ceres Seq. ID no. 13645722

SEQ ID NO: 34698 - protein, 537 aa, Arabidopsis thaliana; identical to SEQ ID NO: 31108
  peptide (1)..(537): Ceres Seq. ID no. 13645723

SEQ ID NO: 34699 - DNA, 1043 bp, Arabidopsis thaliana; identical to SEQ ID NO: 31109
  misc_feature (1)..(1043): Ceres Seq. ID no. 12327203
  misc_feature (1)..(1043): Ortholog of  Ceres SEQ ID NO 13594080 as cited in SEQ ID NO 55001
  misc_feature (1)..(1043): Ortholog of  Ceres SEQ ID NO 13587495 as cited in SEQ ID NO 0

SEQ ID NO: 34700 - protein, 222 aa, Arabidopsis thaliana; identical to SEQ ID NO: 31110
  peptide (1)..(222): Ceres Seq. ID no. 12327204

SEQ ID NO: 34701 - protein, 221 aa, Arabidopsis thaliana; identical to SEQ ID NO: 31111
  peptide (1)..(221): Ceres Seq. ID no. 12327205

SEQ ID NO: 34702 - protein, 126 aa, Arabidopsis thaliana; identical to SEQ ID NO: 31112
  peptide (1)..(126): Ceres Seq. ID no. 12327206

SEQ ID NO: 34703 - DNA, 573 bp, Arabidopsis thaliana
  misc_feature (1)..(573): Ceres Seq. ID no. 12397113
  misc_feature (1)..(573): Ortholog of  Ceres SEQ ID NO 12582657 as cited in SEQ ID NO 51070
actagaaattttgtctctctcgccgccttgcgaaaagcattttcgatcttactcttaggataaaaaaatgtcgacagttggagagcttgcttgcagctacgctgttatgatcctcgaggacgagggtatcgctatcacggctgacaaaatcgcgaccttggtgaaagctgctggtgttagtattgagtcatactggccaatgctattcgccaagatggctgagaaacgtaacgtgactgatctcatcatgaacgttggtgctggtggtggaggtggtgctccggttgcagctgctgctccagctgctggcggtggtgcggcagctgctcctgctgctgaggagaagaagaaggatgagccagcagaagagagtgacggagatttgggtttcggtttgtttgactaaacgcagtcacttgtctttcttctttgtagttggatattggagactatattttgtcgtatgagttattattacttgtttgatctggctaaaggactattagttggtttatgatgcgtatgttgtataactcaagtttcctagcaaaccaatcggctcgggcttttgtt

SEQ ID NO: 34704 - protein, 112 aa, Arabidopsis thaliana; identical to SEQ ID NO: 29961
  peptide (1)..(112): Ceres Seq. ID no. 12397114

SEQ ID NO: 34705 - protein, 99 aa, Arabidopsis thaliana; identical to SEQ ID NO: 29962
  peptide (1)..(99): Ceres Seq. ID no. 12397115

SEQ ID NO: 34706 - protein, 68 aa, Arabidopsis thaliana; identical to SEQ ID NO: 29963
  peptide (1)..(68): Ceres Seq. ID no. 12397116

SEQ ID NO: 34707 - DNA, 654 bp, Arabidopsis thaliana
  misc_feature (1)..(654): Ceres Seq. ID no. 12397117
  misc_feature (1)..(654): Ortholog of  Ceres SEQ ID NO 13638769 as cited in SEQ ID NO 51773
  misc_feature (1)..(654): Ortholog of  Ceres SEQ ID NO 12583723 as cited in SEQ ID NO 58297
  misc_feature (1)..(654): Ortholog of  Ceres SEQ ID NO 12623263 as cited in SEQ ID NO 60988
  misc_feature (1)..(654): Ortholog of  Ceres SEQ ID NO 15225568 as cited in SEQ ID NO 61512
  misc_feature (1)..(654): Ortholog of  Ceres SEQ ID NO 13664236 as cited in SEQ ID NO 66530
  misc_feature (1)..(654): Ortholog of  Ceres SEQ ID NO 13590249 as cited in SEQ ID NO 68385
  misc_feature (1)..(654): Ortholog of  Ceres SEQ ID NO 12635807 as cited in SEQ ID NO 0
  misc_feature (1)..(654): Ortholog of  Ceres SEQ ID NO 15179245 as cited in SEQ ID NO 0
atttttttttttttcacaaagccacaccaactcactcacaaaatctgtagaatcatctttcaacaatggcttccactgctctctccagcgcaatcgtaagcacctctttcctccgccgtcaacagacaccaatcagcctcagatccctcccgtttgccaacacacaatctctcttcggcctcaaatcttccaccgctcgcggcggccgcgtcacggccatggctacctacaaggtcaagttcatcacacctgagggagaacaagaggtcgaatgcgaagaagatgtctacgtcctcgacgctgctgaggaagccggactcgacttgccctactcatgccgtgccggttcttgctcaagttgcgccgggaaagtcgtctctggttctattgaccagtcggaccagagcttcttagacgatgaacagatgagtgagggctatgtcttgacctgtgtggcttatccgacttctgatgtcgtcatcgaaacccacaaagaagaagccattatgtaaaattttaaagctttttgatgaatttcatcaaaagagaaattacttgatgtttaagtcatctctcttgttacttcgctaatgttgccctaatttggctcatccttttataagatcaatcaataataacaaatttcaatgtttt

SEQ ID NO: 34708 - protein, 148 aa, Arabidopsis thaliana
  peptide (1)..(148): Ceres Seq. ID no. 12397118
MASTALSSAIVSTSFLRRQQTPISLRSLPFANTQSLFGLKSSTARGGRVTAMATYKVKFITPEGEQEVECEEDVYVLDAAEEAGLDLPYSCRAGSCSSCAGKVVSGSIDQSDQSFLDDEQMSEGYVLTCVAYPTSDVVIETHKEEAIM

SEQ ID NO: 34709 - protein, 97 aa, Arabidopsis thaliana
  peptide (1)..(97): Ceres Seq. ID no. 12397119
MATYKVKFITPEGEQEVECEEDVYVLDAAEEAGLDLPYSCRAGSCSSCAGKVVSGSIDQSDQSFLDDEQMSEGYVLTCVAYPTSDVVIETHKEEAIM

SEQ ID NO: 34710 - protein, 83 aa, Arabidopsis thaliana
  peptide (1)..(83): Ceres Seq. ID no. 12397120
FFFFSQSHTNSLTKSVESSFNNGFHCSLQRNRKHLFPPPSTDTNQPQIPPVCQHTISLRPQIFHRSRRPRHGHGYLQGQVHHT

SEQ ID NO: 34711 - DNA, 1809 bp, Arabidopsis thaliana; identical to SEQ ID NO: 23714
  misc_feature (1)..(1809): Ceres Seq. ID no. 13591810
  misc_feature (1)..(1809): Ortholog of  Ceres SEQ ID NO 13600220 as cited in SEQ ID NO 0

SEQ ID NO: 34712 - protein, 541 aa, Arabidopsis thaliana; identical to SEQ ID NO: 23715
  peptide (1)..(541): Ceres Seq. ID no. 13591811

SEQ ID NO: 34713 - protein, 537 aa, Arabidopsis thaliana; identical to SEQ ID NO: 23716
  peptide (1)..(537): Ceres Seq. ID no. 13591812

SEQ ID NO: 34714 - protein, 438 aa, Arabidopsis thaliana; identical to SEQ ID NO: 23717
  peptide (1)..(438): Ceres Seq. ID no. 13591813

SEQ ID NO: 34715 - DNA, 762 bp, Arabidopsis thaliana
  misc_feature (1)..(762): Ceres Seq. ID no. 13593421
  misc_feature (1)..(762): Ortholog of  Ceres SEQ ID NO 12635516 as cited in SEQ ID NO 0
  misc_feature (1)..(762): Ortholog of  Ceres SEQ ID NO 15179376 as cited in SEQ ID NO 0
ctctcacaagtcaccaccatttctctctagaaaaaatctgaaaaacaaaaccatctcaaagtttcttgagaagaaaaaaagggtcaagaaagatgcctaaagacaggaatatcggaatcgccatggatttctcagagagcagcaagaacgctctgaaatgggcgatcgagaacttagcagacaaaggagacacgatttacatcatccacactctaccactctctggcgatgaatctcgtaactccctctggttcaaatccggttctcctctcataccgttggagagtttagggaaccggagattatggagaaatacggtgtcaaaaccgacatcgcatgtcttgatatgctcgacactggttcgaggcagaaagaggtgcatgtagtgaccaagttatactggggagatgcaagagagaagcttgttgatgctgttaaagatcttaaactcgattctattgtcatgggaagcagaggactcagtgctcttcaaaggataataatgggaagcgtgagcagctttgtgatccaacacgcgccttgccctgtcaccgttgtcaaggataacgaataaacgattctcactacaaaaaaaaaaaaaaaactgtctttatcttataagtcctaccaaataatcatcgcaatttatgctttttagtttttattaataaaagaatctttatgttggttttatttgtaatttgactacaacaaaaaaagaacccagagtgttttcatcttctagttttgagagtttcttgc

SEQ ID NO: 34716 - protein, 97 aa, Arabidopsis thaliana
  peptide (1)..(97): Ceres Seq. ID no. 13593422
MPKDRNIGIAMDFSESSKNALKWAIENLADKGDTIYIIHTLPLSGDESRNSLWFKSGSPLIPLESLGNRRLWRNTVSKPTSHVLICSTLVRGRKRCM

SEQ ID NO: 34717 - protein, 89 aa, Arabidopsis thaliana
  peptide (1)..(89): Ceres Seq. ID no. 13593423
MEKYGVKTDIACLDMLDTGSRQKEVHVVTKLYWGDAREKLVDAVKDLKLDSIVMGSRGLSALQRIIMGSVSSFVIQHAPCPVTVVKDNE

SEQ ID NO: 34718 - protein, 87 aa, Arabidopsis thaliana
  peptide (1)..(87): Ceres Seq. ID no. 13593424
MDFSESSKNALKWAIENLADKGDTIYIIHTLPLSGDESRNSLWFKSGSPLIPLESLGNRRLWRNTVSKPTSHVLICSTLVRGRKRCM

SEQ ID NO: 34719 - DNA, 871 bp, Arabidopsis thaliana
  misc_feature (1)..(871): Ceres Seq. ID no. 15178443
  misc_feature (1)..(871): Ortholog of  Ceres SEQ ID NO 12557850 as cited in SEQ ID NO 65
  misc_feature (1)..(871): Ortholog of  Ceres SEQ ID NO 14312702 as cited in SEQ ID NO 0
ctccctggaacaccgaagctctggattaacctattttcaccttctaaggttcttcgtcgttcttattgatctgtgaagatgtattcgggtcagaacaagatccacaaggataagggtgttgcaccaacagagtttgaagagcaagttactcaggctttgtttgacttggagaacaccaaccaggagttgaaaagcgagttgaaagatctctacattaaccaagctgttcagatggatatttctggcaaccgcaaagctgttgtgatctacgttccattcaggctgaggaaagctttccgcaagattcatcttcgtctggtcagagagcttgagaagaagttcagtggaaaagatgtgatctttgttgctaccagaagaatcatgcgcccaccaaagaaaggctcagctgttcagagaccacgcaacagaactcttacttctgtccatgaagccatgctcgaggatgtcgcttaccctgctgagattgtaggaaagagaaccagataccgtcttgatggcaccaagatcatgaaggtatttttggatagtaagctaaagaacgacactgagtacaagctggagacaatggtgggtgtgtacaggaaacttacagggaaagatgtagttttcgagtacccagtcatagaagcttgaagagatgaatgtttgtttcattcttttttgtcggatagagagcttttgattctgtttgggagtaaaactctttgcaaagattttgttatttcagcatttcgcaatctcttcttcaaagttcgatttatcgatacaattcttttttcctactagcattcatagtttcaaaaacaaaagtttcaaataattccaggttaaatttataatttttgagcac

SEQ ID NO: 34720 - protein, 191 aa, Arabidopsis thaliana; identical to SEQ ID NO: 21551
  peptide (1)..(191): Ceres Seq. ID no. 15178444

SEQ ID NO: 34721 - protein, 140 aa, Arabidopsis thaliana; identical to SEQ ID NO: 21552
  peptide (1)..(140): Ceres Seq. ID no. 15178445

SEQ ID NO: 34722 - DNA, 1056 bp, Arabidopsis thaliana
  misc_feature (1)..(1056): Ceres Seq. ID no. 12327024
  misc_feature (1)..(1056): Ortholog of  Ceres SEQ ID NO 14307296 as cited in SEQ ID NO 53966
gatgggtgataggaaacaaacacacatacgtcatcatcatccttaatttctatttctccttcttcttcatcatcaatatcaatctcatcttccactactcctcccctctaacaataagcagcatctctataatccctaagattcacaatggagcttggaggaaaatgcaatgcaattacaaccacaacaataatctcaacagaagtaaagccacatacggatccggaaccagaagccaaacccgaatcagatccatccatggctttattcccgatcaagaaagaaaaccaaaaaccaaagacacgtgtcgaccaaggagctaagtaccgggaatgtcagaagaaccacgcggcctcaaccggaggacacgtggtggacggatgctgcgagttcatggccggcggagaagaaggtacactcggtgctttaaaatgcgccgcctgtaactgtcaccggagcttccaccggaaagaagtgtacggacacatgaacagtaaacaagattatcagctgatgataactccggcgttttacagcagtaacagctcgtacaagccacgtgtaatgcatccaacgggtgagattggacggaggacttcatcttcaagcgaggatatgaagaagattctgagtcatcgtaaccaaaacgttgatgggaaaagtttgatgatgatgatgatgaggaagaagaagagagtgaggacaaagatcaatgaagaacaaaaggagaagatgaaggaatttgcagagagattagggtggaggatgcagaagaaagatgaagaagagattgataagttttgtaggatggtgaatctgaggagacaagtttttaaggtttggatgcataataacaagcaagcaatgaagagaaacaatagtaacattagtgaatagtttgatgatctgataaaagtgaaataaatttttacaatcctgttttgcttttatatataatttttgcccttcaaattattcaaaatcttgagtataaatctgtggaatcttgtatgttttgattgttttatattgtatctgggattatttttttctttt

SEQ ID NO: 34723 - protein, 249 aa, Arabidopsis thaliana
  peptide (1)..(249): Ceres Seq. ID no. 12327025
MELGGKCNAITTTTIISTEVKPHTDPEPEAKPESDPSMALFPIKKENQKPKTRVDQGAKYRECQKNHAASTGGHVVDGCCEFMAGGEEGTLGALKCAACNCHRSFHRKEVYGHMNSKQDYQLMITPAFYSSNSSYKPRVMHPTGEIGRRTSSSSEDMKKILSHRNQNVDGKSLMMMMMRKKKRVRTKINEEQKEKMKEFAERLGWRMQKKDEEEIDKFCRMVNLRRQVFKVWMHNNKQAMKRNNSNISE

SEQ ID NO: 34724 - protein, 212 aa, Arabidopsis thaliana
  peptide (1)..(212): Ceres Seq. ID no. 12327026
MALFPIKKENQKPKTRVDQGAKYRECQKNHAASTGGHVVDGCCEFMAGGEEGTLGALKCAACNCHRSFHRKEVYGHMNSKQDYQLMITPAFYSSNSSYKPRVMHPTGEIGRRTSSSSEDMKKILSHRNQNVDGKSLMMMMMRKKKRVRTKINEEQKEKMKEFAERLGWRMQKKDEEEIDKFCRMVNLRRQVFKVWMHNNKQAMKRNNSNISE

SEQ ID NO: 34725 - protein, 167 aa, Arabidopsis thaliana
  peptide (1)..(167): Ceres Seq. ID no. 12327027
MAGGEEGTLGALKCAACNCHRSFHRKEVYGHMNSKQDYQLMITPAFYSSNSSYKPRVMHPTGEIGRRTSSSSEDMKKILSHRNQNVDGKSLMMMMMRKKKRVRTKINEEQKEKMKEFAERLGWRMQKKDEEEIDKFCRMVNLRRQVFKVWMHNNKQAMKRNNSNISE

SEQ ID NO: 34726 - DNA, 920 bp, Arabidopsis thaliana
  misc_feature (1)..(920): Ceres Seq. ID no. 13504388
  misc_feature (1)..(920): Ortholog of  Ceres SEQ ID NO 12780822 as cited in SEQ ID NO 67471
atctctcttgtcatcacaacaaaattttgccttggcttgcgaaaaaaggagatcaagtgatcatatggaggaagaacaagtaagagcaattaagataatagtatttggagtcatctcatggggtgtggccttcattctcacccggagaatcttctcaagctactcattcagcttcagcaaccgtcttctctccacggctcacgcgactatcgctgtcactttagcaacactctctgttcaagatttgtcttgccctgtttgtccccttgcttctaagccatctcataaacagatggacgtgatggcgttttcgttgtcgtacatgatctacgatctaatatgttgtcatttcgatcaagtgtttagcattgataacgcggttcatcatttcgttagcattcttggttttatagctggacttgcataccaaaagtctggatctgagatcgtggctacactgtgggtagcagagatatcaagtccttttttccaccttagggagattctcaaagagattggatacaaagacaccaaactcaatctagctgccgatgtgtgttttgccactatattcacattggcgagaattgtgtgtggacctttcctcgtttacgtcagtctatcagctgataatcccatcttcatcaaggcaatgggatcaggattacaactcgtgagcatcttttggttctataaaattttcgggatgatgagatataaactttttaagaagccaaagtcaaacaaaaagtctacttagcttagttagagatatacaaaagctgattcaatccaaatatttttttcttatttttatttatggtcatttatctattttattaaaatgtattaataaaataacgaaaacaaaaaggaaagagacatacatgtgagacaaccgactttgaaatgtcttgttt

SEQ ID NO: 34727 - protein, 252 aa, Arabidopsis thaliana
  peptide (1)..(252): Ceres Seq. ID no. 13504389
SLLSSQQNFALACEKRRSSDHMEEEQVRAIKIIVFGVISWGVAFILTRRIFSSYSFSFSNRLLSTAHATIAVTLATLSVQDLSCPVCPLASKPSHKQMDVMAFSLSYMIYDLICCHFDQVFSIDNAVHHFVSILGFIAGLAYQKSGSEIVATLWVAEISSPFFHLREILKEIGYKDTKLNLAADVCFATIFTLARIVCGPFLVYVSLSADNPIFIKAMGSGLQLVSIFWFYKIFGMMRYKLFKKPKSNKKST

SEQ ID NO: 34728 - protein, 231 aa, Arabidopsis thaliana
  peptide (1)..(231): Ceres Seq. ID no. 13504390
MEEEQVRAIKIIVFGVISWGVAFILTRRIFSSYSFSFSNRLLSTAHATIAVTLATLSVQDLSCPVCPLASKPSHKQMDVMAFSLSYMIYDLICCHFDQVFSIDNAVHHFVSILGFIAGLAYQKSGSEIVATLWVAEISSPFFHLREILKEIGYKDTKLNLAADVCFATIFTLARIVCGPFLVYVSLSADNPIFIKAMGSGLQLVSIFWFYKIFGMMRYKLFKKPKSNKKST

SEQ ID NO: 34729 - protein, 155 aa, Arabidopsis thaliana
  peptide (1)..(155): Ceres Seq. ID no. 13504391
MDVMAFSLSYMIYDLICCHFDQVFSIDNAVHHFVSILGFIAGLAYQKSGSEIVATLWVAEISSPFFHLREILKEIGYKDTKLNLAADVCFATIFTLARIVCGPFLVYVSLSADNPIFIKAMGSGLQLVSIFWFYKIFGMMRYKLFKKPKSNKKST

SEQ ID NO: 34730 - DNA, 1417 bp, Arabidopsis thaliana
  misc_feature (1)..(1417): Ceres Seq. ID no. 12396117
  misc_feature (1)..(1417): Ortholog of  Ceres SEQ ID NO 15177654 as cited in SEQ ID NO 59933
  misc_feature (1)..(1417): Ortholog of  Ceres SEQ ID NO 14303600 as cited in SEQ ID NO 64632
  misc_feature (1)..(1417): Ortholog of  Ceres SEQ ID NO 14302776 as cited in SEQ ID NO 66919
aaatctcaccttctctctccctctctataacaaacattaatacacacaccaaaaaaaaaacctgtttatgtctcaaagatctctgattcctcattcttcttctatagcttttggtctccattctcatctcttaatctccagtgagatcagctccaattctaactggtctctctaaataaaaaacagaaataaaaatccaacctttttcaattttcgttcaattttcccggaaaaaaaagcgatccttttgatttttcgatttctccaagtaacaattcaaaatgggtctaaagggttttgctgaaggaggaatagcttcgattgttgcgggttgttcgacccacccgcttgatctaatcaaggtccgaatgcaacttcaaggcgaatcagctccgattcaaaccaatctccgaccagctcttgcttttcagacttcgaccaccgtcaacgcgcctcctctacgtgttggtgtaatcggagtcggatctcgtttaataagagaagaaggcatgcgtgctctgttttccggcgtctccgccaccgttcttcgtcaaactctgtattcaacgactcgtatgggtttatacgacatcatcaaaggagaatggaccgacccggaaacaaaaacgatgcctttaatgaaaaaaatcggtgccggagccatcgccggagcaatcggagccgccgttgggaatcctgctgacgtggcgatggtgaggatgcaagccgatggtcgtttaccgttgactgatagaagaaactacaaaagcgttttagacgcgatcacgcaaatgattcgcggtgaaggcgttacgtcgttgtggagaggatcgtctttgacgataaacagagcaatgcttgtgacgtcatcgcagttggcttcgtatgattctgttaaagagacgattttggagaaagggttgttgaaagatgggcttgggactcatgtgtcggcgagtttcgcggcggggtttgttgcgagcgttgcgagtaatcctgttgatgtgattaagacgagagtgatgaatatgaaggtggtggctggagttgctccgccgtataaaggagcggttgattgtgctttgaaaacggtgaaagcggaagggattatgtctttgtataaaggttttatcccgacggtttcgagacaagcaccgttcacggtggttttgtttgttacgcttgaacaagttaagaagttgttcaaggactatgacttttgaaaaaaacaagagttgaattatgttgaagaagatgaatgatggtggcgacaataagcttctctttttttctggttataattttcttttgattatttgagtagttttaaattgtttcccatttgttggaatagatctatgatatgataattcttctcatggagaagaaagaaagaaagaaacagttcatttgatcc

SEQ ID NO: 34731 - protein, 313 aa, Arabidopsis thaliana
  peptide (1)..(313): Ceres Seq. ID no. 12396118
MGLKGFAEGGIASIVAGCSTHPLDLIKVRMQLQGESAPIQTNLRPALAFQTSTTVNAPPLRVGVIGVGSRLIREEGMRALFSGVSATVLRQTLYSTTRMGLYDIIKGEWTDPETKTMPLMKKIGAGAIAGAIGAAVGNPADVAMVRMQADGRLPLTDRRNYKSVLDAITQMIRGEGVTSLWRGSSLTINRAMLVTSSQLASYDSVKETILEKGLLKDGLGTHVSASFAAGFVASVASNPVDVIKTRVMNMKVVAGVAPPYKGAVDCALKTVKAEGIMSLYKGFIPTVSRQAPFTVVLFVTLEQVKKLFKDYDF

SEQ ID NO: 34732 - protein, 284 aa, Arabidopsis thaliana
  peptide (1)..(284): Ceres Seq. ID no. 12396119
MQLQGESAPIQTNLRPALAFQTSTTVNAPPLRVGVIGVGSRLIREEGMRALFSGVSATVLRQTLYSTTRMGLYDIIKGEWTDPETKTMPLMKKIGAGAIAGAIGAAVGNPADVAMVRMQADGRLPLTDRRNYKSVLDAITQMIRGEGVTSLWRGSSLTINRAMLVTSSQLASYDSVKETILEKGLLKDGLGTHVSASFAAGFVASVASNPVDVIKTRVMNMKVVAGVAPPYKGAVDCALKTVKAEGIMSLYKGFIPTVSRQAPFTVVLFVTLEQVKKLFKDYDF

SEQ ID NO: 34733 - protein, 237 aa, Arabidopsis thaliana
  peptide (1)..(237): Ceres Seq. ID no. 12396120
MRALFSGVSATVLRQTLYSTTRMGLYDIIKGEWTDPETKTMPLMKKIGAGAIAGAIGAAVGNPADVAMVRMQADGRLPLTDRRNYKSVLDAITQMIRGEGVTSLWRGSSLTINRAMLVTSSQLASYDSVKETILEKGLLKDGLGTHVSASFAAGFVASVASNPVDVIKTRVMNMKVVAGVAPPYKGAVDCALKTVKAEGIMSLYKGFIPTVSRQAPFTVVLFVTLEQVKKLFKDYDF

SEQ ID NO: 34734 - DNA, 1467 bp, Arabidopsis thaliana
  misc_feature (1)..(1467): Ceres Seq. ID no. 12396346
  misc_feature (1)..(1467): Ortholog of  Ceres SEQ ID NO 13594068 as cited in SEQ ID NO 58624
aaaattcatcgatgacggatcctcccagacccgacccgtttcctgttacccgactcgattccgacgccggtgctctcttcgtcctccaatcaaaaggcgagtggtggcacgccggatttcatctaacgacggcgattgttggtccgacgatattgacattaccatatgcgtttagaggattaggatggtggttagggtttgtttgtttaacgacgatgggactcgttactttctacgcttattacctcatgtctaaggttcttgatcactgtgaaaaatccggccgccgtcacatccgtttccgggaactcgccgccgatgttcttggatctggattgatgttttatgtagtgatctttattcaaacagctatcaacactggaattggtattggcgccattctacttgcaggtcaatgtcttgatataatgtattcgagtcttttcccgcaaggaacgttgaagctttacgagttcattgctatggtgactgttgtgatgatggttctctcacagcttccaagttttcactctcttagacacattaactgtgcgtctctgcttctcagcttaggatatactttcctcgtcgttggggcttgtatcaacctaggtttgtcgaaaaacgctcctaaacgtgagtattctctagagcattcggattcagggaaagtttttagtgccttcacatcaatttcgatcatagctgctattttcggaaatggaatcttacccgaaatacaggcaactcttgctccaccagccacagggaagatgttgaaaggactattgttgtgttatagtgtgatcttcttcacgttttactctgctgcaatttcgggatattgggtttttggtaacaattcgagctctaatatcctcaagaacttaatgcctgatgaaggaccgactctggctcctatcgtggtgattggcttagctgtcatctttgtccttcttcagcttttcgccattggccttgtgtattctcaagttgcgtatgaaataatggagaagaaatcagcggatacaacaaaagggatattctcaaaacgcaaccttgtgccgcgtttgatactaagaacactatatatggcgttttgcgggttcatggcagcgatgctaccgttctttggggatataaacgcggtggtaggagcgtttgggtttatcccactcgatttcgtgctgccaatgcttctatacaacatgacctataagccaaccagacggagcttcacgtattggataaacatgacgataatggttgtgttcacttgtgcaggactcatgggagctttctcctccattaggaaacttgttcttgatgctaataagttcaagttgtttagcagtgaagttgttgattagatggttttgatagtgtgataaaaacataaacaatacttgttttgtggttacacttgtacatgaatttctcgagttgattcattatcacacaaaatgc

SEQ ID NO: 34735 - protein, 455 aa, Arabidopsis thaliana
  peptide (1)..(455): Ceres Seq. ID no. 12396347
NSSMTDPPRPDPFPVTRLDSDAGALFVLQSKGEWWHAGFHLTTAIVGPTILTLPYAFRGLGWWLGFVCLTTMGLVTFYAYYLMSKVLDHCEKSGRRHIRFRELAADVLGSGLMFYVVIFIQTAINTGIGIGAILLAGQCLDIMYSSLFPQGTLKLYEFIAMVTVVMMVLSQLPSFHSLRHINCASLLLSLGYTFLVVGACINLGLSKNAPKREYSLEHSDSGKVFSAFTSISIIAAIFGNGILPEIQATLAPPATGKMLKGLLLCYSVIFFTFYSAAISGYWVFGNNSSSNILKNLMPDEGPTLAPIVVIGLAVIFVLLQLFAIGLVYSQVAYEIMEKKSADTTKGIFSKRNLVPRLILRTLYMAFCGFMAAMLPFFGDINAVVGAFGFIPLDFVLPMLLYNMTYKPTRRSFTYWINMTIMVVFTCAGLMGAFSSIRKLVLDANKFKLFSSEVVD

SEQ ID NO: 34736 - protein, 452 aa, Arabidopsis thaliana
  peptide (1)..(452): Ceres Seq. ID no. 12396348
MTDPPRPDPFPVTRLDSDAGALFVLQSKGEWWHAGFHLTTAIVGPTILTLPYAFRGLGWWLGFVCLTTMGLVTFYAYYLMSKVLDHCEKSGRRHIRFRELAADVLGSGLMFYVVIFIQTAINTGIGIGAILLAGQCLDIMYSSLFPQGTLKLYEFIAMVTVVMMVLSQLPSFHSLRHINCASLLLSLGYTFLVVGACINLGLSKNAPKREYSLEHSDSGKVFSAFTSISIIAAIFGNGILPEIQATLAPPATGKMLKGLLLCYSVIFFTFYSAAISGYWVFGNNSSSNILKNLMPDEGPTLAPIVVIGLAVIFVLLQLFAIGLVYSQVAYEIMEKKSADTTKGIFSKRNLVPRLILRTLYMAFCGFMAAMLPFFGDINAVVGAFGFIPLDFVLPMLLYNMTYKPTRRSFTYWINMTIMVVFTCAGLMGAFSSIRKLVLDANKFKLFSSEVVD

SEQ ID NO: 34737 - protein, 384 aa, Arabidopsis thaliana
  peptide (1)..(384): Ceres Seq. ID no. 12396349
MGLVTFYAYYLMSKVLDHCEKSGRRHIRFRELAADVLGSGLMFYVVIFIQTAINTGIGIGAILLAGQCLDIMYSSLFPQGTLKLYEFIAMVTVVMMVLSQLPSFHSLRHINCASLLLSLGYTFLVVGACINLGLSKNAPKREYSLEHSDSGKVFSAFTSISIIAAIFGNGILPEIQATLAPPATGKMLKGLLLCYSVIFFTFYSAAISGYWVFGNNSSSNILKNLMPDEGPTLAPIVVIGLAVIFVLLQLFAIGLVYSQVAYEIMEKKSADTTKGIFSKRNLVPRLILRTLYMAFCGFMAAMLPFFGDINAVVGAFGFIPLDFVLPMLLYNMTYKPTRRSFTYWINMTIMVVFTCAGLMGAFSSIRKLVLDANKFKLFSSEVVD

SEQ ID NO: 34738 - DNA, 1421 bp, Arabidopsis thaliana
  misc_feature (1)..(1421): Ceres Seq. ID no. 12331119
  misc_feature (1)..(1421): Ortholog of  Ceres SEQ ID NO 15170690 as cited in SEQ ID NO 66934
aaccaatcatctttttttattcccaggagtcgagagatatattcattcataatcagcccccggattctttctctcgatcgccgatgtcgaaaagaatcctttgtaaattctttgctcacggtgcatgcttgaaaggggagcactgtgaattttctcatgactggaaggatcctacaaataatatttgcacctactaccagaaaggaatctgctcttacggaagtcgatgcaggtacgaacatgtcaaagcttccaggcctcatccatctgcttcatcttcgtccgctgtgcctcggccatctcctgcttcagcttccaacactcttgcctgtgcttttcttcctggtgtcgcggaaagagatttgagcccagttccttcttcatctttaaaaccaacgtggaatttggattctcttcaccaggattccgtagacgaggtcaaaacttctaaccctggtacagtcaaacctgaagaactacccatttgctcatttgctgctgctggtgattgcccacgtgggaatgaatgccctcacatccatggaactatttgcccaacttgtgggaaatgttgcttgcatcctttcagacccgacgaaagagaggagcacaagaaagtttgtgaaaaaaagcacaagcaacttgaagcattaaaacttagccaagagatcgagtgttgtgtctgtttggaacgtgtattgtctaaggcaactccagctgaacgcaagttcgggttactcactgaatgtgatcatgctttctgcattgcatgtatcaggaattggcggagcagttctccttccactgggatggatgtcaatagcacactaagggcttgccccatatgccgcaagttatcgtattttgttgttcctagtgtaatctggttttcagctccagaagagaaaaaagaaattatggataactacagggaaaagctcaggtcaatcgattgtaaacactttagttttggagatgggaattgtccattcgggacaagttgcttctacaagcatgcgtatcatgatggtcgtttggaggaagtggttttgcggcatctggatgcagaagatgggcagactgtgatagcaaaggatataaggttgtccgacttccttgagaacatgcacatatgaacagagtctctcttagcacaataagggagaaggcaaagatgttgtgatgacatctttttttctttcttcctggggtgtttcccattcattgtaacgatttgatttgagttggaagattatgtcttagaccccaacgcattatgacttgcgttaagaggggatcattttattaattttgtatttttaacaaatatcactacttcctgcaaatcaacgcacatgagctatacggatgtagtaacgtggggctataatatttatcaaaatcctttggattgcttacct

SEQ ID NO: 34739 - protein, 377 aa, Arabidopsis thaliana
  peptide (1)..(377): Ceres Seq. ID no. 12331120
PIIFFYSQESRDIFIHNQPPDSFSRSPMSKRILCKFFAHGACLKGEHCEFSHDWKDPTNNICTYYQKGICSYGSRCRYEHVKASRPHPSASSSSAVPRPSPASASNTLACAFLPGVAERDLSPVPSSSLKPTWNLDSLHQDSVDEVKTSNPGTVKPEELPICSFAAAGDCPRGNECPHIHGTICPTCGKCCLHPFRPDEREEHKKVCEKKHKQLEALKLSQEIECCVCLERVLSKATPAERKFGLLTECDHAFCIACIRNWRSSSPSTGMDVNSTLRACPICRKLSYFVVPSVIWFSAPEEKKEIMDNYREKLRSIDCKHFSFGDGNCPFGTSCFYKHAYHDGRLEEVVLRHLDAEDGQTVIAKDIRLSDFLENMHI

SEQ ID NO: 34740 - protein, 350 aa, Arabidopsis thaliana
  peptide (1)..(350): Ceres Seq. ID no. 12331121
MSKRILCKFFAHGACLKGEHCEFSHDWKDPTNNICTYYQKGICSYGSRCRYEHVKASRPHPSASSSSAVPRPSPASASNTLACAFLPGVAERDLSPVPSSSLKPTWNLDSLHQDSVDEVKTSNPGTVKPEELPICSFAAAGDCPRGNECPHIHGTICPTCGKCCLHPFRPDEREEHKKVCEKKHKQLEALKLSQEIECCVCLERVLSKATPAERKFGLLTECDHAFCIACIRNWRSSSPSTGMDVNSTLRACPICRKLSYFVVPSVIWFSAPEEKKEIMDNYREKLRSIDCKHFSFGDGNCPFGTSCFYKHAYHDGRLEEVVLRHLDAEDGQTVIAKDIRLSDFLENMHI

SEQ ID NO: 34741 - DNA, 1312 bp, Arabidopsis thaliana
  misc_feature (1)..(1312): Ceres Seq. ID no. 12334457
  misc_feature (1)..(1312): Ortholog of  Ceres SEQ ID NO 13597865 as cited in SEQ ID NO 64954
tgagttcagatgaaacaatggaaactggttcttaccctgaacgaccaggagagcctgattgttcttattacataagaactggtctttgtagatttggctctacttgtcggttcaaccatcctcgtgatcgggaactggttatagctactgcaaggatgagaggagaataccctgaaaggattggtcagcctgaatgcgagtactatttgaagacaggaacctgcaagtttggagtaacatgtaagtttcatcatccaaggaacaaagctgggattgctggaagagtctctctcaatatgttaggctatcctctacgctcgaatgaggttgattgtgcttatttcctaagaaccggacactttaaatttggtggtacttgtaaattcaaccaccctcagcctcaaccaaccaacatgatggttcctacctcagggcaacagtcttatccttggtcaagagcttcttttattgccagccctcgttggcaagatccgtctagctacgcttccttaatcatgcctcaaggagttgtcccggttcaaggatggaacccttacagtggtcagctcggctcagtttctccttcaggtaccggaaatgatcaaaactacagaaatttacagcagaacgagacaatagagtcaggctctcagtctcaaggatcattctcgggttacaatccgggatcctctgttccgctaggagggtattatgcattgccgagggaaaatgtgttcccggagagaccaggacaacccgaatgccaattctacatgaagacaggtgactgcaaatttggcacagtttgcaaatttcaccatcctagagacagacaagctcctcctcctgattgtctcttaagttccattggcctccccttacgcccgggagaaccgttgtgtgtgttctatacacgctatggaatctgcaaatttggtccaagctgtaaatttgatcacccaatgcgagtattcacatacgacaacacagcttcagagacagatgaggtagtggaaacatcaacagggaaatctagaagactctctgtgtctgaaacaagacaagcagcaacaacatcctctggtaaagacactaccattgataatacacagcagtgaagaaacaaaggaagaagaagaagagcttttaaacaagagcttttgatttttcaaaagaggaatctgtaaattctcattttcatttagtctctcaagcatttattaataatgtatagaggtgatttatacaactgatcttgatcttgatctgatcgccattgttgtaatattcttttggcgaatcaggttcaatg

SEQ ID NO: 34742 - protein, 371 aa, Arabidopsis thaliana
  peptide (1)..(371): Ceres Seq. ID no. 12334458
SSDETMETGSYPERPGEPDCSYYIRTGLCRFGSTCRFNHPRDRELVIATARMRGEYPERIGQPECEYYLKTGTCKFGVTCKFHHPRNKAGIAGRVSLNMLGYPLRSNEVDCAYFLRTGHFKFGGTCKFNHPQPQPTNMMVPTSGQQSYPWSRASFIASPRWQDPSSYASLIMPQGVVPVQGWNPYSGQLGSVSPSGTGNDQNYRNLQQNETIESGSQSQGSFSGYNPGSSVPLGGYYALPRENVFPERPGQPECQFYMKTGDCKFGTVCKFHHPRDRQAPPPDCLLSSIGLPLRPGEPLCVFYTRYGICKFGPSCKFDHPMRVFTYDNTASETDEVVETSTGKSRRLSVSETRQAATTSSGKDTTIDNTQQ

SEQ ID NO: 34743 - protein, 366 aa, Arabidopsis thaliana
  peptide (1)..(366): Ceres Seq. ID no. 12334459
METGSYPERPGEPDCSYYIRTGLCRFGSTCRFNHPRDRELVIATARMRGEYPERIGQPECEYYLKTGTCKFGVTCKFHHPRNKAGIAGRVSLNMLGYPLRSNEVDCAYFLRTGHFKFGGTCKFNHPQPQPTNMMVPTSGQQSYPWSRASFIASPRWQDPSSYASLIMPQGVVPVQGWNPYSGQLGSVSPSGTGNDQNYRNLQQNETIESGSQSQGSFSGYNPGSSVPLGGYYALPRENVFPERPGQPECQFYMKTGDCKFGTVCKFHHPRDRQAPPPDCLLSSIGLPLRPGEPLCVFYTRYGICKFGPSCKFDHPMRVFTYDNTASETDEVVETSTGKSRRLSVSETRQAATTSSGKDTTIDNTQQ

SEQ ID NO: 34744 - protein, 320 aa, Arabidopsis thaliana
  peptide (1)..(320): Ceres Seq. ID no. 12334460
MRGEYPERIGQPECEYYLKTGTCKFGVTCKFHHPRNKAGIAGRVSLNMLGYPLRSNEVDCAYFLRTGHFKFGGTCKFNHPQPQPTNMMVPTSGQQSYPWSRASFIASPRWQDPSSYASLIMPQGVVPVQGWNPYSGQLGSVSPSGTGNDQNYRNLQQNETIESGSQSQGSFSGYNPGSSVPLGGYYALPRENVFPERPGQPECQFYMKTGDCKFGTVCKFHHPRDRQAPPPDCLLSSIGLPLRPGEPLCVFYTRYGICKFGPSCKFDHPMRVFTYDNTASETDEVVETSTGKSRRLSVSETRQAATTSSGKDTTIDNTQQ

SEQ ID NO: 34745 - DNA, 1309 bp, Arabidopsis thaliana
  misc_feature (1)..(1309): Ceres Seq. ID no. 12579944
  misc_feature (1)..(1309): Ortholog of  Ceres SEQ ID NO 13595351 as cited in SEQ ID NO 55934
  misc_feature (1)..(1309): Ortholog of  Ceres SEQ ID NO 13639645 as cited in SEQ ID NO 57488
aaagcacattggggcttatctctctctaagtaatacacacaaaaataactcacatatagagagagatatggctggagatatgcaaggagtgagagtagtagaaaaatattcaccggtcatagtgatggtgatgtcaaatgtagcgatgggttcggtgaatgcacttgtgaagaaagctcttgatgttggtgtgaaccatatggtcattggtgcttatcgaatggctatttccgctttaagtttggttccctttgcctatgtcttggaaaggaaaacaagaccacaaataacgtttaggctaatggtcgatcatttcgtcagtggccttctcggggcgagtttgatgcagtttttctttttgcttggtctgtcgtacacgtcagcaactgtttcgtgtgctttggtaagcatgttgcctgcaatcaccttcgctttggcccttattttcaggactgaaaatgtgaagattctaaagaccaaagcaggaatgttgaaggtgattggaactttgatctgtataagtggagctttgttcttaacattttacaaaggcccacaaatatcaaactctcactctcactctcacggtggggcttcccacaaaacaacgatcaagacaaggccaataattggcttcttggatgtctttatttaaccataggaacagtgttgctatctctatggatgttgtttcaagggactttaagtattaagtacccttgcaaatactcgagcacttgtcttatgtcaattttcgcggcatttcaatgtgctctcttgagcctttacaagagcagagacgttaatgattggatcatagatgatagattcgttatcaccgtcatcatatacgctggagtggtaggacaagcaatgacgacggttgcaacaacatgggggattaaaaaattaggagctgtgttcgcatcggcgtttttcccacttactctcatttcggctactctatttgatttcctcattttacacactcctttataccttggaagtgtgattggatcactagtgaccataacgggtctctacatgttcttgtgggggaagaacaaagaaacggaatcatcaactgcattgtcttcaggaatggataacgaagctcaatatactactcctaataaggataacgactctaagtcgcccgtttaatttaattatattgttgttaatgtatgtttcaaataactgttatgtcctagttaatgtttaaggagaggtaatgagagataaaattttataattccaaacatcaacgtagagatttgtgaaatatttaaatccggtttgtttggtt

SEQ ID NO: 34746 - protein, 217 aa, Arabidopsis thaliana
  peptide (1)..(217): Ceres Seq. ID no. 12579945
KHIGAYLSLSNTHKNNSHIERDMAGDMQGVRVVEKYSPVIVMVMSNVAMGSVNALVKKALDVGVNHMVIGAYRMAISALSLVPFAYVLERKTRPQITFRLMVDHFVSGLLGASLMQFFFLLGLSYTSATVSCALVSMLPAITFALALIFRTENVKILKTKAGMLKVIGTLICISGALFLTFYKGPQISNSHSHSHGGASHKTTIKTRPIIGFLDVFI

SEQ ID NO: 34747 - protein, 195 aa, Arabidopsis thaliana
  peptide (1)..(195): Ceres Seq. ID no. 12579946
MAGDMQGVRVVEKYSPVIVMVMSNVAMGSVNALVKKALDVGVNHMVIGAYRMAISALSLVPFAYVLERKTRPQITFRLMVDHFVSGLLGASLMQFFFLLGLSYTSATVSCALVSMLPAITFALALIFRTENVKILKTKAGMLKVIGTLICISGALFLTFYKGPQISNSHSHSHGGASHKTTIKTRPIIGFLDVFI

SEQ ID NO: 34748 - protein, 191 aa, Arabidopsis thaliana
  peptide (1)..(191): Ceres Seq. ID no. 12579947
MQGVRVVEKYSPVIVMVMSNVAMGSVNALVKKALDVGVNHMVIGAYRMAISALSLVPFAYVLERKTRPQITFRLMVDHFVSGLLGASLMQFFFLLGLSYTSATVSCALVSMLPAITFALALIFRTENVKILKTKAGMLKVIGTLICISGALFLTFYKGPQISNSHSHSHGGASHKTTIKTRPIIGFLDVFI

SEQ ID NO: 34749 - DNA, 985 bp, Arabidopsis thaliana
  misc_feature (1)..(985): Ceres Seq. ID no. 12394889
  misc_feature (1)..(985): Ortholog of  Ceres SEQ ID NO 12624943 as cited in SEQ ID NO 67802
agatatactctgatagagaagaagaagaagaagaagagatcagctgagcaacaatggccaccgcgatacctctcttcgcctctttcaagtatgccgatagtctcaccgtcgttggaatctctttctgcacggcgttggtctgcgaagcaatctcatggatcctaatctatcgcacaagctcttacaaatcgttgaaatcttccattgacaaagcctctaagaagcttgagacgatgaagacagataatccttcctcgaagctaacaaacaagaaatcgaagacgaagaagatagatcgcgttgaatccagcttaaaggaatcgagcagagatctatcactcttcaagtttaaatctggtgccgttgtggctttggttctctttgtcgtgtttggattgttgaattcgcttttcgaagggaaagtggtagcgaagcttccgtttcatccgattacgattgtgaggaagatgagtcatagaggattgaaaggcgatgattccactgattgttccatggcttttctttatctgctttgttctattagtataaggactaatctgcagaagttcttgggtttctctccacctagaggagctgctggtgctggtggtttgttcccaatgcctgatccaaagaccaattgatcaggtttgatctgatgatgaattggattctggattcttagctcgttgttactctgaaattttcatagataacttcaatgctctgatgtagtggtgttgttttcagttcgtttgatgagaaacactttcaaagtttcgagttttgagttttcttctagtatgaggtttggatttggatcccttaacatgatctactccttttcaaattcagtcttgattattgtgtgttcaagtccttttcatatgctttgacatctttctaatcatttgtacaccaaaaggcttgagttttcatgcgtatggattgtttggagactgaaatgagaggttagtgaaagatg

SEQ ID NO: 34750 - protein, 196 aa, Arabidopsis thaliana
  peptide (1)..(196): Ceres Seq. ID no. 12394890
MATAIPLFASFKYADSLTVVGISFCTALVCEAISWILIYRTSSYKSLKSSIDKASKKLETMKTDNPSSKLTNKKSKTKKIDRVESSLKESSRDLSLFKFKSGAVVALVLFVVFGLLNSLFEGKVVAKLPFHPITIVRKMSHRGLKGDDSTDCSMAFLYLLCSISIRTNLQKFLGFSPPRGAAGAGGLFPMPDPKTN

SEQ ID NO: 34751 - protein, 136 aa, Arabidopsis thaliana
  peptide (1)..(136): Ceres Seq. ID no. 12394891
MKTDNPSSKLTNKKSKTKKIDRVESSLKESSRDLSLFKFKSGAVVALVLFVVFGLLNSLFEGKVVAKLPFHPITIVRKMSHRGLKGDDSTDCSMAFLYLLCSISIRTNLQKFLGFSPPRGAAGAGGLFPMPDPKTN

SEQ ID NO: 34752 - DNA, 900 bp, Arabidopsis thaliana
  misc_feature (1)..(900): Ceres Seq. ID no. 12334449
  misc_feature (1)..(900): Ortholog of  Ceres SEQ ID NO 13656068 as cited in SEQ ID NO 69047
ccctctttgcactttcttcttcccgtcgctaccgaaagcttctgtctctctcactcgcagggttctctggaactttctgaacgatgccgaggtattactgtgattattgcgatacttatctcactcacgattccccatcagtaaggaagcagcacaatgctggttacaaacacaaggcgaatgtgagaatatactatccaatttgaggaacaacaaacccaaagtttgattgatcagagaattaaggaacatcttggccaaactggagggtatcaacaggttggtgctgtgtttaatcagcatatgcttgcaagacctcgccctcccatgatgctaccacctggaagtatgcctatgggtatgcgacctcctgttctgcctagacccatgatgcctcctcaaggttatatgcctcctccaggagtaccacagatgatggcaccgcctggtgctcctctacctccacctccacaaaatggtattctgaggccaccaggaatggctcccataccaggtcaaggtggcggaccaccaggaatggctcccataccaggtcaaggtggcggaccacctcccaattataatggactacctcctcctcctccttatcatacaaatccagctgctccaccaagtggtaatttcaacaatccaaacctcaacaatccgaatcccagtgctgaatctcctgaaagcaatgagtagagttagtaggtctgaatgaatcatttttctcctgccaaaaaattctcagagctcttgtttaacacaatatcctaccttttctactccaatttttatgaagaggtttagaactaacgtatgtgaaatgagttttatgtgttagatgattgtatccattagagtcatgaaaaggaaaatctgaggtttcttatctct

SEQ ID NO: 34753 - protein, 133 aa, Arabidopsis thaliana
  peptide (1)..(133): Ceres Seq. ID no. 12334450
MLARPRPPMMLPPGSMPMGMRPPVLPRPMMPPQGYMPPPGVPQMMAPPGAPLPPPPQNGILRPPGMAPIPGQGGGPPGMAPIPGQGGGPPPNYNGLPPPPPYHTNPAAPPSGNFNNPNLNNPNPSAESPESNE

SEQ ID NO: 34754 - protein, 125 aa, Arabidopsis thaliana
  peptide (1)..(125): Ceres Seq. ID no. 12334451
MMLPPGSMPMGMRPPVLPRPMMPPQGYMPPPGVPQMMAPPGAPLPPPPQNGILRPPGMAPIPGQGGGPPGMAPIPGQGGGPPPNYNGLPPPPPYHTNPAAPPSGNFNNPNLNNPNPSAESPESNE

SEQ ID NO: 34755 - protein, 124 aa, Arabidopsis thaliana
  peptide (1)..(124): Ceres Seq. ID no. 12334452
MLPPGSMPMGMRPPVLPRPMMPPQGYMPPPGVPQMMAPPGAPLPPPPQNGILRPPGMAPIPGQGGGPPGMAPIPGQGGGPPPNYNGLPPPPPYHTNPAAPPSGNFNNPNLNNPNPSAESPESNE

SEQ ID NO: 34756 - DNA, 1387 bp, Arabidopsis thaliana
  misc_feature (1)..(1387): Ceres Seq. ID no. 13509801
  misc_feature (1)..(1387): Ortholog of  Ceres SEQ ID NO 13596474 as cited in SEQ ID NO 62169
  misc_feature (1)..(1387): Ortholog of  Ceres SEQ ID NO 13596969 as cited in SEQ ID NO 63375
  misc_feature (1)..(1387): Ortholog of  Ceres SEQ ID NO 13597519 as cited in SEQ ID NO 64759
  misc_feature (1)..(1387): Ortholog of  Ceres SEQ ID NO 13597870 as cited in SEQ ID NO 64982
  misc_feature (1)..(1387): Ortholog of  Ceres SEQ ID NO 13662323 as cited in SEQ ID NO 68305
  misc_feature (1)..(1387): Ortholog of  Ceres SEQ ID NO 12567001 as cited in SEQ ID NO 0
gactcaactcaagagtggtgtagtgagagaagaaagatagagaaaaaaaatgggaggcaaaggtgtgatgatggtggcgatactttgcctttgggcactctctgcaacatctgaagcagtaacagaggctgagccaggtttgatgatgaacttctacaaggacacgtgtcctcaggccgaagacatcgtccgtgaacaagtcaaactcctctacaaacgccacaagaacaccgctttctcttggctccgtaacatcttccatgactgcgccgttgagtcatgtgatgcgtcgcttttgctggattcgacaagaagagagctaggagagaaagaacacgacaggagcttcggacttagaaactttaggtacatcgaggagatcaaggaagctctcgagagggagtgtcctggtgttgtctcatgttctgacattctcgtcttgtccgcaagagaaggcatcgaagcagtaggaggaccttatattcctttgaagacaggaaggagagatggacttaaaagcaggacggatatgctcgagtcatatcttcccgaccacaacgagagtatctccgtcgttcttgaaaagttcaaatccatcggtatcgacactcccggcctcgtcgccctcctagggtcacacagcgtgggaagaactcactgtgtcaagctggtccatcgtttgtaccctgaggtggacccgtccttaaacccggaccacgtccctcacatgctacacaagtgtcctgactcgatccctgacccaaaggcggtccagtacgtgcgtaacgaccgtggcacccccatggtgctagacaacaattactaccgtaacatcctagacaacaagggtttgctccttgtggaccatcagctcgcacacgacaaacgaaccagaccaatcgttaagaagatggctaaggaccaggcctacttcttcaaggagttcactagggcaatccagatcttatccgagaacaaccccttgactggctctaagggtgagatcaggaagcaatgtaatctcgcaaacaagaaccattgaagttggaaaaagtgagaaagacaggggctctggtgtgttgagttctctgcttggtacgaaccaagatgaataaaaaaatcttttaagttaaatcaaagaaagggtgatgatgaatacatcatggtagtgaccacctccttcttttgtgtgttcagccttaatgctttaattatgatgttagtggctttgagttatttaatctaaatgttggctcttcgttgattttgggtttgtggtgggggtgatataatgataatggaaaggatgtatgatatgatggatggtgttgggtatcatgtatgacgatgtaatgataagtaaacatgtccgaatcttttgataatt

SEQ ID NO: 34757 - protein, 330 aa, Arabidopsis thaliana
  peptide (1)..(330): Ceres Seq. ID no. 13509802
MGGKGVMMVAILCLWALSATSEAVTEAEPGLMMNFYKDTCPQAEDIVREQVKLLYKRHKNTAFSWLRNIFHDCAVESCDASLLLDSTRRELGEKEHDRSFGLRNFRYIEEIKEALERECPGVVSCSDILVLSAREGIEAVGGPYIPLKTGRRDGLKSRTDMLESYLPDHNESISVVLEKFKSIGIDTPGLVALLGSHSVGRTHCVKLVHRLYPEVDPSLNPDHVPHMLHKCPDSIPDPKAVQYVRNDRGTPMVLDNNYYRNILDNKGLLLVDHQLAHDKRTRPIVKKMAKDQAYFFKEFTRAIQILSENNPLTGSKGEIRKQCNLANKNH

SEQ ID NO: 34758 - protein, 324 aa, Arabidopsis thaliana
  peptide (1)..(324): Ceres Seq. ID no. 13509803
MMVAILCLWALSATSEAVTEAEPGLMMNFYKDTCPQAEDIVREQVKLLYKRHKNTAFSWLRNIFHDCAVESCDASLLLDSTRRELGEKEHDRSFGLRNFRYIEEIKEALERECPGVVSCSDILVLSAREGIEAVGGPYIPLKTGRRDGLKSRTDMLESYLPDHNESISVVLEKFKSIGIDTPGLVALLGSHSVGRTHCVKLVHRLYPEVDPSLNPDHVPHMLHKCPDSIPDPKAVQYVRNDRGTPMVLDNNYYRNILDNKGLLLVDHQLAHDKRTRPIVKKMAKDQAYFFKEFTRAIQILSENNPLTGSKGEIRKQCNLANKNH

SEQ ID NO: 34759 - protein, 323 aa, Arabidopsis thaliana
  peptide (1)..(323): Ceres Seq. ID no. 13509804
MVAILCLWALSATSEAVTEAEPGLMMNFYKDTCPQAEDIVREQVKLLYKRHKNTAFSWLRNIFHDCAVESCDASLLLDSTRRELGEKEHDRSFGLRNFRYIEEIKEALERECPGVVSCSDILVLSAREGIEAVGGPYIPLKTGRRDGLKSRTDMLESYLPDHNESISVVLEKFKSIGIDTPGLVALLGSHSVGRTHCVKLVHRLYPEVDPSLNPDHVPHMLHKCPDSIPDPKAVQYVRNDRGTPMVLDNNYYRNILDNKGLLLVDHQLAHDKRTRPIVKKMAKDQAYFFKEFTRAIQILSENNPLTGSKGEIRKQCNLANKNH

SEQ ID NO: 34760 - DNA, 950 bp, Arabidopsis thaliana
  misc_feature (1)..(950): Ceres Seq. ID no. 12337755
  misc_feature (1)..(950): Ortholog of  Ceres SEQ ID NO 15170395 as cited in SEQ ID NO 58055
acaaattcactttccacaattaatctctctcccaaatctcaattttggactcgtctgcttttgtttatataaacacttctcttcttcttcaatctccacacaccacaacaaaaccacctaccttcttcgatttctccagaaatcctccttcaagttcatactcatggaagaagctaaagtggaagcaaaagatggtaccatctccgtagcttctgcattttccggtcaccaacaagctgttcacgatagcgaccataaattcctaacgcaagctgttgaagaagcttacaagggagtggactgtggtgatggtggcccatttggtgcggtgattgtgcataataacgaggttgtcgctagctgccacaatatggttttgaaatatactgacccaactgcacatgctgaagtcactgccattagagaggcatgtaagaaacttaacaaaatcgagttatcagaatgcgagatttacgcatcttgtgagccatgtccgatgtgcttcggagccatccatctctcgagactcaagaggttggtttatggagccaaagccgaagcagctatagccatcgggtttgatgacttcatagctgatgctttgagaggcacgggggtttaccagaaatctagtctggagatcaagaaagcagacgggaatggcgctgcgattgcggagcaagttttccagaacacaaaggagaagttccgtttatactaaagcacttctccattaccacattcttcttcttcttctccttcatgatggtaattagaagtagtagaagaagaactgcacttgctttaacttaaataaatctctgtttcaaattgttcattttaaaaacagaaggaaacgaaaaaaaaaaaaaaatcaatttcggttcttgttgacacgatttgtaatttcttttcttcatttgaattgaactggtaaatactttcttctc

SEQ ID NO: 34761 - protein, 239 aa, Arabidopsis thaliana
  peptide (1)..(239): Ceres Seq. ID no. 12337756
QIHFPQLISLPNLNFGLVCFCLYKHFSSSSISTHHNKTTYLLRFLQKSSFKFILMEEAKVEAKDGTISVASAFSGHQQAVHDSDHKFLTQAVEEAYKGVDCGDGGPFGAVIVHNNEVVASCHNMVLKYTDPTAHAEVTAIREACKKLNKIELSECEIYASCEPCPMCFGAIHLSRLKRLVYGAKAEAAIAIGFDDFIADALRGTGVYQKSSLEIKKADGNGAAIAEQVFQNTKEKFRLY

SEQ ID NO: 34762 - protein, 185 aa, Arabidopsis thaliana; identical to SEQ ID NO: 23876
  peptide (1)..(185): Ceres Seq. ID no. 12337757

SEQ ID NO: 34763 - DNA, 1429 bp, Arabidopsis thaliana
  misc_feature (1)..(1429): Ceres Seq. ID no. 12327639
  misc_feature (1)..(1429): Ortholog of  Ceres SEQ ID NO 13586135 as cited in SEQ ID NO 1210
  misc_feature (1)..(1429): Ortholog of  Ceres SEQ ID NO 13654329 as cited in SEQ ID NO 68717
aagaaatgtctctgtcattgtgcagtagataagccactctctctctctttctctctttttgctattataaagaaaaagattcattctcccaccattgaggtttaacttatacaaacagatctttttgaaattggattcatctaagaagcagactctgttttcatggctgtttacaataccaaactctgtttggcctctgttttcttgctcttagggcttctcttggcttttgacttgaagggtatagaagcagaaagtcttaccaaacagaaactggactcgaagatacttcaggatgagattgtgaagaaagtcaacgaaaacccaaacgctggatggaaagctgctataaatgatcgattttcaaacgccactgttgcagagtttaagcgtcttctcggtgttaaaccaacaccaaagaagcatttcttaggtgttcctattgtgagccatgatccatctttgaagctacctaaagcttttgatgctagaactgcttggccacagtgcactagtattggaaacatcttagatcagggacattgtggttcttgctgggcatttggtgctgttgaatcactatcagatagattctgtatccaatttggcatgaacatttctttatcagtaaatgatctcctagcttgttgtggattccgttgtggtgatggttgtgacggtggctatccaattgctgcttggcaatacttttcgtatagcggtgttgtcacagaagagtgtgatccatactttgataataccggatgctctcacccgggttgcgaaccggcatatcctacaccgaaatgttcgaggaaatgcgttagcgacaacaaactatggagcgagtcgaagcattacagtgttagtacatacactgtgaaatctaatccacaagatatcatggcagaggtttataagaatggacctgttgaagtctcttttaccgtttatgaggattttgctcattacaaatctggagtctataagcacataacaggttctaacattggaggtcatgctgttaaacttattggttggggaactagcagtgaaggagaagattattggttgatggcaaatcaatggaacagaggctggggtgatgatggttatttcatgataaggagaggaactaatgaatgtggaattgaagatgaaccagtagctggtttgccttcaagcaagaatgtgtttagggttgataccggttcgaatgatcttccggttgcatcggtttaagatcaaagatggaaatgttgcatcggtttaatatcaaagatgaaaagttgtttgtaagatatatatgttatggttgttgtttccagtaaaagattccggtgactagaaattgttttctggttggctgtgaaaatgttatacaaataaacacttcaacttaagcaatataatatcatttctacttttc

SEQ ID NO: 34764 - protein, 359 aa, Arabidopsis thaliana
  peptide (1)..(359): Ceres Seq. ID no. 12327640
MAVYNTKLCLASVFLLLGLLLAFDLKGIEAESLTKQKLDSKILQDEIVKKVNENPNAGWKAAINDRFSNATVAEFKRLLGVKPTPKKHFLGVPIVSHDPSLKLPKAFDARTAWPQCTSIGNILDQGHCGSCWAFGAVESLSDRFCIQFGMNISLSVNDLLACCGFRCGDGCDGGYPIAAWQYFSYSGVVTEECDPYFDNTGCSHPGCEPAYPTPKCSRKCVSDNKLWSESKHYSVSTYTVKSNPQDIMAEVYKNGPVEVSFTVYEDFAHYKSGVYKHITGSNIGGHAVKLIGWGTSSEGEDYWLMANQWNRGWGDDGYFMIRRGTNECGIEDEPVAGLPSSKNVFRVDTGSNDLPVASV

SEQ ID NO: 34765 - protein, 210 aa, Arabidopsis thaliana
  peptide (1)..(210): Ceres Seq. ID no. 12327641
MNISLSVNDLLACCGFRCGDGCDGGYPIAAWQYFSYSGVVTEECDPYFDNTGCSHPGCEPAYPTPKCSRKCVSDNKLWSESKHYSVSTYTVKSNPQDIMAEVYKNGPVEVSFTVYEDFAHYKSGVYKHITGSNIGGHAVKLIGWGTSSEGEDYWLMANQWNRGWGDDGYFMIRRGTNECGIEDEPVAGLPSSKNVFRVDTGSNDLPVASV

SEQ ID NO: 34766 - DNA, 1068 bp, Arabidopsis thaliana
  misc_feature (1)..(1068): Ceres Seq. ID no. 13499742
  misc_feature (1)..(1068): Ortholog of  Ceres SEQ ID NO 15175949 as cited in SEQ ID NO 58819
  misc_feature (1)..(1068): Ortholog of  Ceres SEQ ID NO 13596660 as cited in SEQ ID NO 63180
aatctaatcactttctgcttcttcgcctacttcattcacatcttctttcctcttcctcctttgggttacttcttcgaatctcctgttgtttgcagaaatggagactggtgctggtataggtttgtaccctttgcatcgctgcaaaaccatttacctagtgagacatgctcaggggattcacaatgtggatggggagaagaattataaggcttacatgtctcatgactactttgatgctgagttgacccagcttggctggaaacaggtagatagtttgcgtaagcatgttcattccagtggacttcacaagaagatcgaactggtcatttcgtctccactgatgagaaccttgcaaactgctgttggtgtttttggtggagagggctacacggatatgagtgatgtactacctctaatggtagcaaatgcaggaaatagcagccgtgcagctatatcgagtttaaactgcccaccagttattacagaggagtcctgcagagagcatttgggagtgcatccatgtgatcagaggagaagtatcagcgactatcagtttcttttccctgcagttgacttttcactgatagaaagcgaggaagacaagttatggaaggctgatgttagagaaacgattgaagaacttgcagctagaggaaaaaagttcctgaactggctatggacacggaaagaaaaagagatagctattgtgacacacagtggtttcttgtttcacacattgaatgcactacaaaacgagtgtcatccagatgttaagaaggaaatttgcggccactttgctaattgtgagctacgttcaatggtcatcgtcgatagaagtatgttgggatcggacagttcggtgactgattatccaggaaagattccaaaggggattgatcttccaagtgatgctgttgtagatgataacaacatcaaagttgagtgattctttatgatggacactgcattgtcttcaacttttctatttatctatacacaaacaccttctttgctgtatgcaactctcttattagtattactattgactatcgagttaaagatcttact

SEQ ID NO: 34767 - protein, 282 aa, Arabidopsis thaliana
  peptide (1)..(282): Ceres Seq. ID no. 13499743
METGAGIGLYPLHRCKTIYLVRHAQGIHNVDGEKNYKAYMSHDYFDAELTQLGWKQVDSLRKHVHSSGLHKKIELVISSPLMRTLQTAVGVFGGEGYTDMSDVLPLMVANAGNSSRAAISSLNCPPVITEESCREHLGVHPCDQRRSISDYQFLFPAVDFSLIESEEDKLWKADVRETIEELAARGKKFLNWLWTRKEKEIAIVTHSGFLFHTLNALQNECHPDVKKEICGHFANCELRSMVIVDRSMLGSDSSVTDYPGKIPKGIDLPSDAVVDDNNIKVE

SEQ ID NO: 34768 - protein, 243 aa, Arabidopsis thaliana
  peptide (1)..(243): Ceres Seq. ID no. 13499744
MSHDYFDAELTQLGWKQVDSLRKHVHSSGLHKKIELVISSPLMRTLQTAVGVFGGEGYTDMSDVLPLMVANAGNSSRAAISSLNCPPVITEESCREHLGVHPCDQRRSISDYQFLFPAVDFSLIESEEDKLWKADVRETIEELAARGKKFLNWLWTRKEKEIAIVTHSGFLFHTLNALQNECHPDVKKEICGHFANCELRSMVIVDRSMLGSDSSVTDYPGKIPKGIDLPSDAVVDDNNIKVE

SEQ ID NO: 34769 - protein, 201 aa, Arabidopsis thaliana
  peptide (1)..(201): Ceres Seq. ID no. 13499745
MRTLQTAVGVFGGEGYTDMSDVLPLMVANAGNSSRAAISSLNCPPVITEESCREHLGVHPCDQRRSISDYQFLFPAVDFSLIESEEDKLWKADVRETIEELAARGKKFLNWLWTRKEKEIAIVTHSGFLFHTLNALQNECHPDVKKEICGHFANCELRSMVIVDRSMLGSDSSVTDYPGKIPKGIDLPSDAVVDDNNIKVE

SEQ ID NO: 34770 - DNA, 969 bp, Arabidopsis thaliana
  misc_feature (1)..(969): Ceres Seq. ID no. 12384923
  misc_feature (1)..(969): Ortholog of  Ceres SEQ ID NO 12608801 as cited in SEQ ID NO 50884
  misc_feature (1)..(969): Ortholog of  Ceres SEQ ID NO 12635796 as cited in SEQ ID NO 0
acgagaatcatctgcttaaaatccaatcgcatcgactcagtcttcttcttcttcttcacctacctttctctctctctctcgtggtccattcgctattctatacttcttgtcggcgccggagagagtgagatgacttggtcggttttcagatccataaatactccaacactcgacctctccaccgcacttcgctccactcgtaccccattggtcgctgctggtgtcggctgcgcaacattcgctggtgtttctctcttcagaatgtcttctagatctcctcctttcgcttccctctctgtctctgcttcttctgtgaagaaggaagttgtgtctactgagaaagcaccagctgctttgggaccttactctcaggccattaaagccaataatctggtttttctttcaggtgttcttggacttatacctgagactggaaagtttgtttcggagagcgtcgaagatcagactgagcaggtactcaaaaacatgggggagatattgaaagctagtggtgctgattattcctcggtggtgaagacaacaatcatgttggctgatttggctgacttcaagacagtgaacgagatatatgccaaatacttcccagctccttctccagcacgatcgacgtatcaagttgcagctttgcctctaaacgccaagatcgagattgaatgtattgcaacactctagaacactcaaatcaatctctacgaagggtattttggtccggaagatgtcaaaacaaataagagaaacaatggtttttggggcttaacccatatttaacctacttttcattttgctgcactacgaaaaatgttgcggattatcaaccattaggttggttacaaatcaaaagcctctaatcaagaataagttatttagtgtcttgtccaccctcatttgctgttgacgtatatgtattgattgtatacattattttatttgagtgaaaaccattatgcc

SEQ ID NO: 34771 - protein, 230 aa, Arabidopsis thaliana
  peptide (1)..(230): Ceres Seq. ID no. 12384924
TRIICLKSNRIDSVFFFFFTYLSLSLSWSIRYSILLVGAGESEMTWSVFRSINTPTLDLSTALRSTRTPLVAAGVGCATFAGVSLFRMSSRSPPFASLSVSASSVKKEVVSTEKAPAALGPYSQAIKANNLVFLSGVLGLIPETGKFVSESVEDQTEQVLKNMGEILKASGADYSSVVKTTIMLADLADFKTVNEIYAKYFPAPSPARSTYQVAALPLNAKIEIECIATL

SEQ ID NO: 34772 - protein, 187 aa, Arabidopsis thaliana
  peptide (1)..(187): Ceres Seq. ID no. 12384925
MTWSVFRSINTPTLDLSTALRSTRTPLVAAGVGCATFAGVSLFRMSSRSPPFASLSVSASSVKKEVVSTEKAPAALGPYSQAIKANNLVFLSGVLGLIPETGKFVSESVEDQTEQVLKNMGEILKASGADYSSVVKTTIMLADLADFKTVNEIYAKYFPAPSPARSTYQVAALPLNAKIEIECIATL

SEQ ID NO: 34773 - protein, 143 aa, Arabidopsis thaliana
  peptide (1)..(143): Ceres Seq. ID no. 12384926
MSSRSPPFASLSVSASSVKKEVVSTEKAPAALGPYSQAIKANNLVFLSGVLGLIPETGKFVSESVEDQTEQVLKNMGEILKASGADYSSVVKTTIMLADLADFKTVNEIYAKYFPAPSPARSTYQVAALPLNAKIEIECIATL

SEQ ID NO: 34774 - DNA, 1209 bp, Arabidopsis thaliana
  misc_feature (1)..(1209): Ceres Seq. ID no. 13622058
  misc_feature (1)..(1209): Ortholog of  Ceres SEQ ID NO 15174447 as cited in SEQ ID NO 409
  misc_feature (1)..(1209): Ortholog of  Ceres SEQ ID NO 14313955 as cited in SEQ ID NO 54407
accatctctctctgtaatcgctcttctcgatgtcaactatttccttcttcctttgctcttagggttagggtttattttgttctttctctatatccttcaatcaatgtgaaaaaaaagctctcccttttggcagtttccgatgtttggtcgccattcgattatcccaaataaccagattggtaccgcctctgcttccgctggtgaagaccatgtctctgcctccgctacgtctggtcacattccttacgacgatatggaagaaatccctcatcctgactctatctatggtgctgcctccgatttgattcccgatggctctcaattggttgctcaccgatccgatggctctgaattacttgtttctcggccaccggaaggggcgaatcagcttacgatctcgttccgtggacaagtttacgtttttgatgccgttggtgctgacaaggtggatgctgtgttgtcgctgttgggtggttctactgagcttgctcctggtccgcaggtgatggaactagctcaacagcagaatcatatgcctgttgtagaatatcagagccgctgtagccttccgcaacgggcacaatccttggataggtttcggaagaagaggaatgctagatgtttcgagaagaaagtaagatacggtgttcgccaagaagttgccttaagaatggcacgtaataaaggtcaattcacctcttcaaagatgacagatggggcttataactctggcacagatcaagattctgcccaagatgatgcccatccagaaatatcgtgtactcattgcggcattagttccaaatgtacaccaatgatgcgacgtggcccttccggccccaggactctctgcaatgcctgtggacttttttgggctaacaggggtacattgagggatctctcaaagaaaacagaagagaatcagttggctttaatgaaaccggatgatggtgggagtgttgctgatgctgctaacaacttaaacactgaagctgcaagtgttgaagaacacacttccatggtttctcttgccaatggggataattctaatctgttaggtgatcactaaatactgtgataagaatcagaagatagaaatctttgtagaatcagatggtcttctctatgaatttatcttttcaccatcacatgtattatagaaaccgtaaccgaacctcaaatcaaataccatatcagatgtctttggtt

SEQ ID NO: 34775 - protein, 309 aa, Arabidopsis thaliana
  peptide (1)..(309): Ceres Seq. ID no. 13622059
MFGRHSIIPNNQIGTASASAGEDHVSASATSGHIPYDDMEEIPHPDSIYGAASDLIPDGSQLVAHRSDGSELLVSRPPEGANQLTISFRGQVYVFDAVGADKVDAVLSLLGGSTELAPGPQVMELAQQQNHMPVVEYQSRCSLPQRAQSLDRFRKKRNARCFEKKVRYGVRQEVALRMARNKGQFTSSKMTDGAYNSGTDQDSAQDDAHPEISCTHCGISSKCTPMMRRGPSGPRTLCNACGLFWANRGTLRDLSKKTEENQLALMKPDDGGSVADAANNLNTEAASVEEHTSMVSLANGDNSNLLGDH

SEQ ID NO: 34776 - protein, 271 aa, Arabidopsis thaliana
  peptide (1)..(271): Ceres Seq. ID no. 13622060
MEEIPHPDSIYGAASDLIPDGSQLVAHRSDGSELLVSRPPEGANQLTISFRGQVYVFDAVGADKVDAVLSLLGGSTELAPGPQVMELAQQQNHMPVVEYQSRCSLPQRAQSLDRFRKKRNARCFEKKVRYGVRQEVALRMARNKGQFTSSKMTDGAYNSGTDQDSAQDDAHPEISCTHCGISSKCTPMMRRGPSGPRTLCNACGLFWANRGTLRDLSKKTEENQLALMKPDDGGSVADAANNLNTEAASVEEHTSMVSLANGDNSNLLGDH

SEQ ID NO: 34777 - protein, 187 aa, Arabidopsis thaliana
  peptide (1)..(187): Ceres Seq. ID no. 13622061
MELAQQQNHMPVVEYQSRCSLPQRAQSLDRFRKKRNARCFEKKVRYGVRQEVALRMARNKGQFTSSKMTDGAYNSGTDQDSAQDDAHPEISCTHCGISSKCTPMMRRGPSGPRTLCNACGLFWANRGTLRDLSKKTEENQLALMKPDDGGSVADAANNLNTEAASVEEHTSMVSLANGDNSNLLGDH

SEQ ID NO: 34778 - DNA, 948 bp, Arabidopsis thaliana
  misc_feature (1)..(948): Ceres Seq. ID no. 13492159
  misc_feature (1)..(948): Ortholog of  Ceres SEQ ID NO 14302035 as cited in SEQ ID NO 51855
  misc_feature (1)..(948): Ortholog of  Ceres SEQ ID NO 14301432 as cited in SEQ ID NO 56425
ggggtctgtctgagtggatttgtatactatattgtgatgagagtcaccacaacaaattcgttgacatgagcctttcatatatttttgaattatactgaactaaaacccatttaaaagcccatttaaagacccattataagagtagagatactcagcccatttaaagataaaattacgtcatagcgatttttccattaaaagagtgaggaagagacaaaagtgattgattggtcagaaaaaatggaagcggcgaagaaacagagtgttacaaatcagcttctcgccgtgaaatcagcttccggcaagacttttagccagttagccgcggagacaggtctaaccaacgtatacgtagctcagcttctccgtcgtcaagctcagctcaaaccggacacagtcccaaagcttaaggaagctttaccagctctgaccgatgaactaatcggagatatgatgtctcctccgtggagatcctatgatcctaatctcatccaagaacccactatctacaggttgaatgaagcagtgatgcattttggtgagagtataaaggagattatcaatgaagattttggagatggcatcatgtcggcgatagatttctattgctctgtcgacaaaatcaaaggagtggatggtaacaatcgcgtggttgtgacgcttgatggaaagtatctttcgcattccgaacagaggacggagaatatggtctcaaggctaaatctcaagggaggtacaagcgaatgataagaaagcctttacgtatccatgaaggccttattgtaagtggtaacgttgtaatacctatgtgtttgtttatctgtaatatatgcaacttcagcatctagattaaaagctgtttcaggttgaataacagtgaataaacaaatcttataaaacctttctatgtttacttttaacatcgtaatcgagttccgattcatgctt

SEQ ID NO: 34779 - protein, 168 aa, Arabidopsis thaliana
  peptide (1)..(168): Ceres Seq. ID no. 13492160
MEAAKKQSVTNQLLAVKSASGKTFSQLAAETGLTNVYVAQLLRRQAQLKPDTVPKLKEALPALTDELIGDMMSPPWRSYDPNLIQEPTIYRLNEAVMHFGESIKEIINEDFGDGIMSAIDFYCSVDKIKGVDGNNRVVVTLDGKYLSHSEQRTENMVSRLNLKGGTSE

SEQ ID NO: 34780 - protein, 98 aa, Arabidopsis thaliana
  peptide (1)..(98): Ceres Seq. ID no. 13492161
MMSPPWRSYDPNLIQEPTIYRLNEAVMHFGESIKEIINEDFGDGIMSAIDFYCSVDKIKGVDGNNRVVVTLDGKYLSHSEQRTENMVSRLNLKGGTSE

SEQ ID NO: 34781 - protein, 97 aa, Arabidopsis thaliana
  peptide (1)..(97): Ceres Seq. ID no. 13492162
MSPPWRSYDPNLIQEPTIYRLNEAVMHFGESIKEIINEDFGDGIMSAIDFYCSVDKIKGVDGNNRVVVTLDGKYLSHSEQRTENMVSRLNLKGGTSE

SEQ ID NO: 34782 - DNA, 1196 bp, Arabidopsis thaliana
  misc_feature (1)..(1196): Ceres Seq. ID no. 12395911
  misc_feature (1)..(1196): Ortholog of  Ceres SEQ ID NO 13595542 as cited in SEQ ID NO 59862
ataaataaatatataaaaaaaagtttcgatttttgcttttcttcttcgattcattgcgcgaatcatccgtgatgttggtgtctagggttttatcaagagtttctcgcagcgcaggcttacgctcgtctttctcctccgtcgttactccgaagaggaatcagattccgattgttgcaagccgatttcactccctcgttcacggaacccccaacaagcttgttgcagttccagtgtcgctccgaaaccatggaactctagatttgaatgttcttcaaaggttcggctttttttcctcttcctcagctgaaccgaagggaaatgagagtaacaccgaagtaccaaagaccggcgaaacttctgagaatgtggaggtggggaaagctacagatgcagagattgacttcgacgatttgtcaagagacgatttagtgaagcttgtgagtgagaaggaagatcttttgaaggttcagcagaaagacataatggaaatgaaagataaatttcttcgcacttatgctgagcagcagaatcttatggacaggactaaccgtaatgctgaaagcgccaaaaagttcgctgtacagaactttgcaacgagccttttggatgtggcggataatcttgaaagagcttcttctgttgtcaaagagagtttttcgaagatcgacacttcaaaagatttggctggtgctactccactgttaaaaaacctattagaaggagtggagatgactgagaaacaattagctgaggtgtttagaaaagctggtttggtgaaagaagatcctttaaatgaaccgtttaatccaaacagacataacgcagtgttccaagtcccagatgcttccaagccaaaaggcacaattgctcatgtcctaaagtctggatactcattgtacgatcgagttataaggccagctgaggttggtgttacttgcgccgtggagaatcaagaaggcggcaaagagtctgcagcttgaaatacttaaaacatcgagagttaagcttttgtttttaacatcttcatgagttctttttttagttaatagttctctttctttgcatattcattggaggaacaagattcccataaggtagcatgactatgctctgtacttccagggaagccctggttctgtaacttttacacaaattcataagccaaagccaaactcttggtaaaagcttcaaatctt

SEQ ID NO: 34783 - protein, 302 aa, Arabidopsis thaliana
  peptide (1)..(302): Ceres Seq. ID no. 12395912
MLVSRVLSRVSRSAGLRSSFSSVVTPKRNQIPIVASRFHSLVHGTPNKLVAVPVSLRNHGTLDLNVLQRFGFFSSSSAEPKGNESNTEVPKTGETSENVEVGKATDAEIDFDDLSRDDLVKLVSEKEDLLKVQQKDIMEMKDKFLRTYAEQQNLMDRTNRNAESAKKFAVQNFATSLLDVADNLERASSVVKESFSKIDTSKDLAGATPLLKNLLEGVEMTEKQLAEVFRKAGLVKEDPLNEPFNPNRHNAVFQVPDASKPKGTIAHVLKSGYSLYDRVIRPAEVGVTCAVENQEGGKESAA

SEQ ID NO: 34784 - protein, 165 aa, Arabidopsis thaliana
  peptide (1)..(165): Ceres Seq. ID no. 12395913
MEMKDKFLRTYAEQQNLMDRTNRNAESAKKFAVQNFATSLLDVADNLERASSVVKESFSKIDTSKDLAGATPLLKNLLEGVEMTEKQLAEVFRKAGLVKEDPLNEPFNPNRHNAVFQVPDASKPKGTIAHVLKSGYSLYDRVIRPAEVGVTCAVENQEGGKESAA

SEQ ID NO: 34785 - protein, 163 aa, Arabidopsis thaliana
  peptide (1)..(163): Ceres Seq. ID no. 12395914
MKDKFLRTYAEQQNLMDRTNRNAESAKKFAVQNFATSLLDVADNLERASSVVKESFSKIDTSKDLAGATPLLKNLLEGVEMTEKQLAEVFRKAGLVKEDPLNEPFNPNRHNAVFQVPDASKPKGTIAHVLKSGYSLYDRVIRPAEVGVTCAVENQEGGKESAA

SEQ ID NO: 34786 - DNA, 1702 bp, Arabidopsis thaliana
  misc_feature (1)..(1702): Ceres Seq. ID no. 12385366
  misc_feature (1)..(1702): Ortholog of  Ceres SEQ ID NO 14312069 as cited in SEQ ID NO 59191
acttcaaacctcaaaagcaatttagctctctgtcttcaagatgacttctcttttcttctttgttctccttttctcgtctcttctcataagcaatggcgatgccaacccaaattacaaagaagctctctccaagtcattgctcttcttccaaggtcagcgatctggtcctcttcctagaggccaacaaatttcctggagggctagctctggcctttccgatggctctgctgctcatgtggacttaaccggcgggtactatgacgcaggagacaacgtcaagttcaatttaccaatggcgtttaccaccacaatgctctcatggagcgcactggaatacggtaaacggatgggtcctgagctggaaaatgcacgtgtgaacatccgttgggccacagattatctgctgaaatgtgccagagccacgccggggaagctttatgtcgctgtaggagatcctaatgttgatcacaaatgctgggaacgccctgaagacatggacacaccacgtacagtttactctgtatccgcttccaatcccggttctgatgtcgcagccaaaacagcagcagctctagctgcagcttctatggttttcagaaaagttgattccaagtattcacgtttgctgctcgcaacagctaaggatgtgatgcagtttgccattcagtaccagggagcttacagtgattccctttcctcatctgtctgtcctttctactgctcctactctggttacaaggacgagctaatgtggggtgcgtcatggctgctaagagcaacgaataacccgtattacgcaaacttcataaaatctttaggaggtggagatcagcctgacatcttcagctgggacaataaatatgctggtgcctatgttcttctctcacggagagcattacttaacaaagacagcaactttgaacaattattaagcaagcagctgagaatttcatctgcaaaatccttccagattctccttcttcctctacccaatacactcaaggaggattaatgtacaagctacctcaaagcaatcttcagtacgtaacctccataacattcttgctcacaacttacgccaaatacatgaaagccacaaaacacacattcaattgcggaagctccattatcgtccccaacgccttgataagcctatcgaagcgacaagttgattacatactcggagataacccaatcaaaatgtcatacatggttggattctcttccaatttccctaagagaatccaccacatatcatcttctcttccttcacacgcacttcgttctcaatcgttaggctgcaatggtggattccaatcgttctacactcaaaaccctaaccctaacattctcaccggagcaatcgtaggaggtccgaatcaaaacgatgggtatccagatcagagagacgattatagtcacgcggaaccggcgacttatataaacgccgccttcgtcggacctttggcgtacttctccgccggccgttcgacttgaaattgaattcgccaccgccacattctccgatttgtagtcccattgttagttaaagatccgttggtccaagcctaacgtgaaaatcagaagggacaaagttatttaaatgtaaaactcttaatgggctaagacccaatactaaaggacccgacggaaatatttctcgtggtcttatttaactctaaccatcatcattacgcgtttc

SEQ ID NO: 34787 - protein, 323 aa, Arabidopsis thaliana
  peptide (1)..(323): Ceres Seq. ID no. 12385367
MTSLFFFVLLFSSLLISNGDANPNYKEALSKSLLFFQGQRSGPLPRGQQISWRASSGLSDGSAAHVDLTGGYYDAGDNVKFNLPMAFTTTMLSWSALEYGKRMGPELENARVNIRWATDYLLKCARATPGKLYVAVGDPNVDHKCWERPEDMDTPRTVYSVSASNPGSDVAAKTAAALAAASMVFRKVDSKYSRLLLATAKDVMQFAIQYQGAYSDSLSSSVCPFYCSYSGYKDELMWGASWLLRATNNPYYANFIKSLGGGDQPDIFSWDNKYAGAYVLLSRRALLNKDSNFEQLLSKQLRISSAKSFQILLLPLPNTLKED

SEQ ID NO: 34788 - protein, 239 aa, Arabidopsis thaliana
  peptide (1)..(239): Ceres Seq. ID no. 12385368
MAFTTTMLSWSALEYGKRMGPELENARVNIRWATDYLLKCARATPGKLYVAVGDPNVDHKCWERPEDMDTPRTVYSVSASNPGSDVAAKTAAALAAASMVFRKVDSKYSRLLLATAKDVMQFAIQYQGAYSDSLSSSVCPFYCSYSGYKDELMWGASWLLRATNNPYYANFIKSLGGGDQPDIFSWDNKYAGAYVLLSRRALLNKDSNFEQLLSKQLRISSAKSFQILLLPLPNTLKED

SEQ ID NO: 34789 - protein, 233 aa, Arabidopsis thaliana
  peptide (1)..(233): Ceres Seq. ID no. 12385369
MLSWSALEYGKRMGPELENARVNIRWATDYLLKCARATPGKLYVAVGDPNVDHKCWERPEDMDTPRTVYSVSASNPGSDVAAKTAAALAAASMVFRKVDSKYSRLLLATAKDVMQFAIQYQGAYSDSLSSSVCPFYCSYSGYKDELMWGASWLLRATNNPYYANFIKSLGGGDQPDIFSWDNKYAGAYVLLSRRALLNKDSNFEQLLSKQLRISSAKSFQILLLPLPNTLKED

SEQ ID NO: 34790 - DNA, 981 bp, Arabidopsis thaliana
  misc_feature (1)..(981): Ceres Seq. ID no. 12482792
  misc_feature (1)..(981): Ortholog of  Ceres SEQ ID NO 12610412 as cited in SEQ ID NO 55977
aatctgacgaccacagcctttagcttatttgtgtggcgaagagaagagataacattcctaagcaaatctcttctctctcccattcgtctccaaagagattacagttttgagcatttctcatctctcgaagctcttctctgtgtgtgtggcgatggctgctaattcgataatggcttcctccaaacccctaatctccctgtcatccaaccaacaaccaaaccgagtccaaattcccaaattcgccaaacttccccaaattcccaaatccctcacttcctccaccgatctccgtagcaaagcactatcactctcctccgccaccgccaaatccttagctttaatcgccgctttcgctcctccgtcgatggcggaggcgatggagaaagcacagctcttcgatttcaatctcacgcttccgatcatcgttgttgagtttctcttcttgatgttcgctctcgacaaggtctattactctccgcttggtaacttcatggatcaaagagacgcttccatcaaagagaagctcgcgagtgttaaggacacttcgactgaagtaaaggagctcgatgagcaagccgccgccgtgatgagagcagctagggctgagatcgccgccgcgcttaacaagatgaagaaggagactcaggttgaagtcgaggagaagctagcggagggaaggaagaaggtggaggaagagctaaaagaagctttggcgagcttggagagtcagaaagaagaaaccattaaagctttggattctcagattgctgctcttagtgaagacattgtcaagaaggttcttccttcttaaattatatttttgttaactgtgtaattctctgtctctctatctcaaaacttatttacaagaaattactgtaaatctcttcttcttcttcttctctgtttcttggattgttcgtcgttcaaagaagaacaatttttattttgtaagtttataaataattagctctcttctgt

SEQ ID NO: 34791 - protein, 219 aa, Arabidopsis thaliana; identical to SEQ ID NO: 21586
  peptide (1)..(219): Ceres Seq. ID no. 12482793

SEQ ID NO: 34792 - protein, 213 aa, Arabidopsis thaliana; identical to SEQ ID NO: 21587
  peptide (1)..(213): Ceres Seq. ID no. 12482794

SEQ ID NO: 34793 - protein, 148 aa, Arabidopsis thaliana; identical to SEQ ID NO: 21588
  peptide (1)..(148): Ceres Seq. ID no. 12482795

SEQ ID NO: 34794 - DNA, 1216 bp, Arabidopsis thaliana
  misc_feature (1)..(1216): Ceres Seq. ID no. 12350411
  misc_feature (1)..(1216): Ortholog of  Ceres SEQ ID NO 14310460 as cited in SEQ ID NO 55105
  misc_feature (1)..(1216): Ortholog of  Ceres SEQ ID NO 15179888 as cited in SEQ ID NO 66879
  misc_feature (1)..(1216): Ortholog of  Ceres SEQ ID NO 13596056 as cited in SEQ ID NO 68307
  misc_feature (1)..(1216): Ortholog of  Ceres SEQ ID NO 12388689 as cited in SEQ ID NO 0
aataaaaagtagtactcgtgtcttactcgtgccagccactcgcatttctccagattttattatccttcctcgaaacaagtagatccacgattcgttgctgcgatcggcgttattatcgtcagctctctcgtttctgttctgtggttcgatattgctgagtttctaggctaatcttacgaatctgtgaaagtttttgagagatttggcttctgtagctcactcctgcttgatttagagcttagctaagatgacgaagaactacccaaccgtgagcgaagattacaagaaggctgttgagaagtgcaggaggaagctcagaggtttgatcgctgagaagaactgtgcacccatcatggtccgactcgcatggcactctgctggaactttcgattgtcaatcaaggactggaggtccattcggaacaatgaggtttgacgctgagcaagctcatggagccaacagtggtatccacattgctcttaggttgttggaccccatcagggagcaattccctaccatctcttttgctgatttccatcagcttgctggtgttgtggccgttgaagttactggtggccctgacattcctttccaccctggaagagaggacaagccccaaccacctccagagggtcgtcttcctgatgctaccaagggttgtgaccatttgagagatgtctttgctaagcagatgggcttatctgacaaagacattgtcgctttatctggtgcccacactctgggacgatgccacaaggataggtctggcttcgaaggtgcatggacatcaaaccctctaatcttcgacaactcttacttcaaggaactcttgagcggagagaaggaaggccttcttcagcttgtctctgacaaagcactattggacgaccctgttttccgtcctttggtcgagaaatacgctgctgatgaagatgcctttttcgctgattacgctgaggcccacatgaagctttctgagcttgggtttgctgatgcttaagctgtgacgtatgctctgtgtgtgtgtgtgtgtctccccgagagtcatggctgtttttggttgggggctggaggggtcgcattgcatttgaactttgtcatatgattgcttaatgtactctcggatttacgtatctgtttttttcggtgggttgtgatttgaacacatccgttgcgcttttgctgcttagacacattaataaaattaatttctctc

SEQ ID NO: 34795 - protein, 250 aa, Arabidopsis thaliana; identical to SEQ ID NO: 22608
  peptide (1)..(250): Ceres Seq. ID no. 12350412

SEQ ID NO: 34796 - protein, 215 aa, Arabidopsis thaliana; identical to SEQ ID NO: 22609
  peptide (1)..(215): Ceres Seq. ID no. 12350413

SEQ ID NO: 34797 - protein, 191 aa, Arabidopsis thaliana; identical to SEQ ID NO: 22610
  peptide (1)..(191): Ceres Seq. ID no. 12350414

SEQ ID NO: 34798 - DNA, 1005 bp, Arabidopsis thaliana
  misc_feature (1)..(1005): Ceres Seq. ID no. 13621995
  misc_feature (1)..(1005): Ortholog of  Ceres SEQ ID NO 12557432 as cited in SEQ ID NO 92
agagcaaaagcttctgtttattctccgattcgcagatcaattagctgggttttgattccgttgtgcgaaggactttaagaggttttgcagatcgaaatcggaagagaagaagaagatgtttctcactagaactgagtatgacagaggagtgaacactttttctccagaaggaaggctatttcaagtggaatatgccattgaagctatcaagcttggttctactgcaattggagtaaagacaaaagaaggagttgtgcttgctgtcgagaagcgtatcacgtcgccattgctggaaccgagcagtgtggagaagattatggaaattgatgaccatattggttgtgctatgagcggtttaattgctgacgcgcgcacacttgttgagcatgctagagttgaaactcaaaaccatagattctcgtatggtgagccgatgactgtagagtccacaacacaagcactgtgtgatctggctttacggtttggtgaaggagaggaagaatcaatgtctcggccgtttggagtatctcttctcattgctggccatgatgaaaatggaccaagcttgtactacactgatccttcaggaacattctggcagtgcaatgcaaaggcaattggttcaggttctgaaggagctgatagctctcttcaagagcaattcaacaaagatttgtctctacaagaagctgagactatcgctgtatctatcctaaagcaagttatggaagaaaaggtgactccaaataacgtggatattgccaaggtagcaccagcttatcatctctacactccacaagaagtcgaagcagtcatcgctcgtctttgattgaaaaaactcaatttgggtaatttacctatcagcttgtgtcacaaaacttgttacttttgtctgttagattgaggatcatgtcacattttagtcggttgtgtaagagaatcttttggctcccatgtcattcaataacctttcggatttgtgacttataaaatttcctttcctat

SEQ ID NO: 34799 - protein, 237 aa, Arabidopsis thaliana
  peptide (1)..(237): Ceres Seq. ID no. 13621996
MFLTRTEYDRGVNTFSPEGRLFQVEYAIEAIKLGSTAIGVKTKEGVVLAVEKRITSPLLEPSSVEKIMEIDDHIGCAMSGLIADARTLVEHARVETQNHRFSYGEPMTVESTTQALCDLALRFGEGEEESMSRPFGVSLLIAGHDENGPSLYYTDPSGTFWQCNAKAIGSGSEGADSSLQEQFNKDLSLQEAETIAVSILKQVMEEKVTPNNVDIAKVAPAYHLYTPQEVEAVIARL

SEQ ID NO: 34800 - protein, 170 aa, Arabidopsis thaliana
  peptide (1)..(170): Ceres Seq. ID no. 13621997
MEIDDHIGCAMSGLIADARTLVEHARVETQNHRFSYGEPMTVESTTQALCDLALRFGEGEEESMSRPFGVSLLIAGHDENGPSLYYTDPSGTFWQCNAKAIGSGSEGADSSLQEQFNKDLSLQEAETIAVSILKQVMEEKVTPNNVDIAKVAPAYHLYTPQEVEAVIARL

SEQ ID NO: 34801 - protein, 160 aa, Arabidopsis thaliana
  peptide (1)..(160): Ceres Seq. ID no. 13621998
MSGLIADARTLVEHARVETQNHRFSYGEPMTVESTTQALCDLALRFGEGEEESMSRPFGVSLLIAGHDENGPSLYYTDPSGTFWQCNAKAIGSGSEGADSSLQEQFNKDLSLQEAETIAVSILKQVMEEKVTPNNVDIAKVAPAYHLYTPQEVEAVIARL

SEQ ID NO: 34802 - DNA, 936 bp, Arabidopsis thaliana
  misc_feature (1)..(936): Ceres Seq. ID no. 12335186
  misc_feature (1)..(936): Ortholog of  Ceres SEQ ID NO 13638567 as cited in SEQ ID NO 51303
  misc_feature (1)..(936): Ortholog of  Ceres SEQ ID NO 14301396 as cited in SEQ ID NO 51789
  misc_feature (1)..(936): Ortholog of  Ceres SEQ ID NO 12610031 as cited in SEQ ID NO 55811
  misc_feature (1)..(936): Ortholog of  Ceres SEQ ID NO 12610896 as cited in SEQ ID NO 55861
  misc_feature (1)..(936): Ortholog of  Ceres SEQ ID NO 12619664 as cited in SEQ ID NO 66048
  misc_feature (1)..(936): Ortholog of  Ceres SEQ ID NO 12635952 as cited in SEQ ID NO 0
atcaaccacaaagatctctctacttcaataaatctccaccttactttaagaacaagaaaaacacagtattaacaaatggcaggaatcaaagttttcggtcacccagcttccacagccactagaagagttctcatcgctcttcacgagaagaatctcgactttgaattcgttcatatcgagctcaaagatggtgaacacaagaaagagcctttcatcttccgcaacccttttggtaaagttccagcctttgaagatggagacttcaagcttttcgaatcaagagcaatcactcaatacatagctcatttttactcagacaaaggaaaccaacttgtctcccttggctccaaggacattgcgggcatagccatgggcattgaaattgaatcgcatgagtttgacccagttggttcaaagcttgtttgggagcaagtcttaaagcctttgtatggtatgaccacagacaaaaccgttgttgaagaagaagaggctaagctagccaaggtcctcgatgtttacgaacacaggcttggtgagtccaagtatttggcttctgataaattcactttggtcgatcttcacactatccctgtgattcagtacttgcttggtacaccaactaagaaactctttgacgagcgtccacatgtcagtgcttgggttgctgacatcacttctaggccttctgctaagaaggttctttaagtgactcacaaactgttaatcagaagattgaataaagtggcgatgacctcattgccctaattctcataaacaataaaagtggcgatgacctaattgccaaattctcatacactctgtgttttttttgtgtgtgtctcctctgtttttttttttggtttgaatgtaatcttcaataataatgagtcttgatatataataaaaatatatttggtagcctaaagtttagctact

SEQ ID NO: 34803 - protein, 209 aa, Arabidopsis thaliana
  peptide (1)..(209): Ceres Seq. ID no. 12335187
MAGIKVFGHPASTATRRVLIALHEKNLDFEFVHIELKDGEHKKEPFIFRNPFGKVPAFEDGDFKLFESRAITQYIAHFYSDKGNQLVSLGSKDIAGIAMGIEIESHEFDPVGSKLVWEQVLKPLYGMTTDKTVVEEEEAKLAKVLDVYEHRLGESKYLASDKFTLVDLHTIPVIQYLLGTPTKKLFDERPHVSAWVADITSRPSAKKVL

SEQ ID NO: 34804 - protein, 111 aa, Arabidopsis thaliana
  peptide (1)..(111): Ceres Seq. ID no. 12335188
MGIEIESHEFDPVGSKLVWEQVLKPLYGMTTDKTVVEEEEAKLAKVLDVYEHRLGESKYLASDKFTLVDLHTIPVIQYLLGTPTKKLFDERPHVSAWVADITSRPSAKKVL

SEQ ID NO: 34805 - DNA, 902 bp, Arabidopsis thaliana
  misc_feature (1)..(902): Ceres Seq. ID no. 12335183
  misc_feature (1)..(902): Ortholog of  Ceres SEQ ID NO 12608620 as cited in SEQ ID NO 60192
  misc_feature (1)..(902): Ortholog of  Ceres SEQ ID NO 13662898 as cited in SEQ ID NO 66199
  misc_feature (1)..(902): Ortholog of  Ceres SEQ ID NO 14313358 as cited in SEQ ID NO 67347
  misc_feature (1)..(902): Ortholog of  Ceres SEQ ID NO 13654314 as cited in SEQ ID NO 67914
aattcaaagcagtcaactagcaagagaaagagagaaaagtgaagatgttcctccaggttcatgaaattgcttttctctttggtctcttaggcaacattgtgtcttttggggtgttcttgtcaccagtgccaacgttttatgggatatacaagaagaaatcatcaaaagggtttcagtcgataccgtacatatgtgcactagcaagtgcaactcttcttctctactacggaatcatgaagacacatgcttatctgatcattagtattaacacctttggatgtttcattgaaatctcctacttgtttctctatatcctttatgcaccaagagaggccaagatatccacgttgaagttgatagtgatatgcaacatcggtggacttggtctcttaattcttctagttaatcttttggttccaaaacaacaccgcgtctcgaccgttggatgggtttgtgctgcctacagtctcgcagtctttgcttctcccttaagcgtcatgaggaaggttataaagacaaagagtgtggaatacatgccgtttcttctctccttgtctctcactcttaacgccgtcatgtggttcttttatggacttcttatcaaagacaagttcattgctatgccaaacattctcggttttctattcggtgtagctcagatgatactatacatgatgtatcaaggttccacgaaaacggatttgccaacagagaaccaactagcaaataaaaccgatgttaacgaagtcccgatcgtggccgttgaattgcctgatgtgggatcagacaatgttgaaggatcggtgaggccaatgaagtgaagggcaaacatgcatggggaagatgtatgggagacgacatgttatcgtatgttggaataataaactttaatttctatgttt

SEQ ID NO: 34806 - protein, 258 aa, Arabidopsis thaliana
  peptide (1)..(258): Ceres Seq. ID no. 12335184
MFLQVHEIAFLFGLLGNIVSFGVFLSPVPTFYGIYKKKSSKGFQSIPYICALASATLLLYYGIMKTHAYLIISINTFGCFIEISYLFLYILYAPREAKISTLKLIVICNIGGLGLLILLVNLLVPKQHRVSTVGWVCAAYSLAVFASPLSVMRKVIKTKSVEYMPFLLSLSLTLNAVMWFFYGLLIKDKFIAMPNILGFLFGVAQMILYMMYQGSTKTDLPTENQLANKTDVNEVPIVAVELPDVGSDNVEGSVRPMK

SEQ ID NO: 34807 - protein, 195 aa, Arabidopsis thaliana
  peptide (1)..(195): Ceres Seq. ID no. 12335185
MKTHAYLIISINTFGCFIEISYLFLYILYAPREAKISTLKLIVICNIGGLGLLILLVNLLVPKQHRVSTVGWVCAAYSLAVFASPLSVMRKVIKTKSVEYMPFLLSLSLTLNAVMWFFYGLLIKDKFIAMPNILGFLFGVAQMILYMMYQGSTKTDLPTENQLANKTDVNEVPIVAVELPDVGSDNVEGSVRPMK

SEQ ID NO: 34808 - DNA, 1156 bp, Arabidopsis thaliana
  misc_feature (1)..(1156): Ceres Seq. ID no. 13494146
  misc_feature (1)..(1156): Ortholog of  Ceres SEQ ID NO 13582052 as cited in SEQ ID NO 59823
  misc_feature (1)..(1156): Ortholog of  Ceres SEQ ID NO 13659378 as cited in SEQ ID NO 67014
  misc_feature (1)..(1156): Ortholog of  Ceres SEQ ID NO 13599365 as cited in SEQ ID NO 0
aaaaaaggaaacacacaaaagccctaaatctctttttaacctctgaagcaaaaaccaccacatcggagatttctaatccaacgaaaacgcttcaattttcttgcgatttctcttcctctgcgaaaaacccttttggattcagactttcctcggtttaccagttggactcagatagaagcttatatctgtacctgataatttgcagcaaatatggatgactgggaggacgagaaaattgcaccacttccagcaaaagttgagcttaaaagtaactgggatgatgaagatgtggatgagaatgaaattaaggattcatgggaggatgatgatgatgaacctgctcagccgcctgttataaatcctgctccggagaaggctcctaagaaagcagcccccaaaactgttgaaaagaagggtaaagcagtcgaagttccaaaggaagcaccaaaagaaaaacctctagatcctatagcggagaaacttcgccagcagaggcttgttgaggaagccgactaccgggcaactgctgagctctttggagtgaaggatgatgacaaaaaccttgatatgtttatccccaagtctgaaagcgattttttggaatatgctgaaatgatttctcataggattaaaccatatgagaaaagttatcactatatagcgctgctcaaaacaatcatgagactttcattgaccaacatgaaagcagctgatgttaaagatgttgcttcgtccattacaacgatagcaaatgaaaaactaaaggcagagaaagaagctgctgcgggaaaaaagaaaggtggaaagaagaaacaacttattgtagataaggccaatgacgatctagtggctggtccttatgatgccatggatgacttcgacttcatgtagattaaaagagctttttgagcaaatgcaaattggatttgtccagcgtctattttatcatttatctatcactcaaaagaaacacatttttcttaattttggtttgaatagagcaagaagagccaaatttctggttgcggaaatatatagttggaacatgggaagcttttgttttggtttggtctgggaattctctagagtcatgtttttggttctatttgttggttgaaaaagctatacttaaagtgtccgtataaatttattattg

SEQ ID NO: 34809 - protein, 226 aa, Arabidopsis thaliana
  peptide (1)..(226): Ceres Seq. ID no. 13494147
MDDWEDEKIAPLPAKVELKSNWDDEDVDENEIKDSWEDDDDEPAQPPVINPAPEKAPKKAAPKTVEKKGKAVEVPKEAPKEKPLDPIAEKLRQQRLVEEADYRATAELFGVKDDDKNLDMFIPKSESDFLEYAEMISHRIKPYEKSYHYIALLKTIMRLSLTNMKAADVKDVASSITTIANEKLKAEKEAAAGKKKGGKKKQLIVDKANDDLVAGPYDAMDDFDFM

SEQ ID NO: 34810 - DNA, 1239 bp, Arabidopsis thaliana
  misc_feature (1)..(1239): Ceres Seq. ID no. 13501400
  misc_feature (1)..(1239): Ortholog of  Ceres SEQ ID NO 13597407 as cited in SEQ ID NO 64106
ctcagacaatgtggatctcagatgtttgctgtatttttggttggctcgctgtagcgtttgcacatgatattatactgcttaatattggacgactcttcttggggtttggggttggtctcattagttatgtggttcctgtgtatatagcagaaattacacctaaaacatttcgtggaggattttcttattccaatcagcttctacaatgtcttgggatttcactcatgttcttcaccggaaactttttccattggcgaacattagctcttttaagtgcaatcccaagtgctttccaagtgatatgtttattttttattcctgaatctcctagatggctggcgatgtatggtcaagatcaagagcttgaagtttcgttgaaaaatttaaggggagaaaatagtgatattctaaaggaagctgctgaaatcagagaaacagtggaaatatccagaaaagagtctcaaagtggaataagagacttgttccatataggaaacgcacattccttaatcattggattgggattaatgctcttgcaacaattttgtgggagcgcggcgataagtgcttatgctgctcgtatattcgacaaagcaggttttccaagcgacataggaacaaccatcctcgcagtgattctgataccgcaatctatagttgtcatgttaaccgttgaccgatggggacgccgaccacttcttatgatttcttctatcggaatgtgcatatgctcattttttattggcctttcatactaccttcagaagaatggtgaatttcagaagttatgttccgttatgttaatcgtcggtttagtgggttatgtctcatcctttggcattgggctaggtggactaccatgggttataatgtctgaggtatttccggtgaatgtgaaaatcaccgccggtagccttgtaacgatgtcaaattggttttttaattggattatcatctatagttttaatttcatgatacagtggagcgcttccgtaacatatttcatattttctggagtttctctggtgacgatcgtattcatatggacattggtgcctgagacgaaaggccgaacactcgaagagattcaaacatcattagtccgactttcgtaaaatctatgtatggattatacatataagtctcttgaatagtctttttaaccgtacattaatattttgttaaataagagttttctctcactttgattaaaaattaataatggctatgattttatct

SEQ ID NO: 34811 - protein, 370 aa, Arabidopsis thaliana
  peptide (1)..(370): Ceres Seq. ID no. 13501401
QTMWISDVCCIFGWLAVAFAHDIILLNIGRLFLGFGVGLISYVVPVYIAEITPKTFRGGFSYSNQLLQCLGISLMFFTGNFFHWRTLALLSAIPSAFQVICLFFIPESPRWLAMYGQDQELEVSLKNLRGENSDILKEAAEIRETVEISRKESQSGIRDLFHIGNAHSLIIGLGLMLLQQFCGSAAISAYAARIFDKAGFPSDIGTTILAVILIPQSIVVMLTVDRWGRRPLLMISSIGMCICSFFIGLSYYLQKNGEFQKLCSVMLIVGLVGYVSSFGIGLGGLPWVIMSEVFPVNVKITAGSLVTMSNWFFNWIIIYSFNFMIQWSASVTYFIFSGVSLVTIVFIWTLVPETKGRTLEEIQTSLVRLS

SEQ ID NO: 34812 - protein, 368 aa, Arabidopsis thaliana
  peptide (1)..(368): Ceres Seq. ID no. 13501402
MWISDVCCIFGWLAVAFAHDIILLNIGRLFLGFGVGLISYVVPVYIAEITPKTFRGGFSYSNQLLQCLGISLMFFTGNFFHWRTLALLSAIPSAFQVICLFFIPESPRWLAMYGQDQELEVSLKNLRGENSDILKEAAEIRETVEISRKESQSGIRDLFHIGNAHSLIIGLGLMLLQQFCGSAAISAYAARIFDKAGFPSDIGTTILAVILIPQSIVVMLTVDRWGRRPLLMISSIGMCICSFFIGLSYYLQKNGEFQKLCSVMLIVGLVGYVSSFGIGLGGLPWVIMSEVFPVNVKITAGSLVTMSNWFFNWIIIYSFNFMIQWSASVTYFIFSGVSLVTIVFIWTLVPETKGRTLEEIQTSLVRLS

SEQ ID NO: 34813 - protein, 296 aa, Arabidopsis thaliana
  peptide (1)..(296): Ceres Seq. ID no. 13501403
MFFTGNFFHWRTLALLSAIPSAFQVICLFFIPESPRWLAMYGQDQELEVSLKNLRGENSDILKEAAEIRETVEISRKESQSGIRDLFHIGNAHSLIIGLGLMLLQQFCGSAAISAYAARIFDKAGFPSDIGTTILAVILIPQSIVVMLTVDRWGRRPLLMISSIGMCICSFFIGLSYYLQKNGEFQKLCSVMLIVGLVGYVSSFGIGLGGLPWVIMSEVFPVNVKITAGSLVTMSNWFFNWIIIYSFNFMIQWSASVTYFIFSGVSLVTIVFIWTLVPETKGRTLEEIQTSLVRLS

SEQ ID NO: 34814 - DNA, 1196 bp, Arabidopsis thaliana
  misc_feature (1)..(1196): Ceres Seq. ID no. 12371569
  misc_feature (1)..(1196): Ortholog of  Ceres SEQ ID NO 13582369 as cited in SEQ ID NO 56620
ttttttcttcgctcctctcttagcatcgccgtgaatcgttggtctcagtttctccgtccatctttgattcgtcgatccgttagttgctatctagctgcaatgggtacagagacggttgtgcatgatcaggcaagatgggcaatggctgcaatggaacgaaggcttgctgttgcaaaagctcagcttcttcaacaacaacaacagaagaatgagaaagataagaaggggacttctgatgtagatgtctctatgaaagaatctcatcaagctgattcactgcctactccctcaaagacatcaattaaaaaagtagatcccaaggatgatgattctgttgcatatacaaagttgtcccatcccgttgatgagaatctgctggcaaccaatgttaagttttctagtgcaaagggaactatagtagacaaggttttgcataaccttcttcgaagcggtgactctgctcaaaagtacttgcaaggtactaaaagtgtgaagctggataactatatccttcttgataattttgtacagtcacggtcttcggcctctggttctaaaaaggcatcacagaaggattcaaaacgttctaaaagccgtatgtctatgaagcgactcaagaaatctggtgctttgcatatccctaaagatctccaaaagtttgatttgtttaagccaatgcatggtatgtgggaaagttacatgatgaaactcatcaaggtgaccgggaagattcaattatctttaactcttctctcagcagatcttcatggtgctttcatgtttgttgctgagtgcaagatagcatcattcactggtgtacaaggcataatggtgcgcgagacatccgaaacatttggaataatcacacgagatgacaaatttcgagttgtaccgaagaagctctctgtcttcatcatccaactcgactgctggaagattactttacatggggacaagtttatttcaagagacaatattgttcaacgttaatgctaaaaatgaagctctagtcgtttttcttagctagtggtagaaagcaaccattgatgaccacagaagcatcctaatctcacaagattttgctttagatctttccttatggacccaacattttaatatatttcttaatcttgaattttgtatgaatcctctgtaaatatactactgtgttattgttaatactaatttttattatt

SEQ ID NO: 34815 - protein, 329 aa, Arabidopsis thaliana
  peptide (1)..(329): Ceres Seq. ID no. 12371570
FFLRSSLSIAVNRWSQFLRPSLIRRSVSCYLAAMGTETVVHDQARWAMAAMERRLAVAKAQLLQQQQQKNEKDKKGTSDVDVSMKESHQADSLPTPSKTSIKKVDPKDDDSVAYTKLSHPVDENLLATNVKFSSAKGTIVDKVLHNLLRSGDSAQKYLQGTKSVKLDNYILLDNFVQSRSSASGSKKASQKDSKRSKSRMSMKRLKKSGALHIPKDLQKFDLFKPMHGMWESYMMKLIKVTGKIQLSLTLLSADLHGAFMFVAECKIASFTGVQGIMVRETSETFGIITRDDKFRVVPKKLSVFIIQLDCWKITLHGDKFISRDNIVQR

SEQ ID NO: 34816 - protein, 296 aa, Arabidopsis thaliana
  peptide (1)..(296): Ceres Seq. ID no. 12371571
MGTETVVHDQARWAMAAMERRLAVAKAQLLQQQQQKNEKDKKGTSDVDVSMKESHQADSLPTPSKTSIKKVDPKDDDSVAYTKLSHPVDENLLATNVKFSSAKGTIVDKVLHNLLRSGDSAQKYLQGTKSVKLDNYILLDNFVQSRSSASGSKKASQKDSKRSKSRMSMKRLKKSGALHIPKDLQKFDLFKPMHGMWESYMMKLIKVTGKIQLSLTLLSADLHGAFMFVAECKIASFTGVQGIMVRETSETFGIITRDDKFRVVPKKLSVFIIQLDCWKITLHGDKFISRDNIVQR

SEQ ID NO: 34817 - protein, 282 aa, Arabidopsis thaliana
  peptide (1)..(282): Ceres Seq. ID no. 12371572
MAAMERRLAVAKAQLLQQQQQKNEKDKKGTSDVDVSMKESHQADSLPTPSKTSIKKVDPKDDDSVAYTKLSHPVDENLLATNVKFSSAKGTIVDKVLHNLLRSGDSAQKYLQGTKSVKLDNYILLDNFVQSRSSASGSKKASQKDSKRSKSRMSMKRLKKSGALHIPKDLQKFDLFKPMHGMWESYMMKLIKVTGKIQLSLTLLSADLHGAFMFVAECKIASFTGVQGIMVRETSETFGIITRDDKFRVVPKKLSVFIIQLDCWKITLHGDKFISRDNIVQR

SEQ ID NO: 34818 - DNA, 715 bp, Arabidopsis thaliana
  misc_feature (1)..(715): Ceres Seq. ID no. 13488334
  misc_feature (1)..(715): Ortholog of  Ceres SEQ ID NO 14314198 as cited in SEQ ID NO 57472
  misc_feature (1)..(715): Ortholog of  Ceres SEQ ID NO 12783998 as cited in SEQ ID NO 61535
  misc_feature (1)..(715): Ortholog of  Ceres SEQ ID NO 15174264 as cited in SEQ ID NO 61877
atcaagcaatccaaagcgattaaacctactcaatctcagatctcgttaaacctagaaacctcgagaaaaaccgtatcaatggcgccgaaagcagagaagaagcccgctgagaagaaaccagcttccgagaagccggtggaggagaaatcaaaagccgagaaagctccggcggagaagaaaccaaaggccggaaagaagctcccgaaggaagctggtgccggaggcgacaagaagaaaaagatgaagaagaagagtgtcgagacttacaagatctacatcttcaaggtgcttaagcaagttcatcccgatatcggaatctccagcaaagcgatggggatcatgaacagtttcattaacgatatcttcgagaagcttgctcaagaggcgtcgaagcttgcgaggtacaataagaaacctacgatcacttctcgggagattcagactgctgtgagattggtgcttcctggagagttggcgaagcatgccgtttctgaggggactaaagccgtcacgaaattcaccagctcttgaataattgagttagggttcttatcatatggatgttgctctgctttagggttaatggaatttggaagatctgagttagggttttagaatgtcctttaagtatctctgtttcgtttggaatttctacgttttgtaagtactgctgctattgataatgtttggagtctatatttgctctttgtgtccc

SEQ ID NO: 34819 - protein, 176 aa, Arabidopsis thaliana
  peptide (1)..(176): Ceres Seq. ID no. 13488335
IKQSKAIKPTQSQISLNLETSRKTVSMAPKAEKKPAEKKPASEKPVEEKSKAEKAPAEKKPKAGKKLPKEAGAGGDKKKKMKKKSVETYKIYIFKVLKQVHPDIGISSKAMGIMNSFINDIFEKLAQEASKLARYNKKPTITSREIQTAVRLVLPGELAKHAVSEGTKAVTKFTSS

SEQ ID NO: 34820 - protein, 150 aa, Arabidopsis thaliana
  peptide (1)..(150): Ceres Seq. ID no. 13488336
MAPKAEKKPAEKKPASEKPVEEKSKAEKAPAEKKPKAGKKLPKEAGAGGDKKKKMKKKSVETYKIYIFKVLKQVHPDIGISSKAMGIMNSFINDIFEKLAQEASKLARYNKKPTITSREIQTAVRLVLPGELAKHAVSEGTKAVTKFTSS

SEQ ID NO: 34821 - protein, 96 aa, Arabidopsis thaliana
  peptide (1)..(96): Ceres Seq. ID no. 13488337
MKKKSVETYKIYIFKVLKQVHPDIGISSKAMGIMNSFINDIFEKLAQEASKLARYNKKPTITSREIQTAVRLVLPGELAKHAVSEGTKAVTKFTSS

SEQ ID NO: 34822 - DNA, 1507 bp, Arabidopsis thaliana
  misc_feature (1)..(1507): Ceres Seq. ID no. 12714794
  misc_feature (1)..(1507): Ortholog of  Ceres SEQ ID NO 13654468 as cited in SEQ ID NO 68094
acctgaatattgactacgcattataagaggttttgttttggggtttttccttcttcacatatcatttttctgattctcccacgaagatgaaccacctcgttcgtaaaagctccgtcggttactccgccttgaggtccgtttcgtacctccgtcaatctgccgttacctctccacctccgattttctccgccgccgcttcaaccgttcgccagttcacttccgccggctatccttccaacagttttcaattgacgccgccgacgaattggggaatccggatagttccggagaggaaggcgtttgtgattgagcgattcggtaaatacgctacgacgttgccgtcggggattcatttcctcattccgttcgtggatcgtattgcttatgttcattctctcaaggaagaagctatcccgattccgaatcagactgcgattactaaagacaacgttagtatccacatcgatggtgttctctacgttaagattgtggatcctaagttagcttcttatggcgttgagagtcctatctatgctgttgtacagctggctcagaccacaatgcgtagtgagcttggtaagatcactcttgataagacctttgaggaacgagacactctcaacgagaagatagtggaagccatcaatgttgctgcaaaagactggggtcttcagtgccttcgttatgagataagggatattatgccccctcatggagtgcgagctgctatggaaatgcaagctgaagctgagcgtaaaaagagagcccagattcttgagtctgaaggagaaaggcaatcccatatcaacattgctgatggtaagaaaagttctgtaatcttggcatctgaagcagcaaagatggaccaggtgaatcgagcacaaggtgaggcagaagcaatactagctagagcacaagcaactgcgaaaggcctggtcttgttatctcagtccctcaaggaaactgggggagtagaggcggcgagtttgagagttgcagagcaatacattacagccttcggtaacattgccaaggagggtacgataatgttgcttccaagtggtgcttcaaatcctgctagcatgattgctcaagctttaacaatgtacaaaagccttgtcatcaatggtccaagcaaagatcaccaagaaacacaagcacttgatgaaacagatttggaagagttggaagacatgggtgagaaacatatatcagaaggctctaataaccgatcaggctcaatatcatttgacacagagaaaccaggtcacaccggtgaaccacgattttctcttcagaaccgcaacaaggatccgcagtaggcagccgaaccggggatgagataaattctttgggcttgagaaaactggaaaccatttttcatctttcaaatatgaggcagtaaccatcttttccgtttgaatagctagaatatcatcactttgcatatagaaacgaatctgaacatctgttctccgataagaattttcctactggatttgttatg

SEQ ID NO: 34823 - protein, 411 aa, Arabidopsis thaliana
  peptide (1)..(411): Ceres Seq. ID no. 12714795
MNHLVRKSSVGYSALRSVSYLRQSAVTSPPPIFSAAASTVRQFTSAGYPSNSFQLTPPTNWGIRIVPERKAFVIERFGKYATTLPSGIHFLIPFVDRIAYVHSLKEEAIPIPNQTAITKDNVSIHIDGVLYVKIVDPKLASYGVESPIYAVVQLAQTTMRSELGKITLDKTFEERDTLNEKIVEAINVAAKDWGLQCLRYEIRDIMPPHGVRAAMEMQAEAERKKRAQILESEGERQSHINIADGKKSSVILASEAAKMDQVNRAQGEAEAILARAQATAKGLVLLSQSLKETGGVEAASLRVAEQYITAFGNIAKEGTIMLLPSGASNPASMIAQALTMYKSLVINGPSKDHQETQALDETDLEELEDMGEKHISEGSNNRSGSISFDTEKPGHTGEPRFSLQNRNKDPQ

SEQ ID NO: 34824 - protein, 253 aa, Arabidopsis thaliana
  peptide (1)..(253): Ceres Seq. ID no. 12714796
MRSELGKITLDKTFEERDTLNEKIVEAINVAAKDWGLQCLRYEIRDIMPPHGVRAAMEMQAEAERKKRAQILESEGERQSHINIADGKKSSVILASEAAKMDQVNRAQGEAEAILARAQATAKGLVLLSQSLKETGGVEAASLRVAEQYITAFGNIAKEGTIMLLPSGASNPASMIAQALTMYKSLVINGPSKDHQETQALDETDLEELEDMGEKHISEGSNNRSGSISFDTEKPGHTGEPRFSLQNRNKDPQ

SEQ ID NO: 34825 - protein, 206 aa, Arabidopsis thaliana
  peptide (1)..(206): Ceres Seq. ID no. 12714797
MPPHGVRAAMEMQAEAERKKRAQILESEGERQSHINIADGKKSSVILASEAAKMDQVNRAQGEAEAILARAQATAKGLVLLSQSLKETGGVEAASLRVAEQYITAFGNIAKEGTIMLLPSGASNPASMIAQALTMYKSLVINGPSKDHQETQALDETDLEELEDMGEKHISEGSNNRSGSISFDTEKPGHTGEPRFSLQNRNKDPQ

SEQ ID NO: 34826 - DNA, 1887 bp, Arabidopsis thaliana
  misc_feature (1)..(1887): Ceres Seq. ID no. 12371393
  misc_feature (1)..(1887): Ortholog of  Ceres SEQ ID NO 15171610 as cited in SEQ ID NO 57317
aacgcaacgccgggaagcttatcaggggtttggtgcgttgaatttgtggatcaagagacgatgcaaattcaatgcaaaaccctaactttcacagtttcttcgattccttgtaacccaaagctaccattcccatcttcactcactttacggtcatggaatcctccattcccgagtttcaggagctcctctgtttccggaccaaagtcgtccctgaagctgaacaggtttttaagaaactgtgcaagtccaaatcaggagcttgttgttaaaggagaaaccggaaatgggtcgatttcggagctccaaggagatgcagcaaatggttcgatttcgccggtggaagtggaagcagaagtagaagaagtgaaggtagatgatttggcgaatcagagtatttggggacagatgaaagagatcgtcatgtttaccggacctgccgcgggattgtggctatgtgggccgttgatgagtctcattgatacggcggtgattggtcaaggaagctcactcgaactcgctgctttaggtcctgctaccgtcatctgtgattatttgtgttatacgttcatgttcctctcagttgcgacttcaaatcttgttgctacctctcttgctcggcaggataaagatgaagtacaacatcagatatcgatcttgcttttcattgggttggcttgtggagtcacgatgatggtgttgacaagactgtttggttcctgggcactaactgcttttacaggggtaaagaatgccgacattgttccagcagctaataaatatgttcagattcgtggtttagcatggccagctgttctcattggatgggttgctcaaagtgcaagtcttggtatgaaagactcatggggacctcttaaggctttggcggttgctagtgcaataaacggtgttggtgatgtggtcttatgcacctttctaggatatggtatagcaggtgcagcttgggcaactatggtgtcacaagttgttgctgcttatatgatgatggacgcattgaacaagaaaggatacagcgcattctcattctgtgttccttctccaagtgaacttttgacgatttttggactcgctgcccctgtctttataactatgatgtcaaaggttttgttctatacgctccttgtgtactttgctacatcaatgggtacaaatatcatagctgctcatcaggttatgcttcagatatataccatgagtacggtttggggggagcctctctctcaaactgcacagtcctttatgcctgagcttttattcggaatcaatcgtaatttgcctaaagctagggtgcttctgaagtcactagttatcatcggagctacgctaggaatagtagtcggaaccattggcacagcagttccatggctgttccctggcatcttcacacgtgacaaggttgtcacatccgagatgcacaaggtcataataccgtattttcttgctttatccatcactccaagtactcacagtcttgaaggcaccttactggctggaagagatcttagatatatcagcttgtcaatgactggatgcttagcggtcgctgggcttctacttatgcttctgagcaatggaggatttggtttgagaggctgctggtacgctctcgtgggattccaatgggctcggttttctctatctcttttccgccttctatcgagggatggtgtactgtactccgaagatacaagccgatacactgagaaagtgaaagctgcgtagctcagcaagtcaacgtatacctcacaagaaaaagtataatgaacagagaacagcttcattcagttgtagatcaatgtgttactctgtttcaagattgtattctttaagaacatgaaaatgtattcgactgaatagaaaagtcttggc

SEQ ID NO: 34827 - protein, 579 aa, Arabidopsis thaliana
  peptide (1)..(579): Ceres Seq. ID no. 12371394
NATPGSLSGVWCVEFVDQETMQIQCKTLTFTVSSIPCNPKLPFPSSLTLRSWNPPFPSFRSSSVSGPKSSLKLNRFLRNCASPNQELVVKGETGNGSISELQGDAANGSISPVEVEAEVEEVKVDDLANQSIWGQMKEIVMFTGPAAGLWLCGPLMSLIDTAVIGQGSSLELAALGPATVICDYLCYTFMFLSVATSNLVATSLARQDKDEVQHQISILLFIGLACGVTMMVLTRLFGSWALTAFTGVKNADIVPAANKYVQIRGLAWPAVLIGWVAQSASLGMKDSWGPLKALAVASAINGVGDVVLCTFLGYGIAGAAWATMVSQVVAAYMMMDALNKKGYSAFSFCVPSPSELLTIFGLAAPVFITMMSKVLFYTLLVYFATSMGTNIIAAHQVMLQIYTMSTVWGEPLSQTAQSFMPELLFGINRNLPKARVLLKSLVIIGATLGIVVGTIGTAVPWLFPGIFTRDKVVTSEMHKVIIPYFLALSITPSTHSLEGTLLAGRDLRYISLSMTGCLAVAGLLLMLLSNGGFGLRGCWYALVGFQWARFSLSLFRLLSRDGVLYSEDTSRYTEKVKAA

SEQ ID NO: 34828 - protein, 559 aa, Arabidopsis thaliana
  peptide (1)..(559): Ceres Seq. ID no. 12371395
MQIQCKTLTFTVSSIPCNPKLPFPSSLTLRSWNPPFPSFRSSSVSGPKSSLKLNRFLRNCASPNQELVVKGETGNGSISELQGDAANGSISPVEVEAEVEEVKVDDLANQSIWGQMKEIVMFTGPAAGLWLCGPLMSLIDTAVIGQGSSLELAALGPATVICDYLCYTFMFLSVATSNLVATSLARQDKDEVQHQISILLFIGLACGVTMMVLTRLFGSWALTAFTGVKNADIVPAANKYVQIRGLAWPAVLIGWVAQSASLGMKDSWGPLKALAVASAINGVGDVVLCTFLGYGIAGAAWATMVSQVVAAYMMMDALNKKGYSAFSFCVPSPSELLTIFGLAAPVFITMMSKVLFYTLLVYFATSMGTNIIAAHQVMLQIYTMSTVWGEPLSQTAQSFMPELLFGINRNLPKARVLLKSLVIIGATLGIVVGTIGTAVPWLFPGIFTRDKVVTSEMHKVIIPYFLALSITPSTHSLEGTLLAGRDLRYISLSMTGCLAVAGLLLMLLSNGGFGLRGCWYALVGFQWARFSLSLFRLLSRDGVLYSEDTSRYTEKVKAA

SEQ ID NO: 34829 - protein, 444 aa, Arabidopsis thaliana
  peptide (1)..(444): Ceres Seq. ID no. 12371396
MKEIVMFTGPAAGLWLCGPLMSLIDTAVIGQGSSLELAALGPATVICDYLCYTFMFLSVATSNLVATSLARQDKDEVQHQISILLFIGLACGVTMMVLTRLFGSWALTAFTGVKNADIVPAANKYVQIRGLAWPAVLIGWVAQSASLGMKDSWGPLKALAVASAINGVGDVVLCTFLGYGIAGAAWATMVSQVVAAYMMMDALNKKGYSAFSFCVPSPSELLTIFGLAAPVFITMMSKVLFYTLLVYFATSMGTNIIAAHQVMLQIYTMSTVWGEPLSQTAQSFMPELLFGINRNLPKARVLLKSLVIIGATLGIVVGTIGTAVPWLFPGIFTRDKVVTSEMHKVIIPYFLALSITPSTHSLEGTLLAGRDLRYISLSMTGCLAVAGLLLMLLSNGGFGLRGCWYALVGFQWARFSLSLFRLLSRDGVLYSEDTSRYTEKVKAA

SEQ ID NO: 34830 - DNA, 935 bp, Arabidopsis thaliana
  misc_feature (1)..(935): Ceres Seq. ID no. 12366989
  misc_feature (1)..(935): Ortholog of  Ceres SEQ ID NO 13638849 as cited in SEQ ID NO 52046
  misc_feature (1)..(935): Ortholog of  Ceres SEQ ID NO 13599613 as cited in SEQ ID NO 0
aactttatcacgctattctcaaacaagcaaagaaccttaaccaaaaagaaaacgtctacggagacatatggagaggaaacatcacttcgtgttagttcacaacgcttatcatggagcctggatctggtacaagctcaagcccctccttgaatcagccggccaccgcgttactgctgtcgaactcgccgcctccgggatcgacccacgaccaatccaggccgttgaaaccgtcgacgaatactccaaaccgttgatcgaaaccctcaaatctcttccagagaacgaagaggtaattctggttggattcagcttcggaggcatcaacatcgctctcgccgccgacatatttccggcgaagattaaggttcttgtgttcctcaacgccttcttgcccgacacaacccacgtgccttctcacgttctggacaagtatatggagatgcctggaggtttgggagattgtgagttttcatctcatgaaacaagaaatgggacgatgagtttattgaagatgggaccaaaattcatgaaggcacgtctttaccaaaattgtcccatagaggattacgagctggcaaaaatgttgcataggcaagggtcatttttcacagaggatctatcaaagaaagaaaagtttagcgaggaaggatatggttcggtgcaacgagtttacgtaatgagtagtgaagacaaagccatcccctgcgatttcattcgttggatgattgataatttcaacgtctcgaaagtctacgagatcgatggcggagatcacatggtgatgctctccaaaccccaaaaactctttgactctctctctgctattgccaccgattatatgtaataatcttaagtccgttttacttttttctcatcgttactaataaaacaaacccctttttccgggcaactttcatcaaaaaacaaaacttatg

SEQ ID NO: 34831 - protein, 258 aa, Arabidopsis thaliana
  peptide (1)..(258): Ceres Seq. ID no. 12366990
MERKHHFVLVHNAYHGAWIWYKLKPLLESAGHRVTAVELAASGIDPRPIQAVETVDEYSKPLIETLKSLPENEEVILVGFSFGGINIALAADIFPAKIKVLVFLNAFLPDTTHVPSHVLDKYMEMPGGLGDCEFSSHETRNGTMSLLKMGPKFMKARLYQNCPIEDYELAKMLHRQGSFFTEDLSKKEKFSEEGYGSVQRVYVMSSEDKAIPCDFIRWMIDNFNVSKVYEIDGGDHMVMLSKPQKLFDSLSAIATDYM

SEQ ID NO: 34832 - protein, 136 aa, Arabidopsis thaliana
  peptide (1)..(136): Ceres Seq. ID no. 12366991
MEMPGGLGDCEFSSHETRNGTMSLLKMGPKFMKARLYQNCPIEDYELAKMLHRQGSFFTEDLSKKEKFSEEGYGSVQRVYVMSSEDKAIPCDFIRWMIDNFNVSKVYEIDGGDHMVMLSKPQKLFDSLSAIATDYM

SEQ ID NO: 34833 - protein, 134 aa, Arabidopsis thaliana
  peptide (1)..(134): Ceres Seq. ID no. 12366992
MPGGLGDCEFSSHETRNGTMSLLKMGPKFMKARLYQNCPIEDYELAKMLHRQGSFFTEDLSKKEKFSEEGYGSVQRVYVMSSEDKAIPCDFIRWMIDNFNVSKVYEIDGGDHMVMLSKPQKLFDSLSAIATDYM

SEQ ID NO: 34834 - DNA, 1299 bp, Arabidopsis thaliana
  misc_feature (1)..(1299): Ceres Seq. ID no. 12338263
  misc_feature (1)..(1299): Ortholog of  Ceres SEQ ID NO 14316451 as cited in SEQ ID NO 57956
  misc_feature (1)..(1299): Ortholog of  Ceres SEQ ID NO 15224799 as cited in SEQ ID NO 0
agatagttcgatgaactcattggtttggtatagttggcttggtggaattatcattggaaccatgactggtgctaacatggttttggaagatcattatcgagccggtccacggaatgttgttataaccggaagcactaggggactagggaaagctcttgctagagagtttcttctctctggagacagagtcattgtcacatctcgcagttctgaatctgttgatatgactgtcaaagagctagagcaaaatctcaaagagattatgagtaacgctagcgagtcagctagaaagaaactgagtgatgctaaggtagttggtattgcctgtgatgtttgcaaacccgaagacgttgagaagctgtcgaatttcgctgtaaaagagcttggttccatcaacatatggataaacaatgctggtactaacaaaggttttagaccgctactcgagttcacggaagaagatatcacacagattgtctccacaaatttgattggatcaattctatgtacacgaggggctatagatgtgatgagcagacagcacagtggtggacacatttttaacatggatggtgctggctctggaggttcaagtactcctctcactgccgtatatggttcaacaaaatgtggacttaggcagtttcatgggtctatagtgaaagaaagccaaaaaacaaacgttggccttcacactgcatcccctggcatggttctgacagaacttcttctcagtggttcgagcattaaaaacaagcagatgtttaacataatctgtgagcttcctgagacagtagctagaactttggtaccacgaatgcgagttgtgaaaggttcgggaaaagccgtcaattacctaactcctcctcggatattgttagctattgtcacttcctggctaaggagaggccgatggtttgatgaccaaggacgggcgttatatgcagcagaagcagatagactaaggaactgggcagagaacaggacgaggttgtcgttaacagacgcgatggagatgtatacagagaatacttgggtctctgttttctctctttctgttgtttgcgctttcatcatcttacaaagcacaacacctagctcttttccaggcacataacaaacatcttcctcggatgtgttttaagaaaattgtaaacgtacatgttatgtataaaaaacatatatataacagaaccgatttgttcatgtaaacacttcttatagttgtagaatgtgtcgttgttgaaaacaatgaaaaaatagattgtaataaacttttatcagattgtagtattttcc

SEQ ID NO: 34835 - protein, 371 aa, Arabidopsis thaliana
  peptide (1)..(371): Ceres Seq. ID no. 12338264
DSSMNSLVWYSWLGGIIIGTMTGANMVLEDHYRAGPRNVVITGSTRGLGKALAREFLLSGDRVIVTSRSSESVDMTVKELEQNLKEIMSNASESARKKLSDAKVVGIACDVCKPEDVEKLSNFAVKELGSINIWINNAGTNKGFRPLLEFTEEDITQIVSTNLIGSILCTRGAIDVMSRQHSGGHIFNMDGAGSGGSSTPLTAVYGSTKCGLRQFHGSIVKESQKTNVGLHTASPGMVLTELLLSGSSIKNKQMFNIICELPETVARTLVPRMRVVKGSGKAVNYLTPPRILLAIVTSWLRRGRWFDDQGRALYAAEADRLRNWAENRTRLSLTDAMEMYTENTWVSVFSLSVVCAFIILQSTTPSSFPGT

SEQ ID NO: 34836 - protein, 368 aa, Arabidopsis thaliana
  peptide (1)..(368): Ceres Seq. ID no. 12338265
MNSLVWYSWLGGIIIGTMTGANMVLEDHYRAGPRNVVITGSTRGLGKALAREFLLSGDRVIVTSRSSESVDMTVKELEQNLKEIMSNASESARKKLSDAKVVGIACDVCKPEDVEKLSNFAVKELGSINIWINNAGTNKGFRPLLEFTEEDITQIVSTNLIGSILCTRGAIDVMSRQHSGGHIFNMDGAGSGGSSTPLTAVYGSTKCGLRQFHGSIVKESQKTNVGLHTASPGMVLTELLLSGSSIKNKQMFNIICELPETVARTLVPRMRVVKGSGKAVNYLTPPRILLAIVTSWLRRGRWFDDQGRALYAAEADRLRNWAENRTRLSLTDAMEMYTENTWVSVFSLSVVCAFIILQSTTPSSFPGT

SEQ ID NO: 34837 - protein, 351 aa, Arabidopsis thaliana
  peptide (1)..(351): Ceres Seq. ID no. 12338266
MTGANMVLEDHYRAGPRNVVITGSTRGLGKALAREFLLSGDRVIVTSRSSESVDMTVKELEQNLKEIMSNASESARKKLSDAKVVGIACDVCKPEDVEKLSNFAVKELGSINIWINNAGTNKGFRPLLEFTEEDITQIVSTNLIGSILCTRGAIDVMSRQHSGGHIFNMDGAGSGGSSTPLTAVYGSTKCGLRQFHGSIVKESQKTNVGLHTASPGMVLTELLLSGSSIKNKQMFNIICELPETVARTLVPRMRVVKGSGKAVNYLTPPRILLAIVTSWLRRGRWFDDQGRALYAAEADRLRNWAENRTRLSLTDAMEMYTENTWVSVFSLSVVCAFIILQSTTPSSFPGT

SEQ ID NO: 34838 - DNA, 1293 bp, Arabidopsis thaliana
  misc_feature (1)..(1293): Ceres Seq. ID no. 12333690
  misc_feature (1)..(1293): Ortholog of  Ceres SEQ ID NO 13596519 as cited in SEQ ID NO 62572
  misc_feature (1)..(1293): Ortholog of  Ceres SEQ ID NO 12625108 as cited in SEQ ID NO 68102
aactcattttgacaatttttctttggtccaactcttacatattaacattcaccttcctttttgattttcgtcggttctacatgttaaacccttcaaaaattaaattataataagtatagtgaagaccaataagcagttgcatggaccctgattgattcattaccgctaaaattttgtctgaatccttcttcctatttataccactctcttcttcttctccagtttcatcacaccaaacttctcacatctcctcattctgtattttgacaaaaaaaaaacaccctttgttttttctctcctttgcatgttgtgattgtttttgcttcacaacatgggagttttagtaatctcgcttctcgtggttcatctcctagctttttccgtctgcgttcagggcggctaccgtcgtggcggacaccatcccggcggtcacatgggaccttggatcaacgctcatgccactttttacggcggcggtgatgcttccggcactatgggtggagcatgcgggtacggcaatctgtatagccaaggttatggactggagacggcagcgctgagcacagcgttattcgaccaaggacttagttgtggcgcatgttttgagctgatgtgtgtcaacgatcctcaatggtgcataaaaggccgatccattgtggtcactgccactaacttttgtcctcctggtggtgcatgcgaccctcccaaccaccatttcgatctttctcagccgatctacgagaaaattgctctctacaaatccggtatcattcccgttatgtatagaagggttcggtgcaagagaagtggtgggataaggttcacgatcaacggccactcatactttaacttggtgttggtcacaaacgtgggtggagccggggacgtacactcggtctcaatgaaagggtcgaggacaaaatggcaattaatgtcgagaaattgggggcaaaattggcaaagcaactcttatctcaatggtcaaagtctgtcgtttgttgttaccacaagtgatcgtcgaagtgtcgtctcttttaatgttgcaccacccacttggtcctttggccagacctacaccggagggcagtttcggtattaattatatataatcggttcggtttgttattgtgctttttttttttttttcggttccaagttggggactcttttttggtaaccaattgagattgggactgatagtgatatgtagcgaatatatgtgtgggaacgagaaaaagagaagttttattaattctcgttttataatataagaaaatgaaagtgatgttatgt

SEQ ID NO: 34839 - protein, 255 aa, Arabidopsis thaliana
  peptide (1)..(255): Ceres Seq. ID no. 12333691
MGVLVISLLVVHLLAFSVCVQGGYRRGGHHPGGHMGPWINAHATFYGGGDASGTMGGACGYGNLYSQGYGLETAALSTALFDQGLSCGACFELMCVNDPQWCIKGRSIVVTATNFCPPGGACDPPNHHFDLSQPIYEKIALYKSGIIPVMYRRVRCKRSGGIRFTINGHSYFNLVLVTNVGGAGDVHSVSMKGSRTKWQLMSRNWGQNWQSNSYLNGQSLSFVVTTSDRRSVVSFNVAPPTWSFGQTYTGGQFRY

SEQ ID NO: 34840 - protein, 221 aa, Arabidopsis thaliana
  peptide (1)..(221): Ceres Seq. ID no. 12333692
MGPWINAHATFYGGGDASGTMGGACGYGNLYSQGYGLETAALSTALFDQGLSCGACFELMCVNDPQWCIKGRSIVVTATNFCPPGGACDPPNHHFDLSQPIYEKIALYKSGIIPVMYRRVRCKRSGGIRFTINGHSYFNLVLVTNVGGAGDVHSVSMKGSRTKWQLMSRNWGQNWQSNSYLNGQSLSFVVTTSDRRSVVSFNVAPPTWSFGQTYTGGQFRY

SEQ ID NO: 34841 - protein, 201 aa, Arabidopsis thaliana
  peptide (1)..(201): Ceres Seq. ID no. 12333693
MGGACGYGNLYSQGYGLETAALSTALFDQGLSCGACFELMCVNDPQWCIKGRSIVVTATNFCPPGGACDPPNHHFDLSQPIYEKIALYKSGIIPVMYRRVRCKRSGGIRFTINGHSYFNLVLVTNVGGAGDVHSVSMKGSRTKWQLMSRNWGQNWQSNSYLNGQSLSFVVTTSDRRSVVSFNVAPPTWSFGQTYTGGQFRY

SEQ ID NO: 34842 - DNA, 1936 bp, Arabidopsis thaliana
  misc_feature (1)..(1936): Ceres Seq. ID no. 12396221
  misc_feature (1)..(1936): Ortholog of  Ceres SEQ ID NO 13594349 as cited in SEQ ID NO 58161
  misc_feature (1)..(1936): Ortholog of  Ceres SEQ ID NO 13663419 as cited in SEQ ID NO 66561
gaagtatagtttctgtaacaacaatggccaaaaccagagggtcttgttgtctcgtcaacgctctaatcgctatagcttttttggcgacagcccatttgtgtgaagctggcttgtctcagaaagaacaggacaaggtctcgaaattgcctggtcagaattttaatgttagttttgctcactactctgggtttgttgctactaatgagcaattgggaagagctctcttttactggttatttgaagccgttgaagatgctaagtctaagcctcttgttctctggctcaatggaggaccaggatgttcatctgttgcatatggtgaagcagaagagataggaccatttcacattaaggcagatgggaagactctttaccttaatcaatattcttggaaccaagctgcaaatattttgttccttgatgcacctgttggagttggttattcatactcaaacacctcgtctgatttgaagagcaatggtgataaaagaactgccgaagattcactgaaatttctgctgaaatgggttgagcggtttccggaatacaaaggaagggacttttatatagtaggggagagctatgcaggacattacattcctcagctgagtgaagccattgtaaaacataaccaaggttctgacaaaaacagtataaatctgaagggttacatggtaggaaatgggctgatggacgatttccatgacaggcttggtcttttccaatatatttggtcgttgggttttatatctgaccaaacatacagcttactgcaacttcaatgcggtttcgaatcgtttattcactcctccaaacagtgtaacaagattctggagatagcggacaaagaaataggtaacatagaccaatacagtgtcttcaccccagcttgtgttgccaatgcttcccagtcaaatatgttgctaaagaaaagacctatgactagccgcgtgagcgaacagtatgatccttgtacggagaaacacactacagtttatttcaatcttccagaggttcaaaaagccctccatgtcccaccaggacttgcaccatcaaaatgggatacttgcagtgatgtcgtgagtgaacactggaatgactctccttcctcggttctaaacatttaccacgagcttatagctgctgggcttcgtatctgggttttcagtggggacgcagatgccgttgtaccagtcacatcaacccggtacagtatcgatgcactaaaccttcgtcctttgagtgcctatggtccttggtacttagatggacaggtgggagggtggagtcagcagtatgctggtctgaactttgtgacagtgagaggtgcaggccatgaagttcctttgcacagaccgaagcaagctcttgcgctcttcaaggcttttatatctggaactccattgtccacacatgagaacagcatcagccgcgacatgtctgaactcgttagtgactcataatgagttctgatttgatgtaatgtgtgatttggattctcaatcaaaaactttccacataggccgttgaaataagaagagggaaagagaataaatcagtgttttaagtgatacgttcaatgcttcttcttcttctggttgtttgtttgtttggataaacatttgctgcttggaatctaataaaagaagtttctaccatttgtcagccatacgatccttgaataacaacaacatattcttgtgtaatgagaaagtgaagtctgatctgtgatgtataggactgggtattaatctggtaacggatataatactggggtagaaaatagaatttagactagtattgggggtctaaacgaaattatacagaagcattgggcttgacttggcccatgagacctaagcccatattttaaagaattaggggtttcttcttcctttgtctgttcaaattgaagaaacctgtttttttttatttc

SEQ ID NO: 34843 - protein, 486 aa, Arabidopsis thaliana
  peptide (1)..(486): Ceres Seq. ID no. 12396222
SIVSVTTMAKTRGSCCLVNALIAIAFLATAHLCEAGLSQKEQDKVSKLPGQNFNVSFAHYSGFVATNEQLGRALFYWLFEAVEDAKSKPLVLWLNGGPGCSSVAYGEAEEIGPFHIKADGKTLYLNQYSWNQAANILFLDAPVGVGYSYSNTSSDLKSNGDKRTAEDSLKFLLKWVERFPEYKGRDFYIVGESYAGHYIPQLSEAIVKHNQGSDKNSINLKGYMVGNGLMDDFHDRLGLFQYIWSLGFISDQTYSLLQLQCGFESFIHSSKQCNKILEIADKEIGNIDQYSVFTPACVANASQSNMLLKKRPMTSRVSEQYDPCTEKHTTVYFNLPEVQKALHVPPGLAPSKWDTCSDVVSEHWNDSPSSVLNIYHELIAAGLRIWVFSGDADAVVPVTSTRYSIDALNLRPLSAYGPWYLDGQVGGWSQQYAGLNFVTVRGAGHEVPLHRPKQALALFKAFISGTPLSTHENSISRDMSELVSDS

SEQ ID NO: 34844 - protein, 479 aa, Arabidopsis thaliana
  peptide (1)..(479): Ceres Seq. ID no. 12396223
MAKTRGSCCLVNALIAIAFLATAHLCEAGLSQKEQDKVSKLPGQNFNVSFAHYSGFVATNEQLGRALFYWLFEAVEDAKSKPLVLWLNGGPGCSSVAYGEAEEIGPFHIKADGKTLYLNQYSWNQAANILFLDAPVGVGYSYSNTSSDLKSNGDKRTAEDSLKFLLKWVERFPEYKGRDFYIVGESYAGHYIPQLSEAIVKHNQGSDKNSINLKGYMVGNGLMDDFHDRLGLFQYIWSLGFISDQTYSLLQLQCGFESFIHSSKQCNKILEIADKEIGNIDQYSVFTPACVANASQSNMLLKKRPMTSRVSEQYDPCTEKHTTVYFNLPEVQKALHVPPGLAPSKWDTCSDVVSEHWNDSPSSVLNIYHELIAAGLRIWVFSGDADAVVPVTSTRYSIDALNLRPLSAYGPWYLDGQVGGWSQQYAGLNFVTVRGAGHEVPLHRPKQALALFKAFISGTPLSTHENSISRDMSELVSDS

SEQ ID NO: 34845 - protein, 263 aa, Arabidopsis thaliana
  peptide (1)..(263): Ceres Seq. ID no. 12396224
MVGNGLMDDFHDRLGLFQYIWSLGFISDQTYSLLQLQCGFESFIHSSKQCNKILEIADKEIGNIDQYSVFTPACVANASQSNMLLKKRPMTSRVSEQYDPCTEKHTTVYFNLPEVQKALHVPPGLAPSKWDTCSDVVSEHWNDSPSSVLNIYHELIAAGLRIWVFSGDADAVVPVTSTRYSIDALNLRPLSAYGPWYLDGQVGGWSQQYAGLNFVTVRGAGHEVPLHRPKQALALFKAFISGTPLSTHENSISRDMSELVSDS

SEQ ID NO: 34846 - DNA, 1401 bp, Arabidopsis thaliana
  misc_feature (1)..(1401): Ceres Seq. ID no. 13494240
  misc_feature (1)..(1401): Ortholog of  Ceres SEQ ID NO 14308598 as cited in SEQ ID NO 60416
  misc_feature (1)..(1401): Ortholog of  Ceres SEQ ID NO 13502952 as cited in SEQ ID NO 62271
  misc_feature (1)..(1401): Ortholog of  Ceres SEQ ID NO 13502973 as cited in SEQ ID NO 68052
  misc_feature (1)..(1401): Ortholog of  Ceres SEQ ID NO 13596000 as cited in SEQ ID NO 68188
acaatctatcgagctaaaacactgaagcagacattagcgttgagaaaaaaaaaaaaagtaagaacgagagagagaaagccatgtctgcgaaaacaatcctatcatcagtagttttggtggttctcgtcgccgcatcagcagcggctaatatcggattcgatgagtcaaacccgatccgaatggtctccgatggtctccgggaggtagaagaatctgtttcccagatcttaggtcaatctcgtcacgttctctctttcgctcgcttcactcaccgatatggtaaaaagtatcagaacgtggaggagatgaagcttcgattctcgattttcaaggagaatcttgatttgatcagatccaccaacaagaaaggcttatcttacaaactcggtgttaatcaatttgctgatttgacatggcaagagtttcaaaggaccaagcttggtgctgctcagaactgctctgccactttaaagggcagccacaaggtcacagaagcagctcttcctgaaacaaaagactggagagaagatggtatcgttagtccggtcaaagatcagggaggttgtggatcttgctggacattcagcacaactggagctcttgaggcagcttaccatcaggcatttggaaaaggaatatctctctctgagcaacagcttgtggattgtgctggagctttcaataactatggttgcaatggtggccttccttctcaagcctttgaatacataaaatccaacggtggcctcgacacagagaaagcttatccttataccggtaaagatgaaacctgcaaattttcagctgaaaacgttggtgtacaagtcctcaactcagtcaacattactctgggtgctgaagatgaactgaagcatgcggttggattggtacggccagtaagcatagcatttgaggttatacactcgttccggctttacaagagtggagtttacactgatagtcactgtggaagtactccaatggatgtgaaccacgcggttttggccgttggttatggagttgaagacggtgtaccatattggcttattaagaactcatggggagcggattggggcgacaaaggttacttcaagatggagatggggaagaacatgtgtggtattgctacatgtgcatcataccccgttgtggcttgagatgatcagcgaatgtggttggtcaattatcaaattacgaaatgttcacgtatttattggattaagacattacgtaaaagttgggacttgggaatgcatatggtttatgcttgttgtaacataaaaaggtctgttaatatgtacaaaataaagccaaaactatagacgacaaatttataatattttcatgttaaatttatgaacataaattgatttagatcaaagtagtttcgttcttgatccg

SEQ ID NO: 34847 - protein, 358 aa, Arabidopsis thaliana; identical to SEQ ID NO: 21554
  peptide (1)..(358): Ceres Seq. ID no. 13494241

SEQ ID NO: 34848 - protein, 325 aa, Arabidopsis thaliana; identical to SEQ ID NO: 21555
  peptide (1)..(325): Ceres Seq. ID no. 13494242

SEQ ID NO: 34849 - protein, 283 aa, Arabidopsis thaliana; identical to SEQ ID NO: 21556
  peptide (1)..(283): Ceres Seq. ID no. 13494243

SEQ ID NO: 34850 - DNA, 1389 bp, Arabidopsis thaliana
  misc_feature (1)..(1389): Ceres Seq. ID no. 12334207
  misc_feature (1)..(1389): Ortholog of  Ceres SEQ ID NO 14316144 as cited in SEQ ID NO 52397
  misc_feature (1)..(1389): Ortholog of  Ceres SEQ ID NO 13495628 as cited in SEQ ID NO 60727
atcattcattcacacaaacacttcaaacaatgacttgccttcttcttcttctcctcctcctcctcttctcctctgccgactctctgacgtcaccatccgacgtgtcagctttaaaagctttcaaagccaccgtgaaacccaactcaatcccaccgtggtcttgtctcgctagctgggactttactgtctccgacccatgtgcttcaccacgtcgaacacatttcacttgcggcatcacttgctcgtctgactccacacgtgtgacccaactcactctcgacccagccgggtacacgggtcgtctcacgcctctcatctccggcctcacagagcttctcacgctcgatctcgccgagaacaacttctacggcctaatcccatcctccatctcctccctcaccagcctcaagaccttgatcctccgatccaactcgttttccgggtcattacccgactcagtaactcgactcaactcactcgaatccattgacatatctcacaactctctcaccgggccgcttccaaaaacaatgaactcgctttcaaatctccgacaactcgatcttagctacaacaagctcaccggagccatcccaaagcttccgaaaaacctcatcgatttagctttaaaggcgaatactttatcaggacccatctcaaaagactcattcaccgagtcaactcagctcgaaatcgtcgaaatcgctgagaactcattcaccggaacactcggagcttggttcttcctacttgaatcaatccaacaagtcgatctagcgaacaacactctcacaggcatcgaagtcctccctccaaacctcgccggagaaaacaacctcgtagctgtagagctaggattcaaccaaatcagaggaaacgctccggcgagtttcgcggcgtatccaagactttcttcactatctatgagatacaacgtgcttcacggtgttataccgtcggaatacgaacggagcaagacattaagacggctttacttagacgggaacttcttgacgggaaaacctccggcgagatttgtgagaacagacgcagaagtaatgggaagtttggggaataattgtctacagggatgtccagggaaagctaagatgtgtgctccatcgcagaaaccattttacatttgtaagcaagcttatggtggaaaaccaaagtcttagttttgtcggtgtcggtgactttttgtgtcagtgattttgtaaaataatgcttttagtcatgagtttactctatagtcttggagaaatactaatatctatattcatcgagatcttcgtatgtacacaaataaatttacaaaaattggaacggaacttatagtatttattttgttgtattgtgtgtttttatatatttattgagatttaaatt

SEQ ID NO: 34851 - protein, 391 aa, Arabidopsis thaliana
  peptide (1)..(391): Ceres Seq. ID no. 12334208
HSFTQTLQTMTCLLLLLLLLLFSSADSLTSPSDVSALKAFKATVKPNSIPPWSCLASWDFTVSDPCASPRRTHFTCGITCSSDSTRVTQLTLDPAGYTGRLTPLISGLTELLTLDLAENNFYGLIPSSISSLTSLKTLILRSNSFSGSLPDSVTRLNSLESIDISHNSLTGPLPKTMNSLSNLRQLDLSYNKLTGAIPKLPKNLIDLALKANTLSGPISKDSFTESTQLEIVEIAENSFTGTLGAWFFLLESIQQVDLANNTLTGIEVLPPNLAGENNLVAVELGFNQIRGNAPASFAAYPRLSSLSMRYNVLHGVIPSEYERSKTLRRLYLDGNFLTGKPPARFVRTDAEVMGSLGNNCLQGCPGKAKMCAPSQKPFYICKQAYGGKPKS

SEQ ID NO: 34852 - protein, 382 aa, Arabidopsis thaliana
  peptide (1)..(382): Ceres Seq. ID no. 12334209
MTCLLLLLLLLLFSSADSLTSPSDVSALKAFKATVKPNSIPPWSCLASWDFTVSDPCASPRRTHFTCGITCSSDSTRVTQLTLDPAGYTGRLTPLISGLTELLTLDLAENNFYGLIPSSISSLTSLKTLILRSNSFSGSLPDSVTRLNSLESIDISHNSLTGPLPKTMNSLSNLRQLDLSYNKLTGAIPKLPKNLIDLALKANTLSGPISKDSFTESTQLEIVEIAENSFTGTLGAWFFLLESIQQVDLANNTLTGIEVLPPNLAGENNLVAVELGFNQIRGNAPASFAAYPRLSSLSMRYNVLHGVIPSEYERSKTLRRLYLDGNFLTGKPPARFVRTDAEVMGSLGNNCLQGCPGKAKMCAPSQKPFYICKQAYGGKPKS

SEQ ID NO: 34853 - protein, 215 aa, Arabidopsis thaliana
  peptide (1)..(215): Ceres Seq. ID no. 12334210
MNSLSNLRQLDLSYNKLTGAIPKLPKNLIDLALKANTLSGPISKDSFTESTQLEIVEIAENSFTGTLGAWFFLLESIQQVDLANNTLTGIEVLPPNLAGENNLVAVELGFNQIRGNAPASFAAYPRLSSLSMRYNVLHGVIPSEYERSKTLRRLYLDGNFLTGKPPARFVRTDAEVMGSLGNNCLQGCPGKAKMCAPSQKPFYICKQAYGGKPKS

SEQ ID NO: 34854 - DNA, 1234 bp, Arabidopsis thaliana
  misc_feature (1)..(1234): Ceres Seq. ID no. 12701868
  misc_feature (1)..(1234): Ortholog of  Ceres SEQ ID NO 14309271 as cited in SEQ ID NO 0
tcttcaatctcccacgtctgagattgaaaagtttgggagaagataaacaaactcaaaatacctcagctttagatcaaaatctaaaaacaagagtttcgtgcagtggtttcttagagatctagtagattagagaatttggatttgttgaagaaaagtggatttggtacgattctataggtttccttcttctctgaagctactatagagagaatctgcgagctcaatttcgtagtaaattagggttcgtgtttcttggtaaagatagaatcaatggcggaggttgttctgcacatatacgatgtgacgaacagtggatcagagaagactaacaacaccatagttcagatcaataggttcttcaaagacgggatcggtcttggcggtatattccacagcgctattcaggtatatggaaacgatgaatggtcttatgggtattgtgaacaaggaactggtgtgttcagctgtcctagtggcaagaatccaatgtacacatatcgtgagaaaattgttcttgggaagacagattgtacaatcttcatggtaaatcagatcttgcgtgagctcagcagggaatggccaggacacacttatgatttgctgtccaaaaattgcaatcacttctgcgatgtattatgtgaccgccttggtgtgccaaagatcccaggttgggtgaatcgttttgctcatgctggcgacacagccttggaagtagcaggaaacacagcaatgcgggtaaagcaagccaaaactgaacttgtttcagccagtaaagtggcttatcgcttcctttcgaatgttacctcaaacataaccaatggttcaaatggctccagtggctctccacagcggccaggaactctcaacaattcagacaatgggagctttagattgcaaggtagttggttgaaaggtatacttaacactgccaaaccctccacaagtacagagatagggaacaaagaggaagatacaaatcatacaatcaccaatcagaaaaagcagaaccgtgactctgatgttctactatttcagtagcaactgtactgatccaccccaatgtattcacttactgtatatccacctatccaaaatttattcgtttgtatccattactttgtatcacgattcgaacacacctctctttttttttccccttttcacagcagaacgtgtgattttgttaagaagatattttcaacacgttactggcaaagaccaagcaagtcttagc

SEQ ID NO: 34855 - protein, 255 aa, Arabidopsis thaliana
  peptide (1)..(255): Ceres Seq. ID no. 12701869
MAEVVLHIYDVTNSGSEKTNNTIVQINRFFKDGIGLGGIFHSAIQVYGNDEWSYGYCEQGTGVFSCPSGKNPMYTYREKIVLGKTDCTIFMVNQILRELSREWPGHTYDLLSKNCNHFCDVLCDRLGVPKIPGWVNRFAHAGDTALEVAGNTAMRVKQAKTELVSASKVAYRFLSNVTSNITNGSNGSSGSPQRPGTLNNSDNGSFRLQGSWLKGILNTAKPSTSTEIGNKEEDTNHTITNQKKQNRDSDVLLFQ

SEQ ID NO: 34856 - protein, 183 aa, Arabidopsis thaliana
  peptide (1)..(183): Ceres Seq. ID no. 12701870
MYTYREKIVLGKTDCTIFMVNQILRELSREWPGHTYDLLSKNCNHFCDVLCDRLGVPKIPGWVNRFAHAGDTALEVAGNTAMRVKQAKTELVSASKVAYRFLSNVTSNITNGSNGSSGSPQRPGTLNNSDNGSFRLQGSWLKGILNTAKPSTSTEIGNKEEDTNHTITNQKKQNRDSDVLLFQ

SEQ ID NO: 34857 - protein, 165 aa, Arabidopsis thaliana
  peptide (1)..(165): Ceres Seq. ID no. 12701871
MVNQILRELSREWPGHTYDLLSKNCNHFCDVLCDRLGVPKIPGWVNRFAHAGDTALEVAGNTAMRVKQAKTELVSASKVAYRFLSNVTSNITNGSNGSSGSPQRPGTLNNSDNGSFRLQGSWLKGILNTAKPSTSTEIGNKEEDTNHTITNQKKQNRDSDVLLFQ

SEQ ID NO: 34858 - DNA, 1408 bp, Arabidopsis thaliana
  misc_feature (1)..(1408): Ceres Seq. ID no. 13501424
  misc_feature (1)..(1408): Ortholog of  Ceres SEQ ID NO 13596392 as cited in SEQ ID NO 62136
  misc_feature (1)..(1408): Ortholog of  Ceres SEQ ID NO 13654360 as cited in SEQ ID NO 67980
  misc_feature (1)..(1408): Ortholog of  Ceres SEQ ID NO 13596394 as cited in SEQ ID NO 68561
caatggggggaaagggggggggatataataaaggggggggaaagggggggggaatccatattaataaaacgaaatttgggtctctctccctctctctacttaacgctctctgtatcttcttctccgtcaacgatacgaacccagagacgtcggcggttaaaacaatcgtcggatctctctggattcgttagacgagaagtttccggtatctaatttctgtgcgttagagagaaattagggttgttgctacgatggatgagactttacttgacgatataatacgacggcttttggcgacgaataatggaaggacggtgaagcaagcacagattactgagacggagatacgtcagctatgtttagcttcaaaagaggtttttctcagtcagcctaatctcctcgagctcgaggctcctatcaagatttgcggagatgttcatggtcagtttccagacctcttgcggttgtttgagtatggtggttatccaccagctgcgaactacttgtttcttggggattatgttgatcgtggtaagcagagcatagagacgatatgccttcttcttgcctataaggtcaaatacaagttcaacttctttcttctcagaggcaatcacgaatgtgcttcaatcaaccgtgtatatggattctacgatgaatgcaaaagaagatataatgttcgcttatggaaaacattcaccgagtgcttcaactgtctgcctgtttctgctctcattgatgataagatcctctgcatgcatggtggactatcgcctgatattaagagcttagatgacatcaggagaattcctcgtcctattgacgttcctgatcagggcattctttgtgatttgttgtgggctgatcctgacagagagattcaaggctggggggagaatgacagaggtgtctcttatacatttggggctgacaaagtagctgagttccttcaaactcatgaccttgatcttatatgccgagctcatcaggttgtagaagatggatacgagttctttgcaaagagacaactagtgacaatattctctgcacccaattactgtggcgagtttgacaatgctggtgcattgatgagtgttgatgatagcttaacatgttcattccaaatccttaaggcatctgagaagaaaggaagatttggattcaacaacaatgttcctagaccaggaaccccacctcataagggtggaaaaggtcgttaactcgtcgtcgatgggttcaagaaacgagtgaaaccgacgggttcgaattttgtaaggcaaacagtttgttttgttagattgttatctgttttcttatggttgaggcaacattatgttttgtttagattttttttgtaaaaattgtggaagatgttcacagcattttcaactgaagaaagttgggtttt

SEQ ID NO: 34859 - protein, 322 aa, Arabidopsis thaliana
  peptide (1)..(322): Ceres Seq. ID no. 13501425
MDETLLDDIIRRLLATNNGRTVKQAQITETEIRQLCLASKEVFLSQPNLLELEAPIKICGDVHGQFPDLLRLFEYGGYPPAANYLFLGDYVDRGKQSIETICLLLAYKVKYKFNFFLLRGNHECASINRVYGFYDECKRRYNVRLWKTFTECFNCLPVSALIDDKILCMHGGLSPDIKSLDDIRRIPRPIDVPDQGILCDLLWADPDREIQGWGENDRGVSYTFGADKVAEFLQTHDLDLICRAHQVVEDGYEFFAKRQLVTIFSAPNYCGEFDNAGALMSVDDSLTCSFQILKASEKKGRFGFNNNVPRPGTPPHKGGKGR

SEQ ID NO: 34860 - DNA, 1216 bp, Arabidopsis thaliana
  misc_feature (1)..(1216): Ceres Seq. ID no. 13487522
  misc_feature (1)..(1216): Ortholog of  Ceres SEQ ID NO 14312281 as cited in SEQ ID NO 59172
  misc_feature (1)..(1216): Ortholog of  Ceres SEQ ID NO 14302299 as cited in SEQ ID NO 68665
ctctctccgcttcccccaaaaatccaggggcttcttacacgcacacaatcctttaaagctatcgtctttcttatataatcagtgaatcttcattaacacctcccacaaaatctcagaaataactttcacaacagagtcaaagagttccaaatcgtttgtttgtattttgtacgatcaaagttgttggtacttgtaagataatcgaaaccaaagatgcggatgagctgtaatggatgcagagttcttcggaaagggtgtagtgaggattgtagtataaggccgtgtttggcttggatcaaatcgcctgaagcgcaagctaacgcaactgtctttctcgccaagttctatggccgtgctggactcatgaacctcatcaacgccggtcccaatcaccttcgtcctgggattttccgatcgttgttgcacgaagcttgtgggaggattgtgaatccgatctatggttcggtgggtttgttgtggtcggggaattggcagctttgtcaagacgccgtggaggctgtgatgaaaggagaaccggtcaaagagatcgccacagacgctgcgacgatcggccaaggtccgcctcttaagatctacgacatccgacatatctccaaggatgataactctgccgccgcggctactggctcaaccgatttgaaacttgcgaaaactcgccgtgctaagcgggtctccaccgtcgcgatacaggcggaatcggagggaaagtctgacgaggctagtcacgattcgtcgttgagtcatcagtctgaaatagtggctgctcatgaaggagagagcaaggaatccgagagcaatgtctctgaggttttggcattctcgcctccggctgtgaagggctccggcgagataaagcttgacctaactttaaggctcgaaccggtgtcacgtgcgtatcatgtggtacctgttaagaagagaaggatcggcgtgtttggcacgtgtcagaaggagagcacgtgtaagactgagcttatgctctaagctccgttttagctatactcagaagttttgcccccatcagctctattcggctcggctctgatgatcttcaagtcgagccggtaacttttttttaatatatagttctctatttccccctttaatgttcactttccatttgtgacaaaagaatagagtatatgtacaaaattatttacagagattaattcaagaattggctgagatattatct

SEQ ID NO: 34861 - protein, 263 aa, Arabidopsis thaliana
  peptide (1)..(263): Ceres Seq. ID no. 13487523
MRMSCNGCRVLRKGCSEDCSIRPCLAWIKSPEAQANATVFLAKFYGRAGLMNLINAGPNHLRPGIFRSLLHEACGRIVNPIYGSVGLLWSGNWQLCQDAVEAVMKGEPVKEIATDAATIGQGPPLKIYDIRHISKDDNSAAAATGSTDLKLAKTRRAKRVSTVAIQAESEGKSDEASHDSSLSHQSEIVAAHEGESKESESNVSEVLAFSPPAVKGSGEIKLDLTLRLEPVSRAYHVVPVKKRRIGVFGTCQKESTCKTELML

SEQ ID NO: 34862 - protein, 261 aa, Arabidopsis thaliana
  peptide (1)..(261): Ceres Seq. ID no. 13487524
MSCNGCRVLRKGCSEDCSIRPCLAWIKSPEAQANATVFLAKFYGRAGLMNLINAGPNHLRPGIFRSLLHEACGRIVNPIYGSVGLLWSGNWQLCQDAVEAVMKGEPVKEIATDAATIGQGPPLKIYDIRHISKDDNSAAAATGSTDLKLAKTRRAKRVSTVAIQAESEGKSDEASHDSSLSHQSEIVAAHEGESKESESNVSEVLAFSPPAVKGSGEIKLDLTLRLEPVSRAYHVVPVKKRRIGVFGTCQKESTCKTELML

SEQ ID NO: 34863 - protein, 213 aa, Arabidopsis thaliana
  peptide (1)..(213): Ceres Seq. ID no. 13487525
MNLINAGPNHLRPGIFRSLLHEACGRIVNPIYGSVGLLWSGNWQLCQDAVEAVMKGEPVKEIATDAATIGQGPPLKIYDIRHISKDDNSAAAATGSTDLKLAKTRRAKRVSTVAIQAESEGKSDEASHDSSLSHQSEIVAAHEGESKESESNVSEVLAFSPPAVKGSGEIKLDLTLRLEPVSRAYHVVPVKKRRIGVFGTCQKESTCKTELML

SEQ ID NO: 34864 - DNA, 1350 bp, Arabidopsis thaliana
  misc_feature (1)..(1350): Ceres Seq. ID no. 12579879
  misc_feature (1)..(1350): Ortholog of  Ceres SEQ ID NO 15176333 as cited in SEQ ID NO 52787
  misc_feature (1)..(1350): Ortholog of  Ceres SEQ ID NO 15170403 as cited in SEQ ID NO 53457
  misc_feature (1)..(1350): Ortholog of  Ceres SEQ ID NO 14303479 as cited in SEQ ID NO 54254
  misc_feature (1)..(1350): Ortholog of  Ceres SEQ ID NO 14312047 as cited in SEQ ID NO 55656
  misc_feature (1)..(1350): Ortholog of  Ceres SEQ ID NO 13660872 as cited in SEQ ID NO 60830
  misc_feature (1)..(1350): Ortholog of  Ceres SEQ ID NO 12616221 as cited in SEQ ID NO 63291
  misc_feature (1)..(1350): Ortholog of  Ceres SEQ ID NO 14302355 as cited in SEQ ID NO 65830
aagtttcaaaaacgccaagtttcagaggtagagagagagatactacaattgattaggataggatcaggatcatcctcaacaacctcctcctaattcctcctccattcatagtaacaataatattaagaaagagggtaaactatgtcagaattattacagttgcctccaggtttccgatttcaccctaccgatgaagagcttgtcatgcactatctctgccgcaaatgtgcctctcagtccatcgccgttccgatcatcgctgagatcgatctctacaaatacgatccatgggagcttcctggtttagccttgtatggtgagaaggaatggtacttcttctctcccagggacagaaaatatcccaacggttcgcgtcctaaccggtccgctggttctggttactggaaagctaccggagctgataaaccgatcggactacctaaaccggtcggaattaagaaagctcttgttttctacgccggcaaagctccaaagggagagaaaaccaattggatcatgcacgagtaccgtctcgccgacgttgaccggtccgttcgcaagaagaagaatagtctcaggctggatgattgggttctctgccggatttacaacaaaaaaggagctaccgagaggcggggaccaccgcctccggttgtttacggcgacgaaatcatggaggagaagccgaaggtgacggagatggttatgcctccgccgccgcaacagacaagtgagttcgcgtatttcgacacgtcggattcggtgccgaagctgcatactacggattcgagttgctcggagcaggtggtgtcgccggagttcacgagcgaggttcagagcgagcccaagtggaaagattggtcggccgtaagtaatgacaataacaatacccttgattttgggtttaattacattgatgccaccgtggataacgcgtttggaggaggagggagtagtaatcagatgtttccgctacaggatatgttcatgtacatgcagaagccttactagaagggaattcctttcctgccgccgaaacgcaacgcaaaacgaccctcgtttttgcgtttatggcaacacgagaccgttttatatggtcaatgagtgtgccgattcggccattagatttctgttcagtcttcgtttattctatagaccgtccgatttcagatcatccctaatcggacggtggtcgttggatgtatcagtagtgtattactgtgttaggtagaagaaaatccacttgttcttaaattggcataaaagtcagaagctaatatttatatgtgccgcaatcaatttaataaaaaaaaaaaaaaaaaaaaaaccctgacgtagctcgaggaattc

SEQ ID NO: 34865 - protein, 289 aa, Arabidopsis thaliana
  peptide (1)..(289): Ceres Seq. ID no. 12579880
MSELLQLPPGFRFHPTDEELVMHYLCRKCASQSIAVPIIAEIDLYKYDPWELPGLALYGEKEWYFFSPRDRKYPNGSRPNRSAGSGYWKATGADKPIGLPKPVGIKKALVFYAGKAPKGEKTNWIMHEYRLADVDRSVRKKKNSLRLDDWVLCRIYNKKGATERRGPPPPVVYGDEIMEEKPKVTEMVMPPPPQQTSEFAYFDTSDSVPKLHTTDSSCSEQVVSPEFTSEVQSEPKWKDWSAVSNDNNNTLDFGFNYIDATVDNAFGGGGSSNQMFPLQDMFMYMQKPY

SEQ ID NO: 34866 - protein, 268 aa, Arabidopsis thaliana
  peptide (1)..(268): Ceres Seq. ID no. 12579881
MHYLCRKCASQSIAVPIIAEIDLYKYDPWELPGLALYGEKEWYFFSPRDRKYPNGSRPNRSAGSGYWKATGADKPIGLPKPVGIKKALVFYAGKAPKGEKTNWIMHEYRLADVDRSVRKKKNSLRLDDWVLCRIYNKKGATERRGPPPPVVYGDEIMEEKPKVTEMVMPPPPQQTSEFAYFDTSDSVPKLHTTDSSCSEQVVSPEFTSEVQSEPKWKDWSAVSNDNNNTLDFGFNYIDATVDNAFGGGGSSNQMFPLQDMFMYMQKPY

SEQ ID NO: 34867 - protein, 164 aa, Arabidopsis thaliana
  peptide (1)..(164): Ceres Seq. ID no. 12579882
MHEYRLADVDRSVRKKKNSLRLDDWVLCRIYNKKGATERRGPPPPVVYGDEIMEEKPKVTEMVMPPPPQQTSEFAYFDTSDSVPKLHTTDSSCSEQVVSPEFTSEVQSEPKWKDWSAVSNDNNNTLDFGFNYIDATVDNAFGGGGSSNQMFPLQDMFMYMQKPY

SEQ ID NO: 34868 - DNA, 1665 bp, Arabidopsis thaliana
  misc_feature (1)..(1665): Ceres Seq. ID no. 12335652
  misc_feature (1)..(1665): Ortholog of  Ceres SEQ ID NO 15180586 as cited in SEQ ID NO 1166
  misc_feature (1)..(1665): Ortholog of  Ceres SEQ ID NO 12634623 as cited in SEQ ID NO 0
ctgattacgattcaatcctctccgatcgttggcctcctgtttccgttttactcgacatcgttccgacgacttttgacctggaatcgacgcagtgacttcaattcaactattgcacttggtttgttggcaatggacaaaggagcacctcctagtatttttgtgaatgatgggtcattcatggaaagattcagacagcttcaacaggagaaagataaagacaaggataaggttgtccaagttgaggattctaagccggtgaagattatatcaaatcccaaacctgctgctaataaaatttccattggattaaagcccaatgatgcccagaagaaaggtggtaagcttgctttcagcttgaagcaaaagtctaagcttcttgcacctcctgtgaagcttggtacagaagaagatgaggatgatgaggatgttaaacatgaacaaggctttggatccgtaaagcgtcaaaagttagagcagagagacacacctgtaaagtcagcaaaagtatcggatgttgcaccacctccgcccagtgatcctactgtgaagaaagttgctgataaactagcaagttttgttgctaagcatggaaggccatttgagcacattacacggcaaaagaatcctggggatacaccatttaaatttctttttgacgagaactgtgcggactacaagtactatgtattcaggctggctgaagaggaaaaattaatttcacaaaccaaggattctggtgtacttcacagtggtgatgcaggctcgcgaacgtccacagcagcaatccctttgcaaaagccagcttatcaacaaacaggatatcagatccctgcctcagctctctatgatactcctgtggaacctggagcttcttctagatctgctcaggcatcaattacaagacccagcgacagtgactcctttagtgggccgaggggtgcagaccctctatcaatgatggagttttacatgaagaaggctgcccaagaagagaaaatgagacgtcctaggcagtcaaaagacgaaatgcctccaccagcttcccttcaaggcccatctgaaacttcctccacagaccctggaaagagaggtcatcacatgggtgattatatcccacttgaggagctagataagttcctttcaaagtgcaatgacgcagctgcacaaaaagccacaaaggaggctgctgagaaagcgaagatccaagcagataatgttggacataaactcttgtcaaaaatgggttggaaagaaggtgaaggtataggaagctccagaaagggtatggcagaccctataatggcaggcgatgtaaagacaaacaacttgggagttggtgcttccgctccaggagaagtcaagcctgaggatgatatatacgagcagtacaagaagcggatgatgctgggttacaaacacagacccaatccactgggaaatcccaggaaggcgtattactaaggatcaaatcaatgtgttatgcgcaattattatctttggttcacctcagcaccgtctgagctttgcttttctattataaagaatgttcaagcttttagattactgatatattgaagtgttggtatgcattgaatttgcgtttcagtgtgcaaatagatctctttgacagacatatcagttgaaatacaatggatttgttattgc

SEQ ID NO: 34869 - protein, 486 aa, Arabidopsis thaliana
  peptide (1)..(486): Ceres Seq. ID no. 12335653
LITIQSSPIVGLLFPFYSTSFRRLLTWNRRSDFNSTIALGLLAMDKGAPPSIFVNDGSFMERFRQLQQEKDKDKDKVVQVEDSKPVKIISNPKPAANKISIGLKPNDAQKKGGKLAFSLKQKSKLLAPPVKLGTEEDEDDEDVKHEQGFGSVKRQKLEQRDTPVKSAKVSDVAPPPPSDPTVKKVADKLASFVAKHGRPFEHITRQKNPGDTPFKFLFDENCADYKYYVFRLAEEEKLISQTKDSGVLHSGDAGSRTSTAAIPLQKPAYQQTGYQIPASALYDTPVEPGASSRSAQASITRPSDSDSFSGPRGADPLSMMEFYMKKAAQEEKMRRPRQSKDEMPPPASLQGPSETSSTDPGKRGHHMGDYIPLEELDKFLSKCNDAAAQKATKEAAEKAKIQADNVGHKLLSKMGWKEGEGIGSSRKGMADPIMAGDVKTNNLGVGASAPGEVKPEDDIYEQYKKRMMLGYKHRPNPLGNPRKAYY

SEQ ID NO: 34870 - protein, 443 aa, Arabidopsis thaliana
  peptide (1)..(443): Ceres Seq. ID no. 12335654
MDKGAPPSIFVNDGSFMERFRQLQQEKDKDKDKVVQVEDSKPVKIISNPKPAANKISIGLKPNDAQKKGGKLAFSLKQKSKLLAPPVKLGTEEDEDDEDVKHEQGFGSVKRQKLEQRDTPVKSAKVSDVAPPPPSDPTVKKVADKLASFVAKHGRPFEHITRQKNPGDTPFKFLFDENCADYKYYVFRLAEEEKLISQTKDSGVLHSGDAGSRTSTAAIPLQKPAYQQTGYQIPASALYDTPVEPGASSRSAQASITRPSDSDSFSGPRGADPLSMMEFYMKKAAQEEKMRRPRQSKDEMPPPASLQGPSETSSTDPGKRGHHMGDYIPLEELDKFLSKCNDAAAQKATKEAAEKAKIQADNVGHKLLSKMGWKEGEGIGSSRKGMADPIMAGDVKTNNLGVGASAPGEVKPEDDIYEQYKKRMMLGYKHRPNPLGNPRKAYY

SEQ ID NO: 34871 - protein, 427 aa, Arabidopsis thaliana
  peptide (1)..(427): Ceres Seq. ID no. 12335655
MERFRQLQQEKDKDKDKVVQVEDSKPVKIISNPKPAANKISIGLKPNDAQKKGGKLAFSLKQKSKLLAPPVKLGTEEDEDDEDVKHEQGFGSVKRQKLEQRDTPVKSAKVSDVAPPPPSDPTVKKVADKLASFVAKHGRPFEHITRQKNPGDTPFKFLFDENCADYKYYVFRLAEEEKLISQTKDSGVLHSGDAGSRTSTAAIPLQKPAYQQTGYQIPASALYDTPVEPGASSRSAQASITRPSDSDSFSGPRGADPLSMMEFYMKKAAQEEKMRRPRQSKDEMPPPASLQGPSETSSTDPGKRGHHMGDYIPLEELDKFLSKCNDAAAQKATKEAAEKAKIQADNVGHKLLSKMGWKEGEGIGSSRKGMADPIMAGDVKTNNLGVGASAPGEVKPEDDIYEQYKKRMMLGYKHRPNPLGNPRKAYY

SEQ ID NO: 34872 - DNA, 1425 bp, Arabidopsis thaliana
  misc_feature (1)..(1425): Ceres Seq. ID no. 12333941
  misc_feature (1)..(1425): Ortholog of  Ceres SEQ ID NO 14316522 as cited in SEQ ID NO 58267
accatgagaggagctctcttcagaaatgcatctctctgcgctcgcggaatcattgtttctcctcgaatatcccccaatgttccctttctcactccaatcgcagctctggctcctcccaaattcagatttttctcttccgattccggtgagaactcgactactgccactgagtcttcgccgactgattcatccgataagaaggatctcgttgtagaggatgtcagcaacaaagagcttaaaagccgtatagagaagtatttcaatgagggtaatgaagatgctttacctgcagttattgaagcacttctacagagaagacttgtagacaaacacgcagagactgatgatgaattgatggaaaaaatcgagagtctacctttcaaagatgacgtcaaggatgaagagtttgaatccgatttcgaggaagcgcattctactgacgaagaacttgaggatttgtacaactctcccgagtatgtagctgaaaagatgaggaagaatgaatttttcaacatggacgataacaagtgggatcacatgattagagaaggtatccaacatggctgtcttaccgatactaaacaatgcgaggagattcttgaggatatgctcaaatgggatcagcttcttcctgatgatttgaagaaaaaagttgaagcaaagtttaatgagctcggggatatgtgtgaaagaggtgaaattgaggccgaagcagcttatgagcttttcaaggaatttgaagatgagatggtaattcagtatgggggtcagatggaagctgagggtcctccccaatttggtgaaacagatacatctgacaggaatactgacttggatgatccccccggtaaaggcccaatcctcaggtggcaatcaaggatagtttttgctcctggaggcgatgcgtggcatccaaagaacaggaaagttaaaatgtctgttacagtgaaagagcttgggctctcaaagcatcaggctaaaaggctaagggaacttgtgggaaaaagataccattcagggaaagacgagctaacaatcaccagcgagaggtttgaacaccgagaagaaaacaggaaagactgcttgagaactctttacgggttgatagaggaagctgggaaagccaacaagatcgctgaagacataagaacttcatatgttagacagagactccgagccagtccagcttttatgcagaaattacaagccaagatcataaggtctaaagagtcagatgccatcgacgcttgaaaaacacttttcccggttcgcgcctttcttcttgtttcaccaaataatctgtggatcgtctctttaatcggagaacgatgcaatgttggtaaaaatagacaatgaatgaaactttttcatgtataaaaatatatgtaaacttggggttgataatgaattgttcatgttaagact

SEQ ID NO: 34873 - protein, 416 aa, Arabidopsis thaliana
  peptide (1)..(416): Ceres Seq. ID no. 12333942
TMRGALFRNASLCARGIIVSPRISPNVPFLTPIAALAPPKFRFFSSDSGENSTTATESSPTDSSDKKDLVVEDVSNKELKSRIEKYFNEGNEDALPAVIEALLQRRLVDKHAETDDELMEKIESLPFKDDVKDEEFESDFEEAHSTDEELEDLYNSPEYVAEKMRKNEFFNMDDNKWDHMIREGIQHGCLTDTKQCEEILEDMLKWDQLLPDDLKKKVEAKFNELGDMCERGEIEAEAAYELFKEFEDEMVIQYGGQMEAEGPPQFGETDTSDRNTDLDDPPGKGPILRWQSRIVFAPGGDAWHPKNRKVKMSVTVKELGLSKHQAKRLRELVGKRYHSGKDELTITSERFEHREENRKDCLRTLYGLIEEAGKANKIAEDIRTSYVRQRLRASPAFMQKLQAKIIRSKESDAIDA

SEQ ID NO: 34874 - protein, 415 aa, Arabidopsis thaliana
  peptide (1)..(415): Ceres Seq. ID no. 12333943
MRGALFRNASLCARGIIVSPRISPNVPFLTPIAALAPPKFRFFSSDSGENSTTATESSPTDSSDKKDLVVEDVSNKELKSRIEKYFNEGNEDALPAVIEALLQRRLVDKHAETDDELMEKIESLPFKDDVKDEEFESDFEEAHSTDEELEDLYNSPEYVAEKMRKNEFFNMDDNKWDHMIREGIQHGCLTDTKQCEEILEDMLKWDQLLPDDLKKKVEAKFNELGDMCERGEIEAEAAYELFKEFEDEMVIQYGGQMEAEGPPQFGETDTSDRNTDLDDPPGKGPILRWQSRIVFAPGGDAWHPKNRKVKMSVTVKELGLSKHQAKRLRELVGKRYHSGKDELTITSERFEHREENRKDCLRTLYGLIEEAGKANKIAEDIRTSYVRQRLRASPAFMQKLQAKIIRSKESDAIDA

SEQ ID NO: 34875 - protein, 298 aa, Arabidopsis thaliana
  peptide (1)..(298): Ceres Seq. ID no. 12333944
MEKIESLPFKDDVKDEEFESDFEEAHSTDEELEDLYNSPEYVAEKMRKNEFFNMDDNKWDHMIREGIQHGCLTDTKQCEEILEDMLKWDQLLPDDLKKKVEAKFNELGDMCERGEIEAEAAYELFKEFEDEMVIQYGGQMEAEGPPQFGETDTSDRNTDLDDPPGKGPILRWQSRIVFAPGGDAWHPKNRKVKMSVTVKELGLSKHQAKRLRELVGKRYHSGKDELTITSERFEHREENRKDCLRTLYGLIEEAGKANKIAEDIRTSYVRQRLRASPAFMQKLQAKIIRSKESDAIDA

SEQ ID NO: 34876 - DNA, 1150 bp, Arabidopsis thaliana
  misc_feature (1)..(1150): Ceres Seq. ID no. 13497072
  misc_feature (1)..(1150): Ortholog of  Ceres SEQ ID NO 13586635 as cited in SEQ ID NO 14217
  misc_feature (1)..(1150): Ortholog of  Ceres SEQ ID NO 12616285 as cited in SEQ ID NO 63483
acacatcttaaaaagtaaaaacacattcatctatccaacaaaaaaaaaaaaaaaaaggagaaatggaaggaatcgatcatagaatggtgagtgtcaatggcataactatgcacattgccgagaaaggtcccaaagaaggacctgtggtgcttctcctccatggattccctgatctctggtacacgtggcgtcaccagattagtgggttatcatctctaggttaccgcgctgtagctccagacctccgaggctacggagactctgattcgccagagtctttctccgagtacacgtgtcttaacgtcgttggggacctcgtagctcttctggacagtgttgctggaaatcaagagaaggtgtttctggtcggtcatgattggggagccattatcggatggtttctctgtttgtttcgacctgaaaagattaacggctttgtgtgtttgagtgtgccgtatagatcaagaaaccctaaagtcaagcccgttcaagggttcaaggctgtatttggagatgattactacatttgtagatttcaggaaccggggaagattgaaggagagattgcaagtgcagatccaagaatatttctgaggaacctcttcacagggaggacactcggtccgccgattttacctaaggataatccctttggggaaaaacctaaccctaatagcgaaaacattgaattgcctgaatggttttctaagaaagatctcgatttctatgtctccaaattcgagaaggcaggatttaccggtggattgaactactacagagccatggatctgaattgggagctcactgcaccatggaccggagctaagattcaagttccagtgaagttcatgacaggtgacttcgacatggtttacaccacaccagggatgaaagagtacatacggtggtggatttgctgcagatgttccaactcttcaagagatagtggtgattgaagatgctgggcacttcgttaaccaagagaaacctcaagaggtcactgctcacatcaatgacttcttcaccaagcttcgggacaacaacaaaagcttttagagttctcgtttggttctattatgttggctctcaaaacaagttggttcttgcatgtgttgtttcgacaagattttgaataagacttggcattatg

SEQ ID NO: 34877 - protein, 297 aa, Arabidopsis thaliana
  peptide (1)..(297): Ceres Seq. ID no. 13497073
MEGIDHRMVSVNGITMHIAEKGPKEGPVVLLLHGFPDLWYTWRHQISGLSSLGYRAVAPDLRGYGDSDSPESFSEYTCLNVVGDLVALLDSVAGNQEKVFLVGHDWGAIIGWFLCLFRPEKINGFVCLSVPYRSRNPKVKPVQGFKAVFGDDYYICRFQEPGKIEGEIASADPRIFLRNLFTGRTLGPPILPKDNPFGEKPNPNSENIELPEWFSKKDLDFYVSKFEKAGFTGGLNYYRAMDLNWELTAPWTGAKIQVPVKFMTGDFDMVYTTPGMKEYIRWWICCRCSNSSRDSGD

SEQ ID NO: 34878 - protein, 290 aa, Arabidopsis thaliana
  peptide (1)..(290): Ceres Seq. ID no. 13497074
MVSVNGITMHIAEKGPKEGPVVLLLHGFPDLWYTWRHQISGLSSLGYRAVAPDLRGYGDSDSPESFSEYTCLNVVGDLVALLDSVAGNQEKVFLVGHDWGAIIGWFLCLFRPEKINGFVCLSVPYRSRNPKVKPVQGFKAVFGDDYYICRFQEPGKIEGEIASADPRIFLRNLFTGRTLGPPILPKDNPFGEKPNPNSENIELPEWFSKKDLDFYVSKFEKAGFTGGLNYYRAMDLNWELTAPWTGAKIQVPVKFMTGDFDMVYTTPGMKEYIRWWICCRCSNSSRDSGD

SEQ ID NO: 34879 - protein, 282 aa, Arabidopsis thaliana
  peptide (1)..(282): Ceres Seq. ID no. 13497075
MHIAEKGPKEGPVVLLLHGFPDLWYTWRHQISGLSSLGYRAVAPDLRGYGDSDSPESFSEYTCLNVVGDLVALLDSVAGNQEKVFLVGHDWGAIIGWFLCLFRPEKINGFVCLSVPYRSRNPKVKPVQGFKAVFGDDYYICRFQEPGKIEGEIASADPRIFLRNLFTGRTLGPPILPKDNPFGEKPNPNSENIELPEWFSKKDLDFYVSKFEKAGFTGGLNYYRAMDLNWELTAPWTGAKIQVPVKFMTGDFDMVYTTPGMKEYIRWWICCRCSNSSRDSGD

SEQ ID NO: 34880 - DNA, 1299 bp, Arabidopsis thaliana
  misc_feature (1)..(1299): Ceres Seq. ID no. 13490711
  misc_feature (1)..(1299): Ortholog of  Ceres SEQ ID NO 13594604 as cited in SEQ ID NO 52106
accccttctttattgctctgttctttgagcaaacaattttgatttcttcgcgagcgaagaaacctcaaagacgaaaagtctcgaaatttcataactttttcttgaagatctatctagatcacccattttcttaaaaacctcttgagatttttctatctcgtgaaaagaggttttaaggtttagatgggtgtggctcactctgatcttcacaatgatttgtcttcttcatcttgttttggggatcggaatatcttgaagcctggtttaggagatttaccagaggcgtgtgtggctataattgttgagaatttggatcctgttgagatctgtagattctcaaagctcaatagagcatttcgcggcgcttcttgggctgattgtgtttgggaatcgaaacttcctcagaattacagagatgttctcgagaaaatccttggtggcttccctgaaaatttgcaaaaaagacacctttatgcttttctctccaggattaactcattcgatgatgccaccaagaaggtatggatagataaacgaaccagtggtgtttgtctatccatttcagccaaaggattatccattacaggcattgatgatcgtagatattggagtcatatccccactgatgaatctcggttttcttctgtagcttatctccaacaaatctggtggtttgaagttgatggtgaaatcgatttcccattcccggttggaacctacagcattttcttcaggcttcaattaggccggtcgggcaagtggtttggtcgacgggtctgtaacacagaacaagtccatggttgggacattaaaccggttcgatttcaactctggactgaagatggtcaatattcctcatctcaatgtatgttaactgagcggggaaactggattcattaccacgccggagacgttgttgtccgggaatcgaataggtcatcgacaaagattaagttttcgatgactcagatcgattgtacacataccaaaggcgggttatctctagactctgtagtcgtgtacccgagctcgtgtaaagaccagttgaagcggttttaatgtttcaaccggatccggtttagtgagaggttaaagcagggttttttgttatgcaggtctttagccccttctatagatgtagttagagcttctatttagagagcttttgttttgtaacttcattgagatttgaggcaaactgtaataatatgttgtggttatgaaactaaaccatctgttataacttgttattagttacgttaagaatgattaatcgttacaaagtttaacttcagatcc

SEQ ID NO: 34881 - protein, 291 aa, Arabidopsis thaliana
  peptide (1)..(291): Ceres Seq. ID no. 13490712
MGVAHSDLHNDLSSSSCFGDRNILKPGLGDLPEACVAIIVENLDPVEICRFSKLNRAFRGASWADCVWESKLPQNYRDVLEKILGGFPENLQKRHLYAFLSRINSFDDATKKVWIDKRTSGVCLSISAKGLSITGIDDRRYWSHIPTDESRFSSVAYLQQIWWFEVDGEIDFPFPVGTYSIFFRLQLGRSGKWFGRRVCNTEQVHGWDIKPVRFQLWTEDGQYSSSQCMLTERGNWIHYHAGDVVVRESNRSSTKIKFSMTQIDCTHTKGGLSLDSVVVYPSSCKDQLKRF

SEQ ID NO: 34882 - DNA, 958 bp, Arabidopsis thaliana
  misc_feature (1)..(958): Ceres Seq. ID no. 13509164
  misc_feature (1)..(958): Ortholog of  Ceres SEQ ID NO 15178112 as cited in SEQ ID NO 1156
acacaccacatatttctctcccgcctaatcctccgcgttcccaagccgacgcgccgatctttcttctactacttgtcctccggcaataacaaactaaccatttcgaaaagtaattatctatggctctctcctcgttgatctcagccactccgctctccctttcggtgccgagatatctcgtgttacccacgcgccgccgtttccacttgccgttagcaactcttgactcatcgcctccagagtcatccgcatcatcatcgattcctacctcgattcccgtcaacggaaacacgttacctagttcttacggaactcgcaaagacgacagcccgtttgctcagttctttcgctccaccgaatccaacgttgagaggataatatttgatttccggttcctagcgcttttggcagtaggaggttcgctggctggttcgctactctgctttctcaatgggtgtgtctacatagtggaggcatataaagtctactggactaactgttcaaaaggcatccataccggccaaatggttttacgcctagtcgaagctatcgatgtttatctagctgggactgtgatgttaatatttagtatgggtttgtatggactcttcatcagtcactcgcctcatgatgttccaccggaatccgatcgtgcccttagatcctcttccctctttggtatgtttgcaatgaaggagagaccaaaatggatgaagatcagctcacttgatgagcttaaaaccaaagtgggacatgtcattgttatgattctgctagtgaagatgttcgagagaagcaagatggttactatcgccaccggtctagatttgcttagttattccgtttgcatcttcttgtcctctgcttctctgtatatcctccataatctccacaaaggagagacatgaacccatattatgtacagacccaatatatccaatatatgtgtttactctgt

SEQ ID NO: 34883 - protein, 262 aa, Arabidopsis thaliana
  peptide (1)..(262): Ceres Seq. ID no. 13509165
MALSSLISATPLSLSVPRYLVLPTRRRFHLPLATLDSSPPESSASSSIPTSIPVNGNTLPSSYGTRKDDSPFAQFFRSTESNVERIIFDFRFLALLAVGGSLAGSLLCFLNGCVYIVEAYKVYWTNCSKGIHTGQMVLRLVEAIDVYLAGTVMLIFSMGLYGLFISHSPHDVPPESDRALRSSSLFGMFAMKERPKWMKISSLDELKTKVGHVIVMILLVKMFERSKMVTIATGLDLLSYSVCIFLSSASLYILHNLHKGET

SEQ ID NO: 34884 - DNA, 1309 bp, Arabidopsis thaliana
  misc_feature (1)..(1309): Ceres Seq. ID no. 13580427
  misc_feature (1)..(1309): Ortholog of  Ceres SEQ ID NO 14308103 as cited in SEQ ID NO 59002
gattaagaatcaaaccatttttgaagaaccctaaaagttctcttcttcccccaaattttaatctgttcttgcaatcggattcgaaatccgaaagtcttagtctcgaatttgagctcaacagtttcttatggctccgaagaagtctgaaggaatcgctttgctttccgtttacagtgatgaagatgacgaagagatggaagacgccgaggaagaggaagaagaagatgagaagcagagaaatcagtaagagagtgaaaaaataattgaagaagatcaggtagaagaagcgaattatatggatgaagaagagaaaggaagaggaggagaagattctagaacgccgaggctattagatggtgttggagcttcttctagtgctcatgggactcctcgttcacttgataacgatgaatcatcgagacctgattggagtaatcgaatgattggtgagtctggagttgcggatggtgagagaggtgatgatgcttcaggggaaagtagtgatacgttattggatcagtttcttccgccaagaccgagagagaggtgctctgaggagctgcaaaggaaaatagataagtttctgagcttgaaaaagatggggaagagtttcaattcagaagtgaggaataggaaggaatacaggaatcctgacttcctattgcatgctgtatcttaccaagacattgaccagattggttcgtgtttcagtaaagatgtatttgatcccagtggatatgacccaagtgacttctgtgatgcaatagaaatcgacatgaagaatgagagggaaaggaaggaacaagaaagcaagaagaaccagaagcttgactttgtttctgctggtactcaacctggggcggttttcgctgctcaaaagcctaacatccccattccaggtattccagctttagctactagtggattgccttccataccaaccgaaattgctgctcgtgatggtagaccgaacaagaaatccaaatgggataaggttgatggggacgtaaagaatcctcctctagcagctggaactcaggattctatatcctcaatccggtctaatgcagctcttgtatctgctacaagtgctggttctggatactcagcttttgcgcaacaacggagacgagaggtggaaggaagaagatcttccgagaggaaattggagagaagaagttgagagacataaccagaacgaagcttttctatgttgtgattcatgtagcaagagtttctaaagaggttctagttcaatgtttcataacgagtacaaacttaaaatcaatgatatacagtaccttcattc

SEQ ID NO: 34885 - protein, 295 aa, Arabidopsis thaliana
  peptide (1)..(295): Ceres Seq. ID no. 13580428
MDEEEKGRGGEDSRTPRLLDGVGASSSAHGTPRSLDNDESSRPDWSNRMIGESGVADGERGDDASGESSDTLLDQFLPPRPRERCSEELQRKIDKFLSLKKMGKSFNSEVRNRKEYRNPDFLLHAVSYQDIDQIGSCFSKDVFDPSGYDPSDFCDAIEIDMKNERERKEQESKKNQKLDFVSAGTQPGAVFAAQKPNIPIPGIPALATSGLPSIPTEIAARDGRPNKKSKWDKVDGDVKNPPLAAGTQDSISSIRSNAALVSATSAGSGYSAFAQQRRREVEGRRSSERKLERRS

SEQ ID NO: 34886 - protein, 247 aa, Arabidopsis thaliana
  peptide (1)..(247): Ceres Seq. ID no. 13580429
MIGESGVADGERGDDASGESSDTLLDQFLPPRPRERCSEELQRKIDKFLSLKKMGKSFNSEVRNRKEYRNPDFLLHAVSYQDIDQIGSCFSKDVFDPSGYDPSDFCDAIEIDMKNERERKEQESKKNQKLDFVSAGTQPGAVFAAQKPNIPIPGIPALATSGLPSIPTEIAARDGRPNKKSKWDKVDGDVKNPPLAAGTQDSISSIRSNAALVSATSAGSGYSAFAQQRRREVEGRRSSERKLERRS

SEQ ID NO: 34887 - protein, 194 aa, Arabidopsis thaliana
  peptide (1)..(194): Ceres Seq. ID no. 13580430
MGKSFNSEVRNRKEYRNPDFLLHAVSYQDIDQIGSCFSKDVFDPSGYDPSDFCDAIEIDMKNERERKEQESKKNQKLDFVSAGTQPGAVFAAQKPNIPIPGIPALATSGLPSIPTEIAARDGRPNKKSKWDKVDGDVKNPPLAAGTQDSISSIRSNAALVSATSAGSGYSAFAQQRRREVEGRRSSERKLERRS

SEQ ID NO: 34888 - DNA, 1219 bp, Arabidopsis thaliana
  misc_feature (1)..(1219): Ceres Seq. ID no. 12603201
  misc_feature (1)..(1219): Ortholog of  Ceres SEQ ID NO 15168476 as cited in SEQ ID NO 60262
attctaatcatccccttgaattttccaagttttctccttttgtcttctctaactattttcccttaaaataaaaatccaatttttctttgtttcagtcctctcttctgctcattgatcttttaattaactttgattctctccgtttatggattaaccatttgatcgagataactctccaagaaatcgactgagttcgtaacttgttgttgtctgatcttttaaagattcaaccttttttggtccgatcatggctgttgctgagaatgctggtgtcaaagtggactcttctggtcagaatttagacaacaacaacactgctgcttcagctaccgagacgacaaagccgccatgtcctgatgatgatcaaagccctaaatctgactcatccactcctcttaccatcgattcgactcctgaaactgacgatcggatcaatgagactgctcaaaaggttcagactttaaatgggtttagtggaaatggtgagagagataacaatggagagatcaaagatttggctgatgcgttttctaagcttaatccgatggctcaggagtttgttcctccttctcttgctcgaagtcaatctggggttttgagaaatggattagggtttactaacaattttgcagccccacctaaacttgctgatgggaatgatcattttcctagaaggagaaggagttttggccaagggaagcgaagaatgaacaaaaggacaagcttggctcagaaggatgatgtaatcaggacaactgtatatgtctctgacatcgaccaacaggttacagaggagaacctcgcaggtgtctttattaactgtggacaggttgttgattgtcgtgtatgcggtgatccaaattctgtccttcgtttcgctttcattgaatttaccaatgaagagggagctagagctgctttgagcatgtcgggtactgtgctaggtttttaccctcttaaggttcttccttccaaaacagctattgctcctgttaacccgacttttcttccacgatctgaggatgagcgtgagatgtgcgttaggactgtttactgtaccaacattgacaagcggatcactcaaattgacttgaaaggcttctttgaaatgctttgcggggaggttcatcgtctgaggcttggagactatcaccaccaaacccgtattgcttttgttgagtttgcgatggcggaaagcgcaattgctgcgcttcactgc

SEQ ID NO: 34889 - protein, 324 aa, Arabidopsis thaliana
  peptide (1)..(324): Ceres Seq. ID no. 12603202
MAVAENAGVKVDSSGQNLDNNNTAASATETTKPPCPDDDQSPKSDSSTPLTIDSTPETDDRINETAQKVQTLNGFSGNGERDNNGEIKDLADAFSKLNPMAQEFVPPSLARSQSGVLRNGLGFTNNFAAPPKLADGNDHFPRRRRSFGQGKRRMNKRTSLAQKDDVIRTTVYVSDIDQQVTEENLAGVFINCGQVVDCRVCGDPNSVLRFAFIEFTNEEGARAALSMSGTVLGFYPLKVLPSKTAIAPVNPTFLPRSEDEREMCVRTVYCTNIDKRITQIDLKGFFEMLCGEVHRLRLGDYHHQTRIAFVEFAMAESAIAALHC

SEQ ID NO: 34890 - protein, 225 aa, Arabidopsis thaliana
  peptide (1)..(225): Ceres Seq. ID no. 12603203
MAQEFVPPSLARSQSGVLRNGLGFTNNFAAPPKLADGNDHFPRRRRSFGQGKRRMNKRTSLAQKDDVIRTTVYVSDIDQQVTEENLAGVFINCGQVVDCRVCGDPNSVLRFAFIEFTNEEGARAALSMSGTVLGFYPLKVLPSKTAIAPVNPTFLPRSEDEREMCVRTVYCTNIDKRITQIDLKGFFEMLCGEVHRLRLGDYHHQTRIAFVEFAMAESAIAALHC

SEQ ID NO: 34891 - protein, 171 aa, Arabidopsis thaliana
  peptide (1)..(171): Ceres Seq. ID no. 12603204
MNKRTSLAQKDDVIRTTVYVSDIDQQVTEENLAGVFINCGQVVDCRVCGDPNSVLRFAFIEFTNEEGARAALSMSGTVLGFYPLKVLPSKTAIAPVNPTFLPRSEDEREMCVRTVYCTNIDKRITQIDLKGFFEMLCGEVHRLRLGDYHHQTRIAFVEFAMAESAIAALHC

SEQ ID NO: 34892 - DNA, 1163 bp, Arabidopsis thaliana
  misc_feature (1)..(1163): Ceres Seq. ID no. 12371417
  misc_feature (1)..(1163): Ortholog of  Ceres SEQ ID NO 13656147 as cited in SEQ ID NO 64422
  misc_feature (1)..(1163): Ortholog of  Ceres SEQ ID NO 13596496 as cited in SEQ ID NO 68639
ctataaagccgatccatagataaacgaggaccggccagaaatcgcttcaccattcccaaatctctcttccattttctccacacaaatttctcttcaatctccgataatggaaggaaccggcgttgtggcggtgtacggtaacggtgcgataacggaggcgaagaaatctcccttctccgtgaaggtcggtttggctcagatgctccgtggtggtgttatcatggatgtcgtcaacgccgagcaagctcgtatcgccgaggaggctggtgcttgcgccgtcatggctttggagcgtgttcctgctgatatccttgaagcaattggaatcgattacatcgatgagagcgaggttttgactcttgctgatgaagatcatcacatcaacaagcataatttccggatcccgttcgtttgcggttgccggaatctcggcgaggctctgaggaggatccgtgaaggtgcggcgatgattaggaccaaaggtgaagctggaaccggtaacattattgaagctgtgaggcatgtgaggtctgttaatggtgacattagggttttgcgaaacatggatgatgatgaggttttcactttcgctaagaaattagccgctccgtacgatctcgtgatgcagactaagcagcttggtcgtcttcctgtagtccaattcgccgccggtggagtggctactccggctgatgcagctctcatgatgcagcttggatgtgatggtgtctttgttggttctggtatcttcaagagcggtgacccagctcgtcgtgcacgtgccattgttcaggctgtgactcattacagtgaccctgagatgcttgtggaggtgagctgtgggcttggagaagccatggttgggatcaatctcaacgatgagaaggttgagaggttcgctaatcgctccgagtgatcaaagaaataaaaggtaaaatttctcagacgaaatggtttcagaattttctcagaccattttgcagtaatctctttgaaaagaagaagatgatgatattgttggtagtttgtatcctttgtgttttccttataatctttgatagtcttttgttattgtaatctcgtaatccctttgcaagaacaagtttgtcagttataataatgtactactctcttgatcgatcagttggttttgaatctgatat

SEQ ID NO: 34893 - protein, 269 aa, Arabidopsis thaliana
  peptide (1)..(269): Ceres Seq. ID no. 12371418
MEGTGVVAVYGNGAITEAKKSPFSVKVGLAQMLRGGVIMDVVNAEQARIAEEAGACAVMALERVPADILEAIGIDYIDESEVLTLADEDHHINKHNFRIPFVCGCRNLGEALRRIREGAAMIRTKGEAGTGNIIEAVRHVRSVNGDIRVLRNMDDDEVFTFAKKLAAPYDLVMQTKQLGRLPVVQFAAGGVATPADAALMMQLGCDGVFVGSGIFKSGDPARRARAIVQAVTHYSDPEMLVEVSCGLGEAMVGINLNDEKVERFANRSE

SEQ ID NO: 34894 - protein, 238 aa, Arabidopsis thaliana
  peptide (1)..(238): Ceres Seq. ID no. 12371419
MLRGGVIMDVVNAEQARIAEEAGACAVMALERVPADILEAIGIDYIDESEVLTLADEDHHINKHNFRIPFVCGCRNLGEALRRIREGAAMIRTKGEAGTGNIIEAVRHVRSVNGDIRVLRNMDDDEVFTFAKKLAAPYDLVMQTKQLGRLPVVQFAAGGVATPADAALMMQLGCDGVFVGSGIFKSGDPARRARAIVQAVTHYSDPEMLVEVSCGLGEAMVGINLNDEKVERFANRSE

SEQ ID NO: 34895 - protein, 231 aa, Arabidopsis thaliana
  peptide (1)..(231): Ceres Seq. ID no. 12371420
MDVVNAEQARIAEEAGACAVMALERVPADILEAIGIDYIDESEVLTLADEDHHINKHNFRIPFVCGCRNLGEALRRIREGAAMIRTKGEAGTGNIIEAVRHVRSVNGDIRVLRNMDDDEVFTFAKKLAAPYDLVMQTKQLGRLPVVQFAAGGVATPADAALMMQLGCDGVFVGSGIFKSGDPARRARAIVQAVTHYSDPEMLVEVSCGLGEAMVGINLNDEKVERFANRSE

SEQ ID NO: 34896 - DNA, 1596 bp, Arabidopsis thaliana
  misc_feature (1)..(1596): Ceres Seq. ID no. 13487502
  misc_feature (1)..(1596): Ortholog of  Ceres SEQ ID NO 15177285 as cited in SEQ ID NO 52481
  misc_feature (1)..(1596): Ortholog of  Ceres SEQ ID NO 13594068 as cited in SEQ ID NO 58624
aatgaaagaaactgttcaacaacttctgatttctaaaatctttttaaaatctctccgccacttctagttggacttgacttctcaccatagtctgtcccgttgttaccgaccatctattatatagggaaagtctcttagctacagagacacaataaccatttggagaggtcatgaactctaagaatcgcataaacaatgtcggggaaggtgttgatatcgaaatccctgacactgctcatcagattagcagcgattcatggtttcaggcagcgttcgttctgacaacaagtataaacagcgcatacgtgttgggatattcaggaacagtcatggttcctttaggatggattggtggtgtggttggtcttattcttgctactgcaatctcactctatgcaaacactctcgtagccaagcttcatgagtttggtggcaaaagacacattcgctatagagaccttgcgggattcatttacggtagaaaggcttattgtcttacatgggtgttgcaatatgtcaatcttttcatgattaattgtggtttcatcatactagctggttccgccttaaaggctgtttatgtgctttttagggatgatcatgccatgaagttacctcattttatagctattgcgggtctgatttgtgcggtttttgctattggaattcctcatttgtcggctcttgggatatggcttgcggtttcgactatcctcagcctgatctatatcgttgtggcaatcgtgctatcggttaaagatggagttaaagcaccttcaagagattacgagatacaaggatcaccactaagcaaactttttaccatcactggagcagccgctacactagttttcgtattcaacacagggatgcttccagaaattcaggcaacagtaaagcaaccagtagtaaaaaacatgatgaaggctctatactttcaattcacggtgggtgttttaccgatgtttgcggttgtattcatcgggtattgggcttacggatcctcgacctcgccctatctactaaacaacgttaatggtccactttgggttaaagcccttgctaacatctccgctatccttcaatccgttatctcgttgcacatttttgcaagtccaacatatgagtacatggacaccaagtttgggatcaaaggaaacccattggcattaaagaacttgttgtttaggatcatggcaagaggcgggtacatagcagttagtacgcttctctcagcactcttgccgttccttggggacttcatgagcctcactggtgcagtgagcacattcccccttacattcattctagccaaccacatgtactataaggctaagaacaataagctcaatactttgcaaaagctatgccattggctcaacgttgtcttcttcagtttgatgtctgttgctgccgccattgcagctcttaggctcatcgcccttgactccaaaaacttccacgtttttgcagatttgtaattcataatatatactcatcgtatttattcttagttggatttcttatcaataaaattaattttcaataaaacaatgtatatagaactatggttactaggggatggagatattatgc

SEQ ID NO: 34897 - protein, 436 aa, Arabidopsis thaliana
  peptide (1)..(436): Ceres Seq. ID no. 13487503
MNSKNRINNVGEGVDIEIPDTAHQISSDSWFQAAFVLTTSINSAYVLGYSGTVMVPLGWIGGVVGLILATAISLYANTLVAKLHEFGGKRHIRYRDLAGFIYGRKAYCLTWVLQYVNLFMINCGFIILAGSALKAVYVLFRDDHAMKLPHFIAIAGLICAVFAIGIPHLSALGIWLAVSTILSLIYIVVAIVLSVKDGVKAPSRDYEIQGSPLSKLFTITGAAATLVFVFNTGMLPEIQATVKQPVVKNMMKALYFQFTVGVLPMFAVVFIGYWAYGSSTSPYLLNNVNGPLWVKALANISAILQSVISLHIFASPTYEYMDTKFGIKGNPLALKNLLFRIMARGGYIAVSTLLSALLPFLGDFMSLTGAVSTFPLTFILANHMYYKAKNNKLNTLQKLCHWLNVVFFSLMSVAAAIAALRLIALDSKNFHVFADL

SEQ ID NO: 34898 - protein, 383 aa, Arabidopsis thaliana
  peptide (1)..(383): Ceres Seq. ID no. 13487504
MVPLGWIGGVVGLILATAISLYANTLVAKLHEFGGKRHIRYRDLAGFIYGRKAYCLTWVLQYVNLFMINCGFIILAGSALKAVYVLFRDDHAMKLPHFIAIAGLICAVFAIGIPHLSALGIWLAVSTILSLIYIVVAIVLSVKDGVKAPSRDYEIQGSPLSKLFTITGAAATLVFVFNTGMLPEIQATVKQPVVKNMMKALYFQFTVGVLPMFAVVFIGYWAYGSSTSPYLLNNVNGPLWVKALANISAILQSVISLHIFASPTYEYMDTKFGIKGNPLALKNLLFRIMARGGYIAVSTLLSALLPFLGDFMSLTGAVSTFPLTFILANHMYYKAKNNKLNTLQKLCHWLNVVFFSLMSVAAAIAALRLIALDSKNFHVFADL

SEQ ID NO: 34899 - protein, 317 aa, Arabidopsis thaliana
  peptide (1)..(317): Ceres Seq. ID no. 13487505
MINCGFIILAGSALKAVYVLFRDDHAMKLPHFIAIAGLICAVFAIGIPHLSALGIWLAVSTILSLIYIVVAIVLSVKDGVKAPSRDYEIQGSPLSKLFTITGAAATLVFVFNTGMLPEIQATVKQPVVKNMMKALYFQFTVGVLPMFAVVFIGYWAYGSSTSPYLLNNVNGPLWVKALANISAILQSVISLHIFASPTYEYMDTKFGIKGNPLALKNLLFRIMARGGYIAVSTLLSALLPFLGDFMSLTGAVSTFPLTFILANHMYYKAKNNKLNTLQKLCHWLNVVFFSLMSVAAAIAALRLIALDSKNFHVFADL

SEQ ID NO: 34900 - DNA, 822 bp, Arabidopsis thaliana
  misc_feature (1)..(822): Ceres Seq. ID no. 13504913
  misc_feature (1)..(822): Ortholog of  Ceres SEQ ID NO 13495070 as cited in SEQ ID NO 53216
  misc_feature (1)..(822): Ortholog of  Ceres SEQ ID NO 12598241 as cited in SEQ ID NO 61025
  misc_feature (1)..(822): Ortholog of  Ceres SEQ ID NO 13661333 as cited in SEQ ID NO 61620
  misc_feature (1)..(822): Ortholog of  Ceres SEQ ID NO 15173749 as cited in SEQ ID NO 61775
  misc_feature (1)..(822): Ortholog of  Ceres SEQ ID NO 13596812 as cited in SEQ ID NO 62283
  misc_feature (1)..(822): Ortholog of  Ceres SEQ ID NO 13623021 as cited in SEQ ID NO 0
  misc_feature (1)..(822): Ortholog of  Ceres SEQ ID NO 14302179 as cited in SEQ ID NO 0
atgtttacttattcggactagagagcttccgcataaagctgaggaaaaaaaagagagaagacgcacaccgaagaaaacacacaagactccattattctcctgcttcttcgtctcttcaattattttctctgagactagctttgattcaaccatggctaatgcagcatcaggaatggcagtccatgatgactgcaagctgaaatttatggaattgaagacgaaaaggacacaccgtttcatcatttacaagattgaggagctgcagaaacaagtgattgttgagaaaatcggtgaaccgggtcaaacccatgaggaccttgctgcaagtcttccagctgatgaatgccgctatgccattttcgattttgattttgtcagttctgagggtgtcccaaggagcaggatttttttcgtggcatggtctccggacacagcaagagtgagaagcaagatgatctatgcgagctccaaggacaggttcaagagagaactagacggaattcaggtcgagcttcaggcaaccgatccaaccgagatggatcttgatgttttcaaaagccgagccaattgatgaaagaaatcccctgaaaatttcggttgaatcaaactttttcgtactattactcagtgatgctttttcctaaagtttgctgtgacggtaccaacctgaacagcttcattttatcagtttggtctttgtctttgtctttggtctcctttttgggtccttatagtgttgtcttaaaacttaaggaatctggcttgtgctctttaccattgtggaagaaatcgaaccctttattaaacaagaatcctattggc

SEQ ID NO: 34901 - protein, 189 aa, Arabidopsis thaliana
  peptide (1)..(189): Ceres Seq. ID no. 13504914
CLLIRTRELPHKAEEKKERRRTPKKTHKTPLFSCFFVSSIIFSETSFDSTMANAASGMAVHDDCKLKFMELKTKRTHRFIIYKIEELQKQVIVEKIGEPGQTHEDLAASLPADECRYAIFDFDFVSSEGVPRSRIFFVAWSPDTARVRSKMIYASSKDRFKRELDGIQVELQATDPTEMDLDVFKSRAN

SEQ ID NO: 34902 - protein, 139 aa, Arabidopsis thaliana
  peptide (1)..(139): Ceres Seq. ID no. 13504915
MANAASGMAVHDDCKLKFMELKTKRTHRFIIYKIEELQKQVIVEKIGEPGQTHEDLAASLPADECRYAIFDFDFVSSEGVPRSRIFFVAWSPDTARVRSKMIYASSKDRFKRELDGIQVELQATDPTEMDLDVFKSRAN

SEQ ID NO: 34903 - protein, 132 aa, Arabidopsis thaliana
  peptide (1)..(132): Ceres Seq. ID no. 13504916
MAVHDDCKLKFMELKTKRTHRFIIYKIEELQKQVIVEKIGEPGQTHEDLAASLPADECRYAIFDFDFVSSEGVPRSRIFFVAWSPDTARVRSKMIYASSKDRFKRELDGIQVELQATDPTEMDLDVFKSRAN

SEQ ID NO: 34904 - DNA, 742 bp, Arabidopsis thaliana
  misc_feature (1)..(742): Ceres Seq. ID no. 13592791
  misc_feature (1)..(742): Ortholog of  Ceres SEQ ID NO 13594705 as cited in SEQ ID NO 52034
cttcgtcggagtcggagcagagaaaggttttggagatcgagaccaaactccgattgaaagaggatgcattcttttggttacagagcgaatgctctactcacattcgccgtcacgattctagctttcatttgcgcgattgcttccttctctgataacttcagtaaccaaaatccctctgctcagatccagatattgaatatcaattggtttcagaagcaacctcatggaaatgatgaggtcagtttgacactgaacataacagcagacttgcagtcgctatttacttggaacacaaagcaggtatttgcttttgtagcagcagagtatgaaacctccaagaacgccctgaatcaggtttcactatgggatgccataatacccgagagagagcatgccaaattctggatacaaatctcaaacaagtaccgtttcatagatcagggacataacctccgagggaaggactttaacttgacattgcactggcatgtcatgcccaagacaggcaagatgtttgctgacaaaatagttatgtctggttatcgtttacccaatgcatacagatgaagatgaagagcctcctcctgcatcatgtaaggttaacaaaaatctcttaaaactaggaaagaagagagttatatttcaggggttaagttagacttgctgatctatatactggcatgaagttaaaaacattgtttgggaatgaattatgagccaagaacatatgagattgtcgtcg

SEQ ID NO: 34905 - protein, 167 aa, Arabidopsis thaliana
  peptide (1)..(167): Ceres Seq. ID no. 15221153
MHSFGYRANALLTFAVTILAFICAIASFSDNFSNQNPSAQIQILNINWFQKQPHGNDEVSLTLNITADLQSLFTWNTKQVFAFVAAEYETSKNALNQVSLWDAIIPEREHAKFWIQISNKYRFIDQGHNLRGKDFNLTLHWHVMPKTGKMFADKIVMSGYRLPNAYR

SEQ ID NO: 34906 - DNA, 1352 bp, Arabidopsis thaliana
  misc_feature (1)..(1352): Ceres Seq. ID no. 13486952
  misc_feature (1)..(1352): Ortholog of  Ceres SEQ ID NO 14312163 as cited in SEQ ID NO 57211
gaaacggaacgtaattatttacgtgacttatgaaaagtcatcggcgattgtttctaatttgtcatcgccgccgttgaactatctcgccggcgataatgatctacgttggtggagtgcaatttctagacgagagtagctctttttcattgtcttcttcatcgcagggaagtagcttgcttgttgatgtaatgagtcatcctgtgataacgttagcttctgattcctttaagaatcttgaggaaaagaatgtttctttcgatgaaagtgattcagagagctcaacaaaagacagatatgtttacatattccaaagagaatttgctgttgtgaatccagctcttgttgattttgttggcaccgatgaagcaacaacttgtgtaggccttgttatccgcaacagaaaatctggaatgacgtctgttgcacacatggattcgccagagattgtggatttggggataagccagatgttgttattggttttacaggatgacgtagatgccgagttagatgtacatatggttggtggttatgaagatgtcgacataaaaaatgctgatggtgttggtgactatgccaaaccagagggttattcatttccgttgtgttgcaaattagtagaaactttgcagaagagaagagaaaactttcacattcaaaccctctttattcttgggcacaataccaagttggattcacaagcaaacacgtgccccatttttaatggatgcctggtgaataccagcaccggtgcaatcttgccagccagtttcaacagaacatctagatgtccggatgagatcgttagaagaattcgagtttcatcatcgtttgaagattctagctggaagggaaagttacttgacacatatgacacaaaaactgatagattcatcatcgcaccatgccgctggacaatgcgcttgattgaatatgtttgggaacttaatcagcttactgatgaagaaatcctcactaactgttccacctcaccttctgctgaaggtccagacttcgtaaacagtttaagaaggaattggggatatttactgaaatatccagaatggagcaaaacattcccaaggaggcaaccacgtgtgtttgaaagaactgtcgatggacactggaaaaaatgctgactttctcatctaatcatcatgacattatccagaaatctggctaaaaacaacggttagtgtatctaacattttgagatttatgtaaatggtcaagaacacatgtgattgattcttggacacagaaaatgtttgatttatctttttgactttttgtgtcaaacgttgcaagtttggttcctatgaaaatatgggccggatcaggcccggtagacc

SEQ ID NO: 34907 - protein, 347 aa, Arabidopsis thaliana
  peptide (1)..(347): Ceres Seq. ID no. 13486953
MIYVGGVQFLDESSSFSLSSSSQGSSLLVDVMSHPVITLASDSFKNLEEKNVSFDESDSESSTKDRYVYIFQREFAVVNPALVDFVGTDEATTCVGLVIRNRKSGMTSVAHMDSPEIVDLGISQMLLLVLQDDVDAELDVHMVGGYEDVDIKNADGVGDYAKPEGYSFPLCCKLVETLQKRRENFHIQTLFILGHNTKLDSQANTCPIFNGCLVNTSTGAILPASFNRTSRCPDEIVRRIRVSSSFEDSSWKGKLLDTYDTKTDRFIIAPCRWTMRLIEYVWELNQLTDEEILTNCSTSPSAEGPDFVNSLRRNWGYLLKYPEWSKTFPRRQPRVFERTVDGHWKKC

SEQ ID NO: 34908 - protein, 316 aa, Arabidopsis thaliana
  peptide (1)..(316): Ceres Seq. ID no. 13486954
MSHPVITLASDSFKNLEEKNVSFDESDSESSTKDRYVYIFQREFAVVNPALVDFVGTDEATTCVGLVIRNRKSGMTSVAHMDSPEIVDLGISQMLLLVLQDDVDAELDVHMVGGYEDVDIKNADGVGDYAKPEGYSFPLCCKLVETLQKRRENFHIQTLFILGHNTKLDSQANTCPIFNGCLVNTSTGAILPASFNRTSRCPDEIVRRIRVSSSFEDSSWKGKLLDTYDTKTDRFIIAPCRWTMRLIEYVWELNQLTDEEILTNCSTSPSAEGPDFVNSLRRNWGYLLKYPEWSKTFPRRQPRVFERTVDGHWKKC

SEQ ID NO: 34909 - protein, 242 aa, Arabidopsis thaliana
  peptide (1)..(242): Ceres Seq. ID no. 13486955
MTSVAHMDSPEIVDLGISQMLLLVLQDDVDAELDVHMVGGYEDVDIKNADGVGDYAKPEGYSFPLCCKLVETLQKRRENFHIQTLFILGHNTKLDSQANTCPIFNGCLVNTSTGAILPASFNRTSRCPDEIVRRIRVSSSFEDSSWKGKLLDTYDTKTDRFIIAPCRWTMRLIEYVWELNQLTDEEILTNCSTSPSAEGPDFVNSLRRNWGYLLKYPEWSKTFPRRQPRVFERTVDGHWKKC

SEQ ID NO: 34910 - DNA, 1040 bp, Arabidopsis thaliana
  misc_feature (1)..(1040): Ceres Seq. ID no. 13501435
  misc_feature (1)..(1040): Ortholog of  Ceres SEQ ID NO 13583137 as cited in SEQ ID NO 60857
attccgcaatttattgattcttctttatcgtgcttctgattgttttggttaacggatcaaattatcgaacgatgatggcttctctcgcgacttccataagtggaagcttcagaattctggttaaatcatcttcgacgaggaatgggtttcctgtaatctctgatcaaaacccgagtttcgtcttgtttgcgaataaacgcagacatatctctagaacggcgatttttcaccgatctgcgataagtggttcgagtcaaggagaaaagatatcacctttagcatctggtgtatcttcaggtttatattcagctcagacttttgatttgacgcctcaaaacgttgatttggtgcttgaggatgttagaccgttcttgatctctgatggtggaaacgtcgacgttgtctccgttgaagatggggtagtctctcttaagctccaaggagcatgtaccagctgtccaagttcttcaacaactatgacaatgggaatagagagggtactcaaggaaaagtttggagatgcattgaaagatattcgacaagtttttgatgaagaagtaaaacagataaccgtggaggcagtgaatgctcatctagatatactgaggccagctatcaagaactatggcggaagtgttgaagttttatcggttgaaggcgaggactgcgttgtaaaatatgttggaccggagtcgattggaatgggaatacaggcagcgattaaagaaaagtttaaggacatatctaatgtaacctttacaagctagaaagcatgaagaaagccactatattatgtaaaaacattattgctctttgtttgagctaatgtccacttcaatagtcgtcctctccataactgtccttagccatcttgccaggttgatcaagaacggtgtgtagacaaagtagcaagttgttgtccacgtaaccagtcccttcaccagcaaacaaaacaagaaagaaacagagtcatgtgtatgtttttgtttgatgatgtctgtataaacacttattacctggccaaagatttctatgtttgc

SEQ ID NO: 34911 - protein, 231 aa, Arabidopsis thaliana
  peptide (1)..(231): Ceres Seq. ID no. 13501436
MMASLATSISGSFRILVKSSSTRNGFPVISDQNPSFVLFANKRRHISRTAIFHRSAISGSSQGEKISPLASGVSSGLYSAQTFDLTPQNVDLVLEDVRPFLISDGGNVDVVSVEDGVVSLKLQGACTSCPSSSTTMTMGIERVLKEKFGDALKDIRQVFDEEVKQITVEAVNAHLDILRPAIKNYGGSVEVLSVEGEDCVVKYVGPESIGMGIQAAIKEKFKDISNVTFTS

SEQ ID NO: 34912 - protein, 230 aa, Arabidopsis thaliana
  peptide (1)..(230): Ceres Seq. ID no. 13501437
MASLATSISGSFRILVKSSSTRNGFPVISDQNPSFVLFANKRRHISRTAIFHRSAISGSSQGEKISPLASGVSSGLYSAQTFDLTPQNVDLVLEDVRPFLISDGGNVDVVSVEDGVVSLKLQGACTSCPSSSTTMTMGIERVLKEKFGDALKDIRQVFDEEVKQITVEAVNAHLDILRPAIKNYGGSVEVLSVEGEDCVVKYVGPESIGMGIQAAIKEKFKDISNVTFTS

SEQ ID NO: 34913 - DNA, 813 bp, Arabidopsis thaliana
  misc_feature (1)..(813): Ceres Seq. ID no. 12332025
  misc_feature (1)..(813): Ortholog of  Ceres SEQ ID NO 12583465 as cited in SEQ ID NO 56513
  misc_feature (1)..(813): Ortholog of  Ceres SEQ ID NO 14309546 as cited in SEQ ID NO 0
aataatgtgagaaaagagcaaaacacaaaaatgaaaaaaccttcttctcttgtaactcgcacaaccttatcgagtgaaagaagattgggtcagtagtgaaaaatggcgtcgattgcagcttcttctacctttcactcgttttgcagaaccaaaagccctaatctttcttcgacccaccttcttcctttgtcgaaaaacctcaactttcggaccagagctatcggaaatagccgcaattgcagttttgctgggtttataaaacaaaatcgccttggattgaggaagctttcgtctattggagaaggaggagaaggtgtcgctgtcgcagaggagcaaccgcaagagactgtctctgttcctgtctctccttcagacatgctcaccatgtttttccaggctgatggaactttgaacgaagcagctattcctaatgtgacaagggccttacaggatattgatggagtttccaatttaaaggttcaggtttctgaaggtgttgccgtcgttgagcttttgaagcaaacaacggttcaagcaacaggagtggcgtcaaacttggtggagactatacaaggagctggatttaagttacagactttgaatctgagttttgaagatgacgatgaggttcttgtctagtgaaatcatccttttcctccattttgtgattaaagaaactcataatgttcaattctagggataatttctttcatttgttcctctaaagaaaacaaatgtggtaactttttttagaaagtgggaattaatgttttctttgttgaaataaaggagaaatggaaaatatctatattg

SEQ ID NO: 34914 - protein, 178 aa, Arabidopsis thaliana
  peptide (1)..(178): Ceres Seq. ID no. 12332026
MASIAASSTFHSFCRTKSPNLSSTHLLPLSKNLNFRTRAIGNSRNCSFAGFIKQNRLGLRKLSSIGEGGEGVAVAEEQPQETVSVPVSPSDMLTMFFQADGTLNEAAIPNVTRALQDIDGVSNLKVQVSEGVAVVELLKQTTVQATGVASNLVETIQGAGFKLQTLNLSFEDDDEVLV

SEQ ID NO: 34915 - DNA, 697 bp, Arabidopsis thaliana
  misc_feature (1)..(697): Ceres Seq. ID no. 12393479
  misc_feature (1)..(697): Ortholog of  Ceres SEQ ID NO 13654989 as cited in SEQ ID NO 63117
  misc_feature (1)..(697): Ortholog of  Ceres SEQ ID NO 13584744 as cited in SEQ ID NO 69137
atttatcgtctacgagctgatggaaagcggatcattggatacacagttacacggaccttctcggggatcggctttaacatggcacatgcggatgaagattgctcttgatacagcaagagctgttgagtatctccacgagcgttgtcgtcctccggttatccacagagatcttaaatcgtcaaatattctccttgattcttccttcaacgccaagatttcggattttggtcttgcggtaatggtgggggctcacggcaaaaacaacattaaactatcaggaacacttggttatgttgctccagaatatctcctagatggaaaattgacggataagagtgatgtttatgcgtttggtgtggttttacttgaactcttgttaggaagacggccggttgagaaattgagttcggttcagtgtcaatctcttgtcacttgggcaatgccccaacttacggatagatcaaagcttccgaaaatcgtggatccggttatcaaagatacaatggatcataagcacttataccaggtggcagccgtggcagtgctttgtgtacaaccagaaccgagttatcgaccgttgataaccgatgttcttcactcactagttccattggttccggtagagctaggagggactctccggttaataccatcatcgtcttgatttaagaaaataatattttttgcttcttttttt

SEQ ID NO: 34916 - protein, 220 aa, Arabidopsis thaliana
  peptide (1)..(220): Ceres Seq. ID no. 12393480
FIVYELMESGSLDTQLHGPSRGSALTWHMRMKIALDTARAVEYLHERCRPPVIHRDLKSSNILLDSSFNAKISDFGLAVMVGAHGKNNIKLSGTLGYVAPEYLLDGKLTDKSDVYAFGVVLLELLLGRRPVEKLSSVQCQSLVTWAMPQLTDRSKLPKIVDPVIKDTMDHKHLYQVAAVAVLCVQPEPSYRPLITDVLHSLVPLVPVELGGTLRLIPSSS

SEQ ID NO: 34917 - protein, 214 aa, Arabidopsis thaliana
  peptide (1)..(214): Ceres Seq. ID no. 12393481
MESGSLDTQLHGPSRGSALTWHMRMKIALDTARAVEYLHERCRPPVIHRDLKSSNILLDSSFNAKISDFGLAVMVGAHGKNNIKLSGTLGYVAPEYLLDGKLTDKSDVYAFGVVLLELLLGRRPVEKLSSVQCQSLVTWAMPQLTDRSKLPKIVDPVIKDTMDHKHLYQVAAVAVLCVQPEPSYRPLITDVLHSLVPLVPVELGGTLRLIPSSS

SEQ ID NO: 34918 - protein, 192 aa, Arabidopsis thaliana
  peptide (1)..(192): Ceres Seq. ID no. 12393482
MRMKIALDTARAVEYLHERCRPPVIHRDLKSSNILLDSSFNAKISDFGLAVMVGAHGKNNIKLSGTLGYVAPEYLLDGKLTDKSDVYAFGVVLLELLLGRRPVEKLSSVQCQSLVTWAMPQLTDRSKLPKIVDPVIKDTMDHKHLYQVAAVAVLCVQPEPSYRPLITDVLHSLVPLVPVELGGTLRLIPSSS

SEQ ID NO: 34919 - DNA, 1249 bp, Arabidopsis thaliana
  misc_feature (1)..(1249): Ceres Seq. ID no. 12334266
  misc_feature (1)..(1249): Ortholog of  Ceres SEQ ID NO 13593955 as cited in SEQ ID NO 54278
  misc_feature (1)..(1249): Ortholog of  Ceres SEQ ID NO 13597380 as cited in SEQ ID NO 64054
  misc_feature (1)..(1249): Ortholog of  Ceres SEQ ID NO 12625474 as cited in SEQ ID NO 64169
  misc_feature (1)..(1249): Ortholog of  Ceres SEQ ID NO 13597502 as cited in SEQ ID NO 64681
aaaatatgacatttacattctctcaaaagaaactttctacataatataaaaagtcacacattctctctattaattaaacatgttgcttgttgcgtttgtgactcttttggtagcagtagctttgcagccactaccgtcagtgttgtctttggacgttcaccttcttcggcagctagcccgcaaagcacaatgtgacatcgatacttgtgtttggagattctagtgtcgatccagggaacaataatttcattaaaaccgaaatgaaagggaattttccaccttatggtgaaaatttcatcaaccataaacccaccggtagattatgcgatggattactcgctcccgattatattgcggaggccatgggttaccctcccataccggcttttcttgatccatccctaacccaagctgatctaactcgcggtgcaagttttgcctctgctggttctggctatgacgatctcacagctaatatatcaaacgtatggagtttcactacacaagccaattactttctacattacaagattcatctgactaaattggtcggtccattagagagcgctaaaatgataaataatgctatatttcttatgagtatgggatcaaatgactttcttcaaaattacttagtcgattttactcgacaaaagcaattcacggttgagcaatacatcgagtttctctcccaccgtatgctttacgacgccaagatgttgcataggcttggagctaaaaggttggtggtagtgggagttcctcccatgggatgcatgcctttaattaaatacctacgaggccaaaaaacttgtgtagatcaactaaaccaaatcgctttctcctttaacgccaaaatcatcaaaaatctagagcttctccagtctaaaatcggtttgaaaaccatctacgttgatgcttattcgaccatccaagaagccattaaaaatccgagaaaatttggtttcgtcgaggcttcgctaggctgttgtggaacaggtacatacgaatatggagagacatgcaaagatatgcaagtatgcaaagatcctaccaaatacgttttttgggacgccgtccatccaacacaaagaatgtatcaaatcattgttaagaaggcaattgcatccatcagtgaagagtttcttgtttagaaatattatatgttcgtattttactatcatgatttatgaaagattctagatgtaattgaaaagcattcaaaatgttaaatttaatggttcaaatc

SEQ ID NO: 34920 - protein, 297 aa, Arabidopsis thaliana
  peptide (1)..(297): Ceres Seq. ID no. 12334267
MKGNFPPYGENFINHKPTGRLCDGLLAPDYIAEAMGYPPIPAFLDPSLTQADLTRGASFASAGSGYDDLTANISNVWSFTTQANYFLHYKIHLTKLVGPLESAKMINNAIFLMSMGSNDFLQNYLVDFTRQKQFTVEQYIEFLSHRMLYDAKMLHRLGAKRLVVVGVPPMGCMPLIKYLRGQKTCVDQLNQIAFSFNAKIIKNLELLQSKIGLKTIYVDAYSTIQEAIKNPRKFGFVEASLGCCGTGTYEYGETCKDMQVCKDPTKYVFWDAVHPTQRMYQIIVKKAIASISEEFLV

SEQ ID NO: 34921 - protein, 263 aa, Arabidopsis thaliana
  peptide (1)..(263): Ceres Seq. ID no. 12334268
MGYPPIPAFLDPSLTQADLTRGASFASAGSGYDDLTANISNVWSFTTQANYFLHYKIHLTKLVGPLESAKMINNAIFLMSMGSNDFLQNYLVDFTRQKQFTVEQYIEFLSHRMLYDAKMLHRLGAKRLVVVGVPPMGCMPLIKYLRGQKTCVDQLNQIAFSFNAKIIKNLELLQSKIGLKTIYVDAYSTIQEAIKNPRKFGFVEASLGCCGTGTYEYGETCKDMQVCKDPTKYVFWDAVHPTQRMYQIIVKKAIASISEEFLV

SEQ ID NO: 34922 - protein, 193 aa, Arabidopsis thaliana
  peptide (1)..(193): Ceres Seq. ID no. 12334269
MINNAIFLMSMGSNDFLQNYLVDFTRQKQFTVEQYIEFLSHRMLYDAKMLHRLGAKRLVVVGVPPMGCMPLIKYLRGQKTCVDQLNQIAFSFNAKIIKNLELLQSKIGLKTIYVDAYSTIQEAIKNPRKFGFVEASLGCCGTGTYEYGETCKDMQVCKDPTKYVFWDAVHPTQRMYQIIVKKAIASISEEFLV

SEQ ID NO: 34923 - DNA, 1785 bp, Arabidopsis thaliana
  misc_feature (1)..(1785): Ceres Seq. ID no. 12338439
  misc_feature (1)..(1785): Ortholog of  Ceres SEQ ID NO 14310998 as cited in SEQ ID NO 53411
acttcttcttcatcatctttaatcgttgggaaaagtttgatgatacggagtggacaattcttggtgtagaaggagaatctgagagagagagagtcatggaagctctgaaaaccgcaacttttagccctatgtcggtgttatccgagaaaagatcagaaccacgaaagcctttctcgctccctaacctctttccaccaaaatcacagagaccaatctcccaagaaagcttcttgaagagattcaatggtggattggctcttctaacttctgttctaagcagtgcaacagctcctgctaaatccctgacgtacgaggaagctctgcaacaatctatgaccacttcttcatcttttgattcggatggtctgattgaagggatatccaattttgtcacagacaatcctttggttattgccggtggagttgctgcattggctgttccatttgttctgtctcaggttctgaacaagaagcccaaatcatggggagttgagtctgctaagaatgcttataccaagttgggtactgatgataatgctcagttgcttgacataagagctactgctgatttcagacaagtgggcagtcctaatattaagggtttgggtaaaaaagcggtttctactgtttataacggtgaagacaagcctggtttcctgaagaagctttctttgaagtttaaagatcctgagaacaccacattatacattctggacaagtttgatggaaactctgagcttgttgctgaattggtggctcttaatggattcaaatctgcttatgcgattaaagatggtgcagagggacctagaggctggttgaatagcagcttgccttggatagagccaaagaagactctcagccttgatttaagcagtttgacggatagcatcagcggtgtatttggtgagagttctgatggtgtatctgtcgctcttggagtagctgctgctgctggattaagtgtttttgcatttacagagattgaaaccatactccaactactaggttcagctgcacttgttcaacttgcaggcaagaaacttctatttgctgaggaccgaaagcaaactctaaaacaggtggatgagttcttgaacacaaaggttgcccctaaagaacttgttgatgagttaaaggaaataggaaaggctcttcttcctcaatcaacaagcaacaaagctctcccagcaccagcaacagtaacagcagaagcagaatcagctacagctacaaccaccacagtcgataaaccagtacctgagccagaaacagttgcagctacaacaaccactgtagataaaccagtacctgagccagagccagtgccagagccagtgccagtgccagcgattgaagctgcagtcgctgcacaagtaatcacagaaccaaccgaaacagaagccaaaccaaaacctcattcaagacctctctctccatatgcatcgtaccctgacttgaagcctccatcttctccgatgccatcgcagccctgaaaacagctaagaacagtctctctctcgttacttagtctggttttgtcctcctgcaaacagaagaacaaaagtggtcgaatattgtaacttgttcttttttctctcgttttttctcccgaacttagatgctactttgtgtcgaatctgagataagtggactttgttttgtttttctccctttataccaccattgagttcaaacaagagtctgtcatcgcgttaaaggggatcagaagctgtgtgaggggtgtattggacgaaataaaagttgtggggaaatttccaaatg

SEQ ID NO: 34924 - protein, 497 aa, Arabidopsis thaliana
  peptide (1)..(497): Ceres Seq. ID no. 12338440
FFFIIFNRWEKFDDTEWTILGVEGESERERVMEALKTATFSPMSVLSEKRSEPRKPFSLPNLFPPKSQRPISQESFLKRFNGGLALLTSVLSSATAPAKSLTYEEALQQSMTTSSSFDSDGLIEGISNFVTDNPLVIAGGVAALAVPFVLSQVLNKKPKSWGVESAKNAYTKLGTDDNAQLLDIRATADFRQVGSPNIKGLGKKAVSTVYNGEDKPGFLKKLSLKFKDPENTTLYILDKFDGNSELVAELVALNGFKSAYAIKDGAEGPRGWLNSSLPWIEPKKTLSLDLSSLTDSISGVFGESSDGVSVALGVAAAAGLSVFAFTEIETILQLLGSAALVQLAGKKLLFAEDRKQTLKQVDEFLNTKVAPKELVDELKEIGKALLPQSTSNKALPAPATVTAEAESATATTTTVDKPVPEPETVAATTTTVDKPVPEPEPVPEPVPVPAIEAAVAAQVITEPTETEAKPKPHSRPLSPYASYPDLKPPSSPMPSQP

SEQ ID NO: 34925 - protein, 466 aa, Arabidopsis thaliana
  peptide (1)..(466): Ceres Seq. ID no. 12338441
MEALKTATFSPMSVLSEKRSEPRKPFSLPNLFPPKSQRPISQESFLKRFNGGLALLTSVLSSATAPAKSLTYEEALQQSMTTSSSFDSDGLIEGISNFVTDNPLVIAGGVAALAVPFVLSQVLNKKPKSWGVESAKNAYTKLGTDDNAQLLDIRATADFRQVGSPNIKGLGKKAVSTVYNGEDKPGFLKKLSLKFKDPENTTLYILDKFDGNSELVAELVALNGFKSAYAIKDGAEGPRGWLNSSLPWIEPKKTLSLDLSSLTDSISGVFGESSDGVSVALGVAAAAGLSVFAFTEIETILQLLGSAALVQLAGKKLLFAEDRKQTLKQVDEFLNTKVAPKELVDELKEIGKALLPQSTSNKALPAPATVTAEAESATATTTTVDKPVPEPETVAATTTTVDKPVPEPEPVPEPVPVPAIEAAVAAQVITEPTETEAKPKPHSRPLSPYASYPDLKPPSSPMPSQP

SEQ ID NO: 34926 - protein, 455 aa, Arabidopsis thaliana
  peptide (1)..(455): Ceres Seq. ID no. 12338443
MSVLSEKRSEPRKPFSLPNLFPPKSQRPISQESFLKRFNGGLALLTSVLSSATAPAKSLTYEEALQQSMTTSSSFDSDGLIEGISNFVTDNPLVIAGGVAALAVPFVLSQVLNKKPKSWGVESAKNAYTKLGTDDNAQLLDIRATADFRQVGSPNIKGLGKKAVSTVYNGEDKPGFLKKLSLKFKDPENTTLYILDKFDGNSELVAELVALNGFKSAYAIKDGAEGPRGWLNSSLPWIEPKKTLSLDLSSLTDSISGVFGESSDGVSVALGVAAAAGLSVFAFTEIETILQLLGSAALVQLAGKKLLFAEDRKQTLKQVDEFLNTKVAPKELVDELKEIGKALLPQSTSNKALPAPATVTAEAESATATTTTVDKPVPEPETVAATTTTVDKPVPEPEPVPEPVPVPAIEAAVAAQVITEPTETEAKPKPHSRPLSPYASYPDLKPPSSPMPSQP

SEQ ID NO: 34927 - DNA, 1233 bp, Arabidopsis thaliana
  misc_feature (1)..(1233): Ceres Seq. ID no. 12334372
  misc_feature (1)..(1233): Ortholog of  Ceres SEQ ID NO 14310616 as cited in SEQ ID NO 55699
  misc_feature (1)..(1233): Ortholog of  Ceres SEQ ID NO 15173907 as cited in SEQ ID NO 62356
  misc_feature (1)..(1233): Ortholog of  Ceres SEQ ID NO 13596519 as cited in SEQ ID NO 62572
  misc_feature (1)..(1233): Ortholog of  Ceres SEQ ID NO 12625108 as cited in SEQ ID NO 68102
acattcctctcttctctctctcttttcccaaaaaccaaaaccttttttccgtaccaaggtcaacaaatggcggcgaaagtaattacatttatggcggttatggtggttactgcctttacggccaacgccaaaatccccggagtttacaccggtggtccttggatcaatgctcacgccaccttctacggtgaagctgacgcttccggcactatgggtggtgcgtgtgggtacgggaatttgtatagccaaggttacggagtgaacacggcggctttaagcactgccttattcaacaatggtttgagttgtggctcttgctttgagcttaagtgtatcaatgatccaggatggtgtcttcctggaaacccatcaattcttatcaccgccactaatttctgccctcctaactttaatcaagctagcgacaatggtggttggtgtaatcctcctcgtgagcactttgatctcgctatgcctatgtttctttccatcgctaagtataaggctggtatcgtccccgtctcttaccgcaggatcccatgtaggaagaagggaggaatcagattcacaatcaatggattcaagtacttcaacttggtgctggtcactaacgtagccggagctggagacgtcattaaggtgagtgtgaaaggatccaacacacaatggttagatctgagccggaactggggacaaaactggcaatccaacgcacttcttgtcggccaatctctttctttccgagtcaaaacctctgatggtcgaagctccacctccaacaacattgctcccagtaactggcaatttggccagacctactccggcaagaacttccgcgtctgatttctagaatatgaaaaagagtcgtgtggcggaagatactaaagcttttttttatatcaaatatatatatttacgtgtctttgatttagtttacgatttggaattggggttttaccatttttcccttattttctcagggaaagtattgggattgcttggtttgcaagttagggtttactttaaagattagggctatattgtttttttgttttttttggtgtgttgtgtcttgtttggtatgtagtcttgtagagaggctgaagcggctgcagaaagaaagggttgggataaagattcatgtagcccgcagctctcttttacgttatgattgtattaaagtatatatatatatatcatgaagaaattaaacatggtttcttcgatttatat

SEQ ID NO: 34928 - protein, 280 aa, Arabidopsis thaliana
  peptide (1)..(280): Ceres Seq. ID no. 12334373
TFLSSLSLFPKTKTFFPYQGQQMAAKVITFMAVMVVTAFTANAKIPGVYTGGPWINAHATFYGEADASGTMGGACGYGNLYSQGYGVNTAALSTALFNNGLSCGSCFELKCINDPGWCLPGNPSILITATNFCPPNFNQASDNGGWCNPPREHFDLAMPMFLSIAKYKAGIVPVSYRRIPCRKKGGIRFTINGFKYFNLVLVTNVAGAGDVIKVSVKGSNTQWLDLSRNWGQNWQSNALLVGQSLSFRVKTSDGRSSTSNNIAPSNWQFGQTYSGKNFRV

SEQ ID NO: 34929 - protein, 258 aa, Arabidopsis thaliana
  peptide (1)..(258): Ceres Seq. ID no. 12334374
MAAKVITFMAVMVVTAFTANAKIPGVYTGGPWINAHATFYGEADASGTMGGACGYGNLYSQGYGVNTAALSTALFNNGLSCGSCFELKCINDPGWCLPGNPSILITATNFCPPNFNQASDNGGWCNPPREHFDLAMPMFLSIAKYKAGIVPVSYRRIPCRKKGGIRFTINGFKYFNLVLVTNVAGAGDVIKVSVKGSNTQWLDLSRNWGQNWQSNALLVGQSLSFRVKTSDGRSSTSNNIAPSNWQFGQTYSGKNFRV

SEQ ID NO: 34930 - protein, 250 aa, Arabidopsis thaliana
  peptide (1)..(250): Ceres Seq. ID no. 12334375
MAVMVVTAFTANAKIPGVYTGGPWINAHATFYGEADASGTMGGACGYGNLYSQGYGVNTAALSTALFNNGLSCGSCFELKCINDPGWCLPGNPSILITATNFCPPNFNQASDNGGWCNPPREHFDLAMPMFLSIAKYKAGIVPVSYRRIPCRKKGGIRFTINGFKYFNLVLVTNVAGAGDVIKVSVKGSNTQWLDLSRNWGQNWQSNALLVGQSLSFRVKTSDGRSSTSNNIAPSNWQFGQTYSGKNFRV

SEQ ID NO: 34931 - DNA, 712 bp, Arabidopsis thaliana
  misc_feature (1)..(712): Ceres Seq. ID no. 12331981
  misc_feature (1)..(712): Ortholog of  Ceres SEQ ID NO 15172846 as cited in SEQ ID NO 51978
  misc_feature (1)..(712): Ortholog of  Ceres SEQ ID NO 13585156 as cited in SEQ ID NO 68122
atattcatcactttcgttgttaagacggaaaaaaaaaaaacagaggcagaaccaaaaaactttagggttcgatttcgctccttggtaatcaccatgtccggagaagaagaagagaacgccgccgaactcaagatcggagatgagtttttgaaggcaaagtgcttaatgaactgtgaagtctctttgattcttgagcacaagtttgaacagcttcagcaaatctcagaggatcctatgaatcaagtttctcaagtgtttgagaagtccttgcaatatgtgaagcgattcagccgctacaagaatccagatgctgttagacaagttcgagaaatactaagcagacatcaactcactgagtttgagctatgtgttcttggcaatctctgtcctgaaactgttgaagaagcagtggcaatggttccttctcttaagacaaaaggaagagctcatgatgatgaagctattgagaagatgctcaatgatctctcacttgtcaagagattcgagtagtgcagaagattctcaagatctaagattctgaacatttagcaggatgctttacttgccttctagctgatctggagttaattcgccacgtctgaaattataaagctttaatgcctagaatttctggaatgataccttcatgttaaatgaatgtaatttacaacggatgatccaagcttttaatgaaatataccatctctttttc

SEQ ID NO: 34932 - protein, 169 aa, Arabidopsis thaliana
  peptide (1)..(169): Ceres Seq. ID no. 12331982
IFITFVVKTEKKKTEAEPKNFRVRFRSLVITMSGEEEENAAELKIGDEFLKAKCLMNCEVSLILEHKFEQLQQISEDPMNQVSQVFEKSLQYVKRFSRYKNPDAVRQVREILSRHQLTEFELCVLGNLCPETVEEAVAMVPSLKTKGRAHDDEAIEKMLNDLSLVKRFE

SEQ ID NO: 34933 - protein, 138 aa, Arabidopsis thaliana
  peptide (1)..(138): Ceres Seq. ID no. 12331983
MSGEEEENAAELKIGDEFLKAKCLMNCEVSLILEHKFEQLQQISEDPMNQVSQVFEKSLQYVKRFSRYKNPDAVRQVREILSRHQLTEFELCVLGNLCPETVEEAVAMVPSLKTKGRAHDDEAIEKMLNDLSLVKRFE

SEQ ID NO: 34934 - protein, 114 aa, Arabidopsis thaliana
  peptide (1)..(114): Ceres Seq. ID no. 12331984
MNCEVSLILEHKFEQLQQISEDPMNQVSQVFEKSLQYVKRFSRYKNPDAVRQVREILSRHQLTEFELCVLGNLCPETVEEAVAMVPSLKTKGRAHDDEAIEKMLNDLSLVKRFE

SEQ ID NO: 34935 - DNA, 1458 bp, Arabidopsis thaliana
  misc_feature (1)..(1458): Ceres Seq. ID no. 13495876
  misc_feature (1)..(1458): Ortholog of  Ceres SEQ ID NO 13597034 as cited in SEQ ID NO 69002
gtatttttgagttctcagatttcaaacacaaaagtttcgtctccgatttaatctttctacgtcttggtttatgagctcaaaggagaagcccactctcggaggtacgcggattaagacccgcaaaaggaatattgctgctcctctcgaccctgctgctttttctgatgcactagttcagatttatctggataatgctggtgatctggaacttgttgccagaagtttagagtcatctgatcttaatttctcaagatacggtgatattttctttgaggttgttttcattggaggacgtactcaaactggttcagtgaaatctgatgaaggggaacgccacccttactctataatcgactgtgaaccaaagcgtgaagctattttaccatcagttgtatacatacagaaaattttgcggaggaaagccttccttattaagaaccttgagaatgttacacggagattcttacagtcactggagctttttgaggagaatgagaggaagaagcttgcaatattcacagcacttgcattttcacagaagctctcaggattacctgcagagactgtcttccagccattgcttaaggatactcttgttgccaaagggatagttctcaattttgtaacagacttcttcaatgaatatttggttgagaacagtcttgatgacttgatttctattctgaggcgtggcaagatggatgacaaactcttggagttcctgccacccacaaagcggactacagaaagttttgccgagcatttcactaaggcaggattgacagctctggtagagtacaatgaaaggaaaatatttgaggtgaagctgaaggaaatcaaagcggtccttacgagccaagtgacagaggaaataaacgtagatgaagtgactgaaatggtgaagcaacaggtgaaagatgcaaagctgccagagactgaggttgtgcatgtgatctgggatgggataatgaatgctgttcaatggtctgggaaaaaccagcagcagaattcgaatgctgtattacgccaagtgaaaacatgggcaccccttctgaacacgctgtgtagcaccgggaacatggagatggaactgatgtataaagtacagatgcaatgctatgaggatgcaaagctgatgaaagtgtttcctgaggtagtgagatctctgtatgaactggatgtgcttgcggaagacaccattctgcactggtatcgcaaagggaccaaccctaagggcaggcaaacgtttgtgaagggattggaaccgtttgtgaattggctcgaagaggccgaagaagaggagtgagtgagacgctctgcttcttgttttctctttttactctcttctaataaaagaaagacaatattttacttctcttaacgcaaaattcagatgctctacattgttggtgacttggtgtgatctcttttttgaatgaataagtacttctttagttg

SEQ ID NO: 34936 - protein, 411 aa, Arabidopsis thaliana
  peptide (1)..(411): Ceres Seq. ID no. 13495877
MSSKEKPTLGGTRIKTRKRNIAAPLDPAAFSDALVQIYLDNAGDLELVARSLESSDLNFSRYGDIFFEVVFIGGRTQTGSVKSDEGERHPYSIIDCEPKREAILPSVVYIQKILRRKAFLIKNLENVTRRFLQSLELFEENERKKLAIFTALAFSQKLSGLPAETVFQPLLKDTLVAKGIVLNFVTDFFNEYLVENSLDDLISILRRGKMDDKLLEFLPPTKRTTESFAEHFTKAGLTALVEYNERKIFEVKLKEIKAVLTSQVTEEINVDEVTEMVKQQVKDAKLPETEVVHVIWDGIMNAVQWSGKNQQQNSNAVLRQVKTWAPLLNTLCSTGNMEMELMYKVQMQCYEDAKLMKVFPEVVRSLYELDVLAEDTILHWYRKGTNPKGRQTFVKGLEPFVNWLEEAEEEE

SEQ ID NO: 34937 - DNA, 796 bp, Arabidopsis thaliana
  misc_feature (1)..(796): Ceres Seq. ID no. 12333925
  misc_feature (1)..(796): Ortholog of  Ceres SEQ ID NO 15173807 as cited in SEQ ID NO 57520
acccttaaactccgttaccctaaacctcaagccgtcgtctccaaagttccccctcagagacgaaaaaatgaagaccattttgtcctcggagactatggacatccccgacggcgtcgccattaaggtaaacgccaaggtgattgaggtcgaaggtccacgaggtaaactcactcgtgacttcaagcatctgaatctcgatttccagttgattaaagaccaagtcactggaaaacgtcagcttaagattgattcttggtttggttctcgtaagacaagtgcttcgattagaactgctttaagccatgttgataatctcattgctggtgttactcaaggttttctttatagaatgagatttgtgtatgctcattttcctatcaatgcttctattgatggtaacaataagagtattgagattcgtaacttccttggtgagaagaaggtgaggaaggttgagatgttggatggtgttaagattgttcgatctgagaaggttaaggatgagattattcttgagggaaatgatattgagcttgtttcacggtcttgtgctttgatcaatcagaaatgtcatgtgaagaagaaggatatcaggaagtttcttgatggtatctatgtgagcgagaaaggcaagatcgcagtcgaggaatgaagttcgctattgaaagttctatattagattttatatggtgaagcagtgatattatcgtagctttttgttttacatctttcttatggatttgtagttttgtttttccttttgaatcattgatgaatgcaaattcattatccgttc

SEQ ID NO: 34938 - protein, 216 aa, Arabidopsis thaliana
  peptide (1)..(216): Ceres Seq. ID no. 12333926
PLNSVTLNLKPSSPKFPLRDEKMKTILSSETMDIPDGVAIKVNAKVIEVEGPRGKLTRDFKHLNLDFQLIKDQVTGKRQLKIDSWFGSRKTSASIRTALSHVDNLIAGVTQGFLYRMRFVYAHFPINASIDGNNKSIEIRNFLGEKKVRKVEMLDGVKIVRSEKVKDEIILEGNDIELVSRSCALINQKCHVKKKDIRKFLDGIYVSEKGKIAVEE

SEQ ID NO: 34939 - protein, 194 aa, Arabidopsis thaliana
  peptide (1)..(194): Ceres Seq. ID no. 12333927
MKTILSSETMDIPDGVAIKVNAKVIEVEGPRGKLTRDFKHLNLDFQLIKDQVTGKRQLKIDSWFGSRKTSASIRTALSHVDNLIAGVTQGFLYRMRFVYAHFPINASIDGNNKSIEIRNFLGEKKVRKVEMLDGVKIVRSEKVKDEIILEGNDIELVSRSCALINQKCHVKKKDIRKFLDGIYVSEKGKIAVEE

SEQ ID NO: 34940 - protein, 185 aa, Arabidopsis thaliana
  peptide (1)..(185): Ceres Seq. ID no. 12333928
MDIPDGVAIKVNAKVIEVEGPRGKLTRDFKHLNLDFQLIKDQVTGKRQLKIDSWFGSRKTSASIRTALSHVDNLIAGVTQGFLYRMRFVYAHFPINASIDGNNKSIEIRNFLGEKKVRKVEMLDGVKIVRSEKVKDEIILEGNDIELVSRSCALINQKCHVKKKDIRKFLDGIYVSEKGKIAVEE

SEQ ID NO: 34941 - DNA, 1010 bp, Arabidopsis thaliana
  misc_feature (1)..(1010): Ceres Seq. ID no. 13509148
  misc_feature (1)..(1010): Ortholog of  Ceres SEQ ID NO 13598479 as cited in SEQ ID NO 60680
ctctttctctctcttccttcgtttctctctcgatttgaagagagaaaattcgttcgatttcgttttctcttcttcttttggattttcccggaaaattttggaatcggtgagtctctatcgattactggtcaaccatgaatatctttagatttgctggcgatatgagtcacttgatcagtgtcttaatccttcttctcaaaatctacgcgacgaaatcttgcgctggaatctctctcaagactcaagagctctatgcgcttgtgttcttgactcggtacttggatctgtttacggattatgtatctctgtacaacagcatcatgaagattgtcttcattgccagctctttggctatcgtttggtgtatgcgtaggcatccacttgtgaggaggtcatacgataaggacctggacacatttcgtcatcagtatgttgtgttagcgtgttttgtactgggacttatcctgaatgaaaaattcacagttcaagaggtgttctgggcgttttctatctacttagaggcagttgctatccttccccagttggttctgctacaaagaagtgggaatgtcgacaatttgactgggcaatatgttgtctttctcggggcgtatcggggactctatattatcaactggatctatcgctatttcacagaagatcatttcactagatggattgcttgtgtgtctggtcttgtccaaacagctctctatgcggatttcttctactactactacataagctggaaaaccaacaccaaacttaagcttccggcttgaaaagaacccgaatttttttgcaatagtatcaaaatccaggaagttacagcaatggtgacattagaaaagaaagacatggttaacatttgggtcctccctctttctaacaatgagttgaaaattgaatgatgcaggattgttgtttaaaatgtgttttttttttagtctttaatgcacattgtaactttcccgacgattttagacattgagaagaggcatcgttttatc

SEQ ID NO: 34942 - protein, 215 aa, Arabidopsis thaliana
  peptide (1)..(215): Ceres Seq. ID no. 13509149
MNIFRFAGDMSHLISVLILLLKIYATKSCAGISLKTQELYALVFLTRYLDLFTDYVSLYNSIMKIVFIASSLAIVWCMRRHPLVRRSYDKDLDTFRHQYVVLACFVLGLILNEKFTVQEVFWAFSIYLEAVAILPQLVLLQRSGNVDNLTGQYVVFLGAYRGLYIINWIYRYFTEDHFTRWIACVSGLVQTALYADFFYYYYISWKTNTKLKLPA

SEQ ID NO: 34943 - protein, 206 aa, Arabidopsis thaliana
  peptide (1)..(206): Ceres Seq. ID no. 13509150
MSHLISVLILLLKIYATKSCAGISLKTQELYALVFLTRYLDLFTDYVSLYNSIMKIVFIASSLAIVWCMRRHPLVRRSYDKDLDTFRHQYVVLACFVLGLILNEKFTVQEVFWAFSIYLEAVAILPQLVLLQRSGNVDNLTGQYVVFLGAYRGLYIINWIYRYFTEDHFTRWIACVSGLVQTALYADFFYYYYISWKTNTKLKLPA

SEQ ID NO: 34944 - protein, 153 aa, Arabidopsis thaliana
  peptide (1)..(153): Ceres Seq. ID no. 13509151
MKIVFIASSLAIVWCMRRHPLVRRSYDKDLDTFRHQYVVLACFVLGLILNEKFTVQEVFWAFSIYLEAVAILPQLVLLQRSGNVDNLTGQYVVFLGAYRGLYIINWIYRYFTEDHFTRWIACVSGLVQTALYADFFYYYYISWKTNTKLKLPA

SEQ ID NO: 34945 - DNA, 1742 bp, Arabidopsis thaliana
  misc_feature (1)..(1742): Ceres Seq. ID no. 13500093
  misc_feature (1)..(1742): Ortholog of  Ceres SEQ ID NO 14312293 as cited in SEQ ID NO 58744
  misc_feature (1)..(1742): Ortholog of  Ceres SEQ ID NO 15177596 as cited in SEQ ID NO 59731
agagagagaactagtctgtgtcttttttttttttttttggtgataattgaaacatatgaaacaatcgtcgtcatagaagcagcagagattcaccttctttctttatctttccctctcagaaacaggaaacaaaattcaaaaagaacaaaaaaaaaaggtcaaaccaaaaacgatggcgtttcatcacaatcatctctctcaagacctctccttcaatcatttcaccgaccaacaccaacctccacctccgcaaccgcctcctcctcctccgcaacagcaacaacatttccaagaagcaccgcctcctaattggttaaacacagcgcttcttcgttcctcagataacaacaataacttcctcaacctccacacagccaccgctaacaccacaaccgcaagcagctccgattctccttcctccgccgccgccgccgccgctgctaaccagtggctatctcgctcctcctctttcctccaacgaaacaacaacaacaacgcttccatagtcggagatgggatcgatgatgtcaccggaggagcagacactatgattcagggagagatgaaaaccggcggtggagaaaacaaaaacgacggcggaggagctacggcggcggatggagtagtgagctggcagaatgcgagacacaaggcggagatcctttcgcatcctctttacgagcagcttttgtcggcgcacgttgcttgtttgagaatcgcgactccggttgatcagcttccgagaatcgatgctcagcttgctcagtctcaacacgtcgtcgctaaatactcagctttaggcgccgccgctcaaggtctcgtcggcgacgataaagaacttgaccagttcatgacacattatgtgttgctactgtgttcatttaaagagcaattgcaacaacatgtgcgtgttcatgcaatggaagctgtgatggcttgttgggagattgagcagtctcttcaaagcttaacaggagtgtctcctggagaagggatgggagcaacaatgtctgacgatgaagatgaacaagtagagagtgatgctaatatgttcgatgggggattagatgtgttgggttttggtcctttgattcctactgagagtgagaggtcgttgatggaaagagttagacaagaacttaaacatgaactcaaacagggttacaaggagaagatagtagacataagagaggagatattaaggaagagaagagctgggaagttaccaggagataccacctctgttctcaaagcttggtggcaatctcattccaaatggccttaccctactgaggaagataaggcgaggttggtgcaagagacaggtttgcagctaaaacagataaacaattggttcatcaatcagagaaagaggaactggcatagcaatccatcttcttccactgtattgaagaacaaacgcaaaagcaatgcaggtgacaatagcggaagagagcggttcgcgtagaaacaacaaacatatgatgtgaattggggaggtggaagatgggatttgaaagcagggttttagggatttaaagttgagaattttatggaggagtttggattatacagagagaggggacagtattagaaagtaactttttgtgcaattacatagtaacgtagtttggttatgtgattatgcccatatattttattaagtagcacacaaaccaaaaagaaaatatgaaaactgaagatgcaggcttttgtttaatgttttttgtttgtttgtctgc

SEQ ID NO: 34946 - protein, 431 aa, Arabidopsis thaliana
  peptide (1)..(431): Ceres Seq. ID no. 13500094
MAFHHNHLSQDLSFNHFTDQHQPPPPQPPPPPPQQQQHFQEAPPPNWLNTALLRSSDNNNNFLNLHTATANTTTASSSDSPSSAAAAAAANQWLSRSSSFLQRNNNNNASIVGDGIDDVTGGADTMIQGEMKTGGGENKNDGGGATAADGVVSWQNARHKAEILSHPLYEQLLSAHVACLRIATPVDQLPRIDAQLAQSQHVVAKYSALGAAAQGLVGDDKELDQFMTHYVLLLCSFKEQLQQHVRVHAMEAVMACWEIEQSLQSLTGVSPGEGMGATMSDDEDEQVESDANMFDGGLDVLGFGPLIPTESERSLMERVRQELKHELKQGYKEKIVDIREEILRKRRAGKLPGDTTSVLKAWWQSHSKWPYPTEEDKARLVQETGLQLKQINNWFINQRKRNWHSNPSSSTVLKNKRKSNAGDNSGRERFA

SEQ ID NO: 34947 - protein, 306 aa, Arabidopsis thaliana
  peptide (1)..(306): Ceres Seq. ID no. 13500095
MIQGEMKTGGGENKNDGGGATAADGVVSWQNARHKAEILSHPLYEQLLSAHVACLRIATPVDQLPRIDAQLAQSQHVVAKYSALGAAAQGLVGDDKELDQFMTHYVLLLCSFKEQLQQHVRVHAMEAVMACWEIEQSLQSLTGVSPGEGMGATMSDDEDEQVESDANMFDGGLDVLGFGPLIPTESERSLMERVRQELKHELKQGYKEKIVDIREEILRKRRAGKLPGDTTSVLKAWWQSHSKWPYPTEEDKARLVQETGLQLKQINNWFINQRKRNWHSNPSSSTVLKNKRKSNAGDNSGRERFA

SEQ ID NO: 34948 - protein, 301 aa, Arabidopsis thaliana
  peptide (1)..(301): Ceres Seq. ID no. 13500096
MKTGGGENKNDGGGATAADGVVSWQNARHKAEILSHPLYEQLLSAHVACLRIATPVDQLPRIDAQLAQSQHVVAKYSALGAAAQGLVGDDKELDQFMTHYVLLLCSFKEQLQQHVRVHAMEAVMACWEIEQSLQSLTGVSPGEGMGATMSDDEDEQVESDANMFDGGLDVLGFGPLIPTESERSLMERVRQELKHELKQGYKEKIVDIREEILRKRRAGKLPGDTTSVLKAWWQSHSKWPYPTEEDKARLVQETGLQLKQINNWFINQRKRNWHSNPSSSTVLKNKRKSNAGDNSGRERFA

SEQ ID NO: 34949 - DNA, 1373 bp, Arabidopsis thaliana
  misc_feature (1)..(1373): Ceres Seq. ID no. 13497150
  misc_feature (1)..(1373): Ortholog of  Ceres SEQ ID NO 12617911 as cited in SEQ ID NO 65464
ctatcacattttgcagtttcaacaaataaatatcccaaaatttagtggcggcgagagggaaaccaaaattcgcgagagagaagtatgtcgaagacgctggtgcaaccggtagggcaaaagaggttgactaatgttgcagtggttcgtctcaaaaagcaaggcaatcgcttcgagatcgcttgttacaagaataaggtcctttcatggcggtctggcgtggagaaggatatagatgaagtgctacagtcgcatactgtttattcaaatgtttcgaaaggagttcttgcaaaatcgaaagacttgatgaagtcgtttggatcagatgatcatacgaaaatatgcatcgatattttggagaaaggagagcttcaagttgctggaaaagaaagagaatcacagttctcaagccagtttcgggatatagcaacgattgttatgcagaaaactatcaaccctgaaacacaacgaccttataccatcagcatggtagagcgcctaatgcatgaaattcattttgctgttgatcctcatagtaattccaagaagcaggcacttgatgtcatccgtgagctgcaaaagcacttccctataaagcgttctccaatgagactgcgtcttactgttcctgttcaaaatttcccctcgcttctggagaagctaaaagaatgggatggtagtgttgtctccaaagacgaatctggaacacagatgtccactgtctgcgagatggaaccgggcctattccgagagtgtgattcccatgtgaggagtatccagggaagactagaaatactcgctgtatcagttcatgcagaaggtgacacaagcatggatcattacgatgagcatgatgatatggcattgcaaacccacaagccgttgttacctgctgagactgagactaaggatttgaccgatcccgtcgttgaacttagcaagaaactgcagaagcaagagataagtactacagataacataaagcaagaaggtggagaagaaaagaaggggaccaagtgcagcacttgcaacacgttcgttggagaggctaagcaatacagagagcactgtaagagtgattggcacaaacacaaccttaagcgtaagactcggaaactccctcctattagtgctgacgaatgcatgtctgagattgacatggacgactctagagcagatttgaaagactactctttctgaaactacaattttctccttttgtgcttttaattttgtcaatgtgttaaatctcgtagtcatatgtgagtatgaatacacaaaacttgtggaatgaaattttgcgcaaactttaagagtaaaaacttgtgtttaagagacaagcttggatatttggtatttgattaataactgtgacc

SEQ ID NO: 34950 - protein, 370 aa, Arabidopsis thaliana
  peptide (1)..(370): Ceres Seq. ID no. 13497151
MSKTLVQPVGQKRLTNVAVVRLKKQGNRFEIACYKNKVLSWRSGVEKDIDEVLQSHTVYSNVSKGVLAKSKDLMKSFGSDDHTKICIDILEKGELQVAGKERESQFSSQFRDIATIVMQKTINPETQRPYTISMVERLMHEIHFAVDPHSNSKKQALDVIRELQKHFPIKRSPMRLRLTVPVQNFPSLLEKLKEWDGSVVSKDESGTQMSTVCEMEPGLFRECDSHVRSIQGRLEILAVSVHAEGDTSMDHYDEHDDMALQTHKPLLPAETETKDLTDPVVELSKKLQKQEISTTDNIKQEGGEEKKGTKCSTCNTFVGEAKQYREHCKSDWHKHNLKRKTRKLPPISADECMSEIDMDDSRADLKDYSF

SEQ ID NO: 34951 - protein, 297 aa, Arabidopsis thaliana
  peptide (1)..(297): Ceres Seq. ID no. 13497152
MKSFGSDDHTKICIDILEKGELQVAGKERESQFSSQFRDIATIVMQKTINPETQRPYTISMVERLMHEIHFAVDPHSNSKKQALDVIRELQKHFPIKRSPMRLRLTVPVQNFPSLLEKLKEWDGSVVSKDESGTQMSTVCEMEPGLFRECDSHVRSIQGRLEILAVSVHAEGDTSMDHYDEHDDMALQTHKPLLPAETETKDLTDPVVELSKKLQKQEISTTDNIKQEGGEEKKGTKCSTCNTFVGEAKQYREHCKSDWHKHNLKRKTRKLPPISADECMSEIDMDDSRADLKDYSF

SEQ ID NO: 34952 - protein, 253 aa, Arabidopsis thaliana
  peptide (1)..(253): Ceres Seq. ID no. 13497153
MQKTINPETQRPYTISMVERLMHEIHFAVDPHSNSKKQALDVIRELQKHFPIKRSPMRLRLTVPVQNFPSLLEKLKEWDGSVVSKDESGTQMSTVCEMEPGLFRECDSHVRSIQGRLEILAVSVHAEGDTSMDHYDEHDDMALQTHKPLLPAETETKDLTDPVVELSKKLQKQEISTTDNIKQEGGEEKKGTKCSTCNTFVGEAKQYREHCKSDWHKHNLKRKTRKLPPISADECMSEIDMDDSRADLKDYSF

SEQ ID NO: 34953 - DNA, 1359 bp, Arabidopsis thaliana
  misc_feature (1)..(1359): Ceres Seq. ID no. 13492883
  misc_feature (1)..(1359): Ortholog of  Ceres SEQ ID NO 15170403 as cited in SEQ ID NO 53457
  misc_feature (1)..(1359): Ortholog of  Ceres SEQ ID NO 13660872 as cited in SEQ ID NO 60830
  misc_feature (1)..(1359): Ortholog of  Ceres SEQ ID NO 12616221 as cited in SEQ ID NO 63291
aaaaaaaaagaaagattactaacgccgactctctaaaactctctcaaaccataaaaaatattctccgatcatcattttaatggagagtacagattcttccggtggtcctccgccgccgcaaccaaacctccctccaggattccggtttcatccaacagacgaagaacttgtaattcattacctcaaacgcaaagcagattctgttcctttaccagtcgcgatcatcgccgacgttgatctttacaaatttgatccatgggaacttcccgcgaaagcttcgtttggagaacaagaatggtattttttcagtccaagagatcggaaatatcccaacggagctagacctaaccgagctgcgacttccggttattggaaagcgactggtacagataaaccggtgatttcaaccggcggtggtggtagtaaaaaagtgggagttaaaaaggctctagtgttttacagtggtaaaccaccaaaaggagttaaatcagattggattatgcatgaatatcggttaactgataataaacctactcatatttgtgacttcggcaacaagaaaaactctctcaggcttgatgattgggtgttgtgtcgtatctacaagaaaaacaatagtacagcatctagacatcatcatcatcttcatcatattcatctagataatgatcatcatcgtcatgatatgatgattgatgatgatcgattccgtcatgttcctcctggtcttcacttcccggcgattttttctgacaataatgatccgacggctatatatgatggtggcggcggcggatacggaggtggaagttactcgatgaatcattgtttcgcatctggatcaaagcaggagcagttgtttccaccggtgatgatgatgactagtctaaatcaagattccggtattggatcgtcgtcgtcacctagcaagagatttaacggcggcggcgttggagattgttcgacttctatggcggcgacgccgttaatgcagaaccaaggtgggatttaccaattgcctggtttgaattggtattcttgaaaacaatttacgatgaagaatttttaaaatttgtgtatatatatacggtttgagtgattagggggcattgggggatttatttacggttgattattattgtagtgttatagaactaaggagattaaattaaatagattggaggagaggtataaggtaacatatagaaattatacaacaatagtttaaatattcttttcttttctttttcatgttattatttttactaatgtataggtgatgattatacttagatgtttgtagcttgtataaattaatgcatgcatatatataaaaatatattaacagttatagaaact

SEQ ID NO: 34954 - protein, 320 aa, Arabidopsis thaliana
  peptide (1)..(320): Ceres Seq. ID no. 13492884
MESTDSSGGPPPPQPNLPPGFRFHPTDEELVIHYLKRKADSVPLPVAIIADVDLYKFDPWELPAKASFGEQEWYFFSPRDRKYPNGARPNRAATSGYWKATGTDKPVISTGGGGSKKVGVKKALVFYSGKPPKGVKSDWIMHEYRLTDNKPTHICDFGNKKNSLRLDDWVLCRIYKKNNSTASRHHHHLHHIHLDNDHHRHDMMIDDDRFRHVPPGLHFPAIFSDNNDPTAIYDGGGGGYGGGSYSMNHCFASGSKQEQLFPPVMMMTSLNQDSGIGSSSSPSKRFNGGGVGDCSTSMAATPLMQNQGGIYQLPGLNWYS

SEQ ID NO: 34955 - protein, 180 aa, Arabidopsis thaliana
  peptide (1)..(180): Ceres Seq. ID no. 13492885
MHEYRLTDNKPTHICDFGNKKNSLRLDDWVLCRIYKKNNSTASRHHHHLHHIHLDNDHHRHDMMIDDDRFRHVPPGLHFPAIFSDNNDPTAIYDGGGGGYGGGSYSMNHCFASGSKQEQLFPPVMMMTSLNQDSGIGSSSSPSKRFNGGGVGDCSTSMAATPLMQNQGGIYQLPGLNWYS

SEQ ID NO: 34956 - DNA, 694 bp, Arabidopsis thaliana
  misc_feature (1)..(694): Ceres Seq. ID no. 13499746
  misc_feature (1)..(694): Ortholog of  Ceres SEQ ID NO 13638466 as cited in SEQ ID NO 58311
aaaaaaaaaaaaaaagaaataggaaaagggtttactaacgccaaaaaacccaacccttgtctgcgttcttcatcagcgccgcgttctcaaagttgctctcacagtctccgatctccaattttataagttatggctggaaaagctgcagaagctgtggcaaagacagtgacagggtttcaacatccatggagggcgaaactcgataagtacagaaccgagttgacgaaaggtgtgtggggttattgggagatgggagcatggaaaccgttagggataagtgcacgaaggagggctatgctgaggaaagaagtgttgactaatggagaagattggccttatgatccagagaggaaagctatgaggacaaagaggaaagggcataaatgtgatagaatttcagctgagaaaagagagaacactgcgaagcttatgttgaagatgcctcagatgttgcttgattataagaagagaaggtgggaaaagaagatgaaggaagaagagaaagctaaagaagacaagtaattgatttgttgagatcatgattactatagacttggttgatgaataagaataatttagtttgttgatcttatgaaatcttggaaggtttaagatcacaagtttgcttctgatatacttttgtatgatgtttttttatgtttgtttttaacagaacccaaaagtgtttgtggtt

SEQ ID NO: 34957 - protein, 130 aa, Arabidopsis thaliana
  peptide (1)..(130): Ceres Seq. ID no. 13499747
MAGKAAEAVAKTVTGFQHPWRAKLDKYRTELTKGVWGYWEMGAWKPLGISARRRAMLRKEVLTNGEDWPYDPERKAMRTKRKGHKCDRISAEKRENTAKLMLKMPQMLLDYKKRRWEKKMKEEEKAKEDK

SEQ ID NO: 34958 - protein, 90 aa, Arabidopsis thaliana
  peptide (1)..(90): Ceres Seq. ID no. 13499748
MGAWKPLGISARRRAMLRKEVLTNGEDWPYDPERKAMRTKRKGHKCDRISAEKRENTAKLMLKMPQMLLDYKKRRWEKKMKEEEKAKEDK

SEQ ID NO: 34959 - protein, 75 aa, Arabidopsis thaliana
  peptide (1)..(75): Ceres Seq. ID no. 13499749
MLRKEVLTNGEDWPYDPERKAMRTKRKGHKCDRISAEKRENTAKLMLKMPQMLLDYKKRRWEKKMKEEEKAKEDK

SEQ ID NO: 34960 - DNA, 1589 bp, Arabidopsis thaliana
  misc_feature (1)..(1589): Ceres Seq. ID no. 12370521
  misc_feature (1)..(1589): Ortholog of  Ceres SEQ ID NO 15169350 as cited in SEQ ID NO 53271
cgatttgtccgactcatcatcttctttctctttctgtctctctctctctctctctctgttcgaatcgaaaccctaacaaatccaaaattgtctctgagattgaaattgccccaatttaatggcgtaaagcttcaccaatttcatcaattcgatatcaatttttgaaatttcgaagaaaggaagaaactttgaaaagagaaagcaaaatgtcaagagagacgacgacggaagcaacgcctttgattttaaccgacggaggagggggaaggagatcggtgagaagacaagggttaagagaagcggcgaggttactaagacatgcaagtagcgggagaatgatgatgagagagccatcgatgcttgttcgtgaagctgcggctgagcagcttgaagagagacaaagcgattgggcttattcgaaacctgtagtggttttggatttcgtttggaatcttgcttttgtcgttgttgctacagctgttttggtacttagcagcgatgagaatccgaatatgcctcttagggtttggattattgggtatgggttgcaatgtatgatgcatatggtttgtgtttgtgttgagtatcgtaggaggaatagtagaagaagaagagatttgagtccaagatctagctcttcttcttcttcttcttcttcttctatggatgaagaagaaggtttgggtttgagtagaaactcagatgaacgttacttggagctaggtcaattagagaatgaaaacaatagttttgctaagcatctagaatctgcaaatacgatgatctcatttatatggtgggttattggattttattgggtatcttctggtggtcaagagttagcacaaggatccccacagctttattggttgtgtatagtctttcttggtttcgatgtgttctttgttgttttctgcgttgcattggcttgtgttatcggcattgctgtttgctgctgcttgccttgcatcattgcagttctatacgccgtagcagaacaggaaggagcttcgaaagaagacattgaccaacttactaaattcaaattccgaaaggttggtgatactatgaaacacactgttgatgaagaacaaggagaaggagattctggaggagtgatgactgaatgtggtacagattcacccgttgaacatgctcttcctcatgaggatgcagaatgctgcatttgtctttccgcttatgaagacgagacagagctaagagaacttccttgtggccaccatttccattgcggttgtgtggataaatggctttacataaatgctacttgtcccctctgcaaatacaacatcctcaagagtagcaactacgaagaaggcgaggaagtctagaagactagaacagtaagaagaggaaacttgcaaatatgcgaatatctgtatcatttagcagctgaggaacccatgagaaaaagggttcgagatttgatcaatttgttgtttacattgcttgttatatgtttacacattttagttgcttttttctttggagtctgtatgttctgttgttgtcgactcttgttaacatgttttggtacttacttgctcaacaagttaacaacatcttgc

SEQ ID NO: 34961 - protein, 381 aa, Arabidopsis thaliana
  peptide (1)..(381): Ceres Seq. ID no. 12370522
MSRETTTEATPLILTDGGGGRRSVRRQGLREAARLLRHASSGRMMMREPSMLVREAAAEQLEERQSDWAYSKPVVVLDFVWNLAFVVVATAVLVLSSDENPNMPLRVWIIGYGLQCMMHMVCVCVEYRRRNSRRRRDLSPRSSSSSSSSSSSMDEEEGLGLSRNSDERYLELGQLENENNSFAKHLESANTMISFIWWVIGFYWVSSGGQELAQGSPQLYWLCIVFLGFDVFFVVFCVALACVIGIAVCCCLPCIIAVLYAVAEQEGASKEDIDQLTKFKFRKVGDTMKHTVDEEQGEGDSGGVMTECGTDSPVEHALPHEDAECCICLSAYEDETELRELPCGHHFHCGCVDKWLYINATCPLCKYNILKSSNYEEGEEV

SEQ ID NO: 34962 - protein, 338 aa, Arabidopsis thaliana
  peptide (1)..(338): Ceres Seq. ID no. 12370523
MMMREPSMLVREAAAEQLEERQSDWAYSKPVVVLDFVWNLAFVVVATAVLVLSSDENPNMPLRVWIIGYGLQCMMHMVCVCVEYRRRNSRRRRDLSPRSSSSSSSSSSSMDEEEGLGLSRNSDERYLELGQLENENNSFAKHLESANTMISFIWWVIGFYWVSSGGQELAQGSPQLYWLCIVFLGFDVFFVVFCVALACVIGIAVCCCLPCIIAVLYAVAEQEGASKEDIDQLTKFKFRKVGDTMKHTVDEEQGEGDSGGVMTECGTDSPVEHALPHEDAECCICLSAYEDETELRELPCGHHFHCGCVDKWLYINATCPLCKYNILKSSNYEEGEEV

SEQ ID NO: 34963 - protein, 337 aa, Arabidopsis thaliana
  peptide (1)..(337): Ceres Seq. ID no. 12370524
MMREPSMLVREAAAEQLEERQSDWAYSKPVVVLDFVWNLAFVVVATAVLVLSSDENPNMPLRVWIIGYGLQCMMHMVCVCVEYRRRNSRRRRDLSPRSSSSSSSSSSSMDEEEGLGLSRNSDERYLELGQLENENNSFAKHLESANTMISFIWWVIGFYWVSSGGQELAQGSPQLYWLCIVFLGFDVFFVVFCVALACVIGIAVCCCLPCIIAVLYAVAEQEGASKEDIDQLTKFKFRKVGDTMKHTVDEEQGEGDSGGVMTECGTDSPVEHALPHEDAECCICLSAYEDETELRELPCGHHFHCGCVDKWLYINATCPLCKYNILKSSNYEEGEEV

SEQ ID NO: 34964 - DNA, 1613 bp, Arabidopsis thaliana
  misc_feature (1)..(1613): Ceres Seq. ID no. 12396205
  misc_feature (1)..(1613): Ortholog of  Ceres SEQ ID NO 13598351 as cited in SEQ ID NO 68715
  misc_feature (1)..(1613): Ortholog of  Ceres SEQ ID NO 13584744 as cited in SEQ ID NO 69137
atgcacaatcattcccactaatagtttaataaagtgtataattttttttcaaattaaaacagctaaacacacacaaccacattcaaaaaggggttaagcattgaagaatattctaagaaaaattgtttctcttcttcaagaagtaaaagcgtctctctctctcattaagcatcaaaggagtttcgtttttcttgctttgctgttacattcttcaggaaaaaggcgttacctttactctctctgcatcaacgaggaagcgtgtagaaactaaaggagcttaatttgagagatttttttttttgtttctgggtttgttcaaagatgcaaatttttagttgcttctgctgtggaaaaggatttgatcggcaaaagaaggtgaaaacggagccatcgtggaggatcttttcactcaaggaacttcacgcagcaacaaacagttttaattacgataacaagctcggtgaaggcagatttggcagtgtgtattggggtcagctatgggatggatctcaaattgcagtcaagagattgaaggcatggagtagcagagaagagatagattttgctgtagaagtcgagattcttgctcgtatccgtcacaagaatctattgagtgtacgaggttactgtgcagaaggacaagaacgactcattgtatatgattacatgccaaatttgagcttggtctctcatcttcatggtcaacattcatctgagtcgcttcttgattggactaggcggatgaatattgctgtatcttctgctcaggcgattgcctacttgcatcattttgcaacacctagaatagtccatggagatgtgagagcaagcaatgtgctgctagattctgagtttgaagctcgggttacagatttcggatacgataagctgatgccagatgatggagctaacaaaagcaccaagggtaataacattgggtatctctcaccagaatgtatcgaatctggaaaagaatcagacatgggagatgtgtatagtttcggtgttcttttgctggagcttgtaactggtaagagacctacagagagggtaaacttaacaacaaagaggggtattaccgaatgggttttacctcttgtttacgaaagaaagtttggtgaaattgtggatcaaaggctgaatgggaagtatgtggaagaagagctgaaaaggatagttttggttggtctcatgtgtgctcagagggagtcagagaagagaccaacaatgtctgaagttgtggagatgctaatgattgaatcaaaggagaaaatggctcagcttgaagctaatccactcttcaatggaaacaatgatggtgaagttatagatgaaagctcagagatcatttctgaagtgagagatcatcaataacaagaacaagaatgttattcaaattcacgcattcttgttttcttttgctagaatctggtttttggttgtgcttgtttttagaagagtgtttgtgcttgtttttagaatagcgaagttgggttttaaaagtttattgtgtattttttttcagcttaagattggattttgatcattgatatttgagcttgtaagagagtgtagtggtacatatttggtatttatgagaaagtttttctgac

SEQ ID NO: 34965 - protein, 350 aa, Arabidopsis thaliana
  peptide (1)..(350): Ceres Seq. ID no. 12396206
MQIFSCFCCGKGFDRQKKVKTEPSWRIFSLKELHAATNSFNYDNKLGEGRFGSVYWGQLWDGSQIAVKRLKAWSSREEIDFAVEVEILARIRHKNLLSVRGYCAEGQERLIVYDYMPNLSLVSHLHGQHSSESLLDWTRRMNIAVSSAQAIAYLHHFATPRIVHGDVRASNVLLDSEFEARVTDFGYDKLMPDDGANKSTKGNNIGYLSPECIESGKESDMGDVYSFGVLLLELVTGKRPTERVNLTTKRGITEWVLPLVYERKFGEIVDQRLNGKYVEEELKRIVLVGLMCAQRESEKRPTMSEVVEMLMIESKEKMAQLEANPLFNGNNDGEVIDESSEIISEVRDHQ

SEQ ID NO: 34966 - protein, 235 aa, Arabidopsis thaliana
  peptide (1)..(235): Ceres Seq. ID no. 12396207
MPNLSLVSHLHGQHSSESLLDWTRRMNIAVSSAQAIAYLHHFATPRIVHGDVRASNVLLDSEFEARVTDFGYDKLMPDDGANKSTKGNNIGYLSPECIESGKESDMGDVYSFGVLLLELVTGKRPTERVNLTTKRGITEWVLPLVYERKFGEIVDQRLNGKYVEEELKRIVLVGLMCAQRESEKRPTMSEVVEMLMIESKEKMAQLEANPLFNGNNDGEVIDESSEIISEVRDHQ

SEQ ID NO: 34967 - protein, 210 aa, Arabidopsis thaliana
  peptide (1)..(210): Ceres Seq. ID no. 12396208
MNIAVSSAQAIAYLHHFATPRIVHGDVRASNVLLDSEFEARVTDFGYDKLMPDDGANKSTKGNNIGYLSPECIESGKESDMGDVYSFGVLLLELVTGKRPTERVNLTTKRGITEWVLPLVYERKFGEIVDQRLNGKYVEEELKRIVLVGLMCAQRESEKRPTMSEVVEMLMIESKEKMAQLEANPLFNGNNDGEVIDESSEIISEVRDHQ

SEQ ID NO: 34968 - DNA, 717 bp, Arabidopsis thaliana
  misc_feature (1)..(717): Ceres Seq. ID no. 15178664
  misc_feature (1)..(717): Ortholog of  Ceres SEQ ID NO 13599321 as cited in SEQ ID NO 0
aattcaatctcttccaatttctcttcttcttcctcgcgacgcgttaatggcggcttcgttctcactcacgagcttcatctccttcatctcaccattcaaatctcaaaccaaacctacaccaccaccaaatctcactcttccttctccaacaatctcccaaaggcgaagaaatgatctcgctatcgaatcaatggcggtcgaagaatcttcttcaaccgcttcttcactttcctctgagcttgcttctgtgatatgcccctcgcttgcttactccaacacgctcttcttcagttctggatacaatgtgcaagtgtttgttgaagataacgagtcagaggagaggcttgtgaatcgatttaggagagaagtgatgagaactggtgttatacaggaatgtaagaggagaagatactttgagaataaacaagatgagaagaaacgtaggactcgtgatgctgctaagcgtaataagaaaaggcgtcctcaagcaaggtttactcaagaaacaagagaagaagcagcagcagcaactaagagtaagaaaaaagatgaggaagaagacaactgggagatgcctggtggagatgtaccttcttgaaacacgattttagtatataaaatctccggtcttttggttaaatttcgtattatcccgtttttattacttggtacattgtgagttggaaatgtgtttactgcacaaaaaaaaaaaaaaaa

SEQ ID NO: 34969 - protein, 198 aa, Arabidopsis thaliana
  peptide (1)..(198): Ceres Seq. ID no. 15178665
IQSLPISLLLPRDALMAASFSLTSFISFISPFKSQTKPTPPPNLTLPSPTISQRRRNDLAIESMAVEESSSTASSLSSELASVICPSLAYSNTLFFSSGYNVQVFVEDNESEERLVNRFRREVMRTGVIQECKRRRYFENKQDEKKRRTRDAAKRNKKRRPQARFTQETREEAAAATKSKKKDEEEDNWEMPGGDVPS

SEQ ID NO: 34970 - protein, 183 aa, Arabidopsis thaliana
  peptide (1)..(183): Ceres Seq. ID no. 15178666
MAASFSLTSFISFISPFKSQTKPTPPPNLTLPSPTISQRRRNDLAIESMAVEESSSTASSLSSELASVICPSLAYSNTLFFSSGYNVQVFVEDNESEERLVNRFRREVMRTGVIQECKRRRYFENKQDEKKRRTRDAAKRNKKRRPQARFTQETREEAAAATKSKKKDEEEDNWEMPGGDVPS

SEQ ID NO: 34971 - protein, 135 aa, Arabidopsis thaliana
  peptide (1)..(135): Ceres Seq. ID no. 15178667
MAVEESSSTASSLSSELASVICPSLAYSNTLFFSSGYNVQVFVEDNESEERLVNRFRREVMRTGVIQECKRRRYFENKQDEKKRRTRDAAKRNKKRRPQARFTQETREEAAAATKSKKKDEEEDNWEMPGGDVPS

SEQ ID NO: 34972 - DNA, 764 bp, Arabidopsis thaliana
  misc_feature (1)..(764): Ceres Seq. ID no. 12393115
  misc_feature (1)..(764): Ortholog of  Ceres SEQ ID NO 15176099 as cited in SEQ ID NO 59451
aaccaaaaatttcttcgtctctgtctccaaaatcgaatcaaaatctctaaagtttcaatttttttgttctgttcttttttttttttaaagaatggcttcaatttctgcaactttgccttcgccattgttactcacacagagaaaatccaatctcacatcgattcaaaaactcccattttctctaactcgaggtacgaatgatctttctccattatctcttactcgaaaccctagcagcatcagtctgatggtgaaagctagtggagaaagctcagattcatcgactgatctcgacgttgttagtacgattcagaatgtttgggataagtctgaagataggttaggtcttattggtttgggttttgctggtattgtagctctttgggcatcattgaatctcatcacggcaattgacaaattgcccgttatctcgagcggattcgaactagttggtatcttgttctccacgtggttcacatatcgatatctcttgttcaaaccggacagacaggagctttcgaaaattgtcaagaaatcagtagcggatatacttggccagtgaaccttgtgtgtgtgataatactttcatctttggaagatgatttgtttgcaagtttgtaaaattacatgacagggtggttgttgtttctagtccaataatgtcatgcatttgaaacctgtaaatactttattgttggtttttggttgtgagcaaaatcaatcttttctaatttcaaagattctcttttatgattatacgtttt

SEQ ID NO: 34973 - protein, 156 aa, Arabidopsis thaliana
  peptide (1)..(156): Ceres Seq. ID no. 12393116
MASISATLPSPLLLTQRKSNLTSIQKLPFSLTRGTNDLSPLSLTRNPSSISLMVKASGESSDSSTDLDVVSTIQNVWDKSEDRLGLIGLGFAGIVALWASLNLITAIDKLPVISSGFELVGILFSTWFTYRYLLFKPDRQELSKIVKKSVADILGQ

SEQ ID NO: 34974 - protein, 104 aa, Arabidopsis thaliana
  peptide (1)..(104): Ceres Seq. ID no. 12393117
MVKASGESSDSSTDLDVVSTIQNVWDKSEDRLGLIGLGFAGIVALWASLNLITAIDKLPVISSGFELVGILFSTWFTYRYLLFKPDRQELSKIVKKSVADILGQ

SEQ ID NO: 34975 - DNA, 1616 bp, Arabidopsis thaliana
  misc_feature (1)..(1616): Ceres Seq. ID no. 13495890
  misc_feature (1)..(1616): Ortholog of  Ceres SEQ ID NO 14311755 as cited in SEQ ID NO 57271
  misc_feature (1)..(1616): Ortholog of  Ceres SEQ ID NO 15171156 as cited in SEQ ID NO 58259
  misc_feature (1)..(1616): Ortholog of  Ceres SEQ ID NO 14302212 as cited in SEQ ID NO 66507
  misc_feature (1)..(1616): Ortholog of  Ceres SEQ ID NO 13653980 as cited in SEQ ID NO 69253
agaattgcttctcttagtatttgctttcaccaacccactcgacggagtctccaacgccttcctcctcattctccactctcacaccaccaacttctgattccagatctcaacgatgcaaagctccgccgtattctccctctctccgtcgcttcctctcctaaaaccacgtcggctctctctccgccaccatcccataaccaccgccgcttcttcaagcgatctaaacgtttctccaaatgttgtctctattccttctttatctcgtcgatcttggcgtctcgcttcgtctgattcgcctctccgtgcttggtccggtgttccttctccgatctctcactccttagacacgaatcgtttcagaaccgccgctactgcagttcctgaaagtgctgaggaaggtgataacagtggtaaattgacgaaggttttggaacttggcttgttgttcgctatgtggtaccttttcaatatctacttcaacatctacaataaacaggttttgaaagctctacatgctccaatgactgtgactttggttcagtttgctgttggtagtgtgctcattactatcatgtgggttcttaacctgtacaagagaccaaagatcagtggtgctcagctagctgccatcttgccgcttgctgttgtgcacacacttggtaatctgtttacgaacatgagtcttgggaaagtttctgtttcctttactcacaccattaaagccatggagcctttcttctctgttttattgtctgctatgtttctcggggagaaacctactccatgggtactcggtgccattgtaccaattgttggtggagttgcacttgcttcaatttcggaggtctcattcaactgggctggattttcgagtgcaatggcatcaaacttgactaaccaatcccgtaatgtgctgagtaagaaagtcatggttaagaaagatgattctcttgacaacatcactctcttctcaattataacattgatgtctctcgttctgatggctcctgtgactttctttacggaaggcatcaagttcactccttcatacattcaatcagctggtgtgaatgttaaacaaatatatacaaagtctcttatcgctgcactctgcttccacgcataccagcaggtgtcgtacatgatattggcgagagtatcaccggttacacattctgtcggaaactgtgtgaaacgtgttgtggttattgtgagctctgtcatcttcttcaagacacccgtctcgcctgttaatgctttcggaactggaatcgcccttgcgggtgtcttcttatactccagagtgaagggtattaagccaaagccaaagactgcttaagcaaatatcggctaatacctaatgtcatatcactcccgcgctttggatttgtatacaatttctcgagctaaagttttcagatagatggttttattcttttgcgggtttttttcacgaagtttcatcatccctttctaagcttttcgctgcagccatcggttctcttagagtttgttataagttctcttctgtgtctagacaaatgctaaactcttaaatttcttacagtttttccaagaataacttgtcaacacattctcattactgcttttagttt

SEQ ID NO: 34976 - protein, 408 aa, Arabidopsis thaliana
  peptide (1)..(408): Ceres Seq. ID no. 13495891
MQSSAVFSLSPSLPLLKPRRLSLRHHPITTAASSSDLNVSPNVVSIPSLSRRSWRLASSDSPLRAWSGVPSPISHSLDTNRFRTAATAVPESAEEGDNSGKLTKVLELGLLFAMWYLFNIYFNIYNKQVLKALHAPMTVTLVQFAVGSVLITIMWVLNLYKRPKISGAQLAAILPLAVVHTLGNLFTNMSLGKVSVSFTHTIKAMEPFFSVLLSAMFLGEKPTPWVLGAIVPIVGGVALASISEVSFNWAGFSSAMASNLTNQSRNVLSKKVMVKKDDSLDNITLFSIITLMSLVLMAPVTFFTEGIKFTPSYIQSAGVNVKQIYTKSLIAALCFHAYQQVSYMILARVSPVTHSVGNCVKRVVVIVSSVIFFKTPVSPVNAFGTGIALAGVFLYSRVKGIKPKPKTA

SEQ ID NO: 34977 - protein, 295 aa, Arabidopsis thaliana
  peptide (1)..(295): Ceres Seq. ID no. 13495892
MWYLFNIYFNIYNKQVLKALHAPMTVTLVQFAVGSVLITIMWVLNLYKRPKISGAQLAAILPLAVVHTLGNLFTNMSLGKVSVSFTHTIKAMEPFFSVLLSAMFLGEKPTPWVLGAIVPIVGGVALASISEVSFNWAGFSSAMASNLTNQSRNVLSKKVMVKKDDSLDNITLFSIITLMSLVLMAPVTFFTEGIKFTPSYIQSAGVNVKQIYTKSLIAALCFHAYQQVSYMILARVSPVTHSVGNCVKRVVVIVSSVIFFKTPVSPVNAFGTGIALAGVFLYSRVKGIKPKPKTA

SEQ ID NO: 34978 - protein, 272 aa, Arabidopsis thaliana
  peptide (1)..(272): Ceres Seq. ID no. 13495893
MTVTLVQFAVGSVLITIMWVLNLYKRPKISGAQLAAILPLAVVHTLGNLFTNMSLGKVSVSFTHTIKAMEPFFSVLLSAMFLGEKPTPWVLGAIVPIVGGVALASISEVSFNWAGFSSAMASNLTNQSRNVLSKKVMVKKDDSLDNITLFSIITLMSLVLMAPVTFFTEGIKFTPSYIQSAGVNVKQIYTKSLIAALCFHAYQQVSYMILARVSPVTHSVGNCVKRVVVIVSSVIFFKTPVSPVNAFGTGIALAGVFLYSRVKGIKPKPKTA

SEQ ID NO: 34979 - DNA, 1110 bp, Arabidopsis thaliana
  misc_feature (1)..(1110): Ceres Seq. ID no. 12394066
  misc_feature (1)..(1110): Ortholog of  Ceres SEQ ID NO 14304830 as cited in SEQ ID NO 54884
  misc_feature (1)..(1110): Ortholog of  Ceres SEQ ID NO 14316297 as cited in SEQ ID NO 57465
  misc_feature (1)..(1110): Ortholog of  Ceres SEQ ID NO 12784351 as cited in SEQ ID NO 60968
  misc_feature (1)..(1110): Ortholog of  Ceres SEQ ID NO 13584213 as cited in SEQ ID NO 63690
gagacgttcatgcatttaatctcgcaccttacgacaaagagtgagagagaggatcgctcaggtttgttcatcttcaccggacgattagcttttgcggtgggagaaagaacggcctgtcttcagctctgaaacagaggaacagagaggttaggaaggagacaatggttggacccgcgcggcctcagatcgttttgtttggatcttccattgttcagatgagctttggccatggtggttggggcgccattctctccgaggtctacgctcgtaaggccgacatcattctgcgaggatattatggatggaactcttctcgtgctttggaagttgtcgaccaagtgttccccaaggatgctgcagtacaaccttctctggtcattgtctattttggaggaaacgactcaatggcgcctcactcgtctggtctaggacctcatgtaccacttactgaatatgttgataacatgaagaagatcgctcttcatcttcagagcctttcagactccacccgaatcatatttcttagttctcctccagtggatgaggctaaagttcgccagaaccaaagcccatacttgagcgaggtaatccgcacaaacgacctctgcaagacttattcagatgcttgtgtagagctgtgccaagaactcggcttagaagtagttgatctcttctctacttttcagaaagcagatgactggaaaactgtttgcttcacagacgggattcatttgtcagcacaaggaagcaaaatagtagcgggagagatactaagagtggttaaagaagcggaatggcatccatcacttcactggaaatcaatgccaacagaattcgcagatgactctccttatgatcttgtttcagcagatggcaaacagacagtaaattcttcagaatggacttatttctgggaagaacaatgggactaaacatttcaacacacacaacaacaacaacaagaccctatcttcacataattcactgtcttaatgtgataaagctttgcattagattgtttacattacaagtgtctctgctataatctgattcagtttcgctcgaaaaacgttaccattttaaagtttatacttatctaaatcttaaatc

SEQ ID NO: 34980 - protein, 256 aa, Arabidopsis thaliana
  peptide (1)..(256): Ceres Seq. ID no. 12394067
MVGPARPQIVLFGSSIVQMSFGHGGWGAILSEVYARKADIILRGYYGWNSSRALEVVDQVFPKDAAVQPSLVIVYFGGNDSMAPHSSGLGPHVPLTEYVDNMKKIALHLQSLSDSTRIIFLSSPPVDEAKVRQNQSPYLSEVIRTNDLCKTYSDACVELCQELGLEVVDLFSTFQKADDWKTVCFTDGIHLSAQGSKIVAGEILRVVKEAEWHPSLHWKSMPTEFADDSPYDLVSADGKQTVNSSEWTYFWEEQWD

SEQ ID NO: 34981 - protein, 238 aa, Arabidopsis thaliana
  peptide (1)..(238): Ceres Seq. ID no. 12394068
MSFGHGGWGAILSEVYARKADIILRGYYGWNSSRALEVVDQVFPKDAAVQPSLVIVYFGGNDSMAPHSSGLGPHVPLTEYVDNMKKIALHLQSLSDSTRIIFLSSPPVDEAKVRQNQSPYLSEVIRTNDLCKTYSDACVELCQELGLEVVDLFSTFQKADDWKTVCFTDGIHLSAQGSKIVAGEILRVVKEAEWHPSLHWKSMPTEFADDSPYDLVSADGKQTVNSSEWTYFWEEQWD

SEQ ID NO: 34982 - protein, 175 aa, Arabidopsis thaliana
  peptide (1)..(175): Ceres Seq. ID no. 12394069
MAPHSSGLGPHVPLTEYVDNMKKIALHLQSLSDSTRIIFLSSPPVDEAKVRQNQSPYLSEVIRTNDLCKTYSDACVELCQELGLEVVDLFSTFQKADDWKTVCFTDGIHLSAQGSKIVAGEILRVVKEAEWHPSLHWKSMPTEFADDSPYDLVSADGKQTVNSSEWTYFWEEQWD

SEQ ID NO: 34983 - DNA, 961 bp, Arabidopsis thaliana
  misc_feature (1)..(961): Ceres Seq. ID no. 13493909
  misc_feature (1)..(961): Ortholog of  Ceres SEQ ID NO 13594163 as cited in SEQ ID NO 60426
caagatcgtcaagagacagtaaacctaaaatggcgaactcagacaaaagattattcgagaaggtagctataataaccggaggagcaagagggataggagcggccacggcgagattgttcacagagaatggcgcgtatgtgatagtcgcggatatccttgataatgaaggcatccttgtggcggaatcgatcggtgggtgttacgttcattgtgacgtatcgaaggaggctgatgttgaggcggcagtggagctagcaatgagacgtaaaggtagactagatgtgatgttcaacaatgccgggatgtcgcttaacgaaggtagtatcatggggatggacgtggacatggttaacaaacttgtctcggttaatgtcaatggtgttttgcatggtatcaaacatgccgctaaggccatgatcaaagggggacgaggaggctcgataatatgcacatcgagctcatcagggctaatgggaggacttggaggacatgcgtatacgctctccaaaggaggcatcaacggggtggtgaggacaacggagtgcgagcttgggtctcacggcatccgtgtgaatagcatctctcctcatggagttcccactgacatcttggttaatgcgtaccgtaagttccttaacaatgacaaactcaacgtcgctgaggtcaccgacattattgctgagaaagggagtttgctgaccggaagagccggtactgtggaggacgtagctcaagcagctttgtttcttgcaagccaagaatcgtcggggttcattaccggacataacttggttgttgatggtggttacacatctgccactagtactatgagatttatctacaactagttttcgtttggtggtgtttccttttcaaagttgttctttgaaaaaagaaaaaaaaaaagagtttatcttaattgctaacttgtcaatctttcttaattcggttgaataatccg

SEQ ID NO: 34984 - protein, 281 aa, Arabidopsis thaliana
  peptide (1)..(281): Ceres Seq. ID no. 13493910
RSSRDSKPKMANSDKRLFEKVAIITGGARGIGAATARLFTENGAYVIVADILDNEGILVAESIGGCYVHCDVSKEADVEAAVELAMRRKGRLDVMFNNAGMSLNEGSIMGMDVDMVNKLVSVNVNGVLHGIKHAAKAMIKGGRGGSIICTSSSSGLMGGLGGHAYTLSKGGINGVVRTTECELGSHGIRVNSISPHGVPTDILVNAYRKFLNNDKLNVAEVTDIIAEKGSLLTGRAGTVEDVAQAALFLASQESSGFITGHNLVVDGGYTSATSTMRFIYN

SEQ ID NO: 34985 - protein, 272 aa, Arabidopsis thaliana
  peptide (1)..(272): Ceres Seq. ID no. 13493911
MANSDKRLFEKVAIITGGARGIGAATARLFTENGAYVIVADILDNEGILVAESIGGCYVHCDVSKEADVEAAVELAMRRKGRLDVMFNNAGMSLNEGSIMGMDVDMVNKLVSVNVNGVLHGIKHAAKAMIKGGRGGSIICTSSSSGLMGGLGGHAYTLSKGGINGVVRTTECELGSHGIRVNSISPHGVPTDILVNAYRKFLNNDKLNVAEVTDIIAEKGSLLTGRAGTVEDVAQAALFLASQESSGFITGHNLVVDGGYTSATSTMRFIYN

SEQ ID NO: 34986 - protein, 196 aa, Arabidopsis thaliana
  peptide (1)..(196): Ceres Seq. ID no. 13493912
MRRKGRLDVMFNNAGMSLNEGSIMGMDVDMVNKLVSVNVNGVLHGIKHAAKAMIKGGRGGSIICTSSSSGLMGGLGGHAYTLSKGGINGVVRTTECELGSHGIRVNSISPHGVPTDILVNAYRKFLNNDKLNVAEVTDIIAEKGSLLTGRAGTVEDVAQAALFLASQESSGFITGHNLVVDGGYTSATSTMRFIYN

SEQ ID NO: 34987 - DNA, 1072 bp, Arabidopsis thaliana; identical to SEQ ID NO: 30225
  misc_feature (1)..(1072): Ceres Seq. ID no. 12394892
  misc_feature (1)..(1072): Ortholog of  Ceres SEQ ID NO 13594416 as cited in SEQ ID NO 51058
  misc_feature (1)..(1072): Ortholog of  Ceres SEQ ID NO 13596609 as cited in SEQ ID NO 63070
  misc_feature (1)..(1072): Ortholog of  Ceres SEQ ID NO 12616895 as cited in SEQ ID NO 63909
  misc_feature (1)..(1072): Ortholog of  Ceres SEQ ID NO 14302096 as cited in SEQ ID NO 68356
  misc_feature (1)..(1072): Ortholog of  Ceres SEQ ID NO 13598574 as cited in SEQ ID NO 69083

SEQ ID NO: 34988 - protein, 288 aa, Arabidopsis thaliana; identical to SEQ ID NO: 30226
  peptide (1)..(288): Ceres Seq. ID no. 12394893

SEQ ID NO: 34989 - protein, 269 aa, Arabidopsis thaliana; identical to SEQ ID NO: 30227
  peptide (1)..(269): Ceres Seq. ID no. 12394894

SEQ ID NO: 34990 - protein, 192 aa, Arabidopsis thaliana; identical to SEQ ID NO: 30228
  peptide (1)..(192): Ceres Seq. ID no. 12394895

SEQ ID NO: 34991 - DNA, 958 bp, Arabidopsis thaliana
  misc_feature (1)..(958): Ceres Seq. ID no. 12334376
  misc_feature (1)..(958): Ortholog of  Ceres SEQ ID NO 14312166 as cited in SEQ ID NO 59253
acaaaacgtccccttttcccacatcatccttcttcaacgttcgctttcccatcaagaacaaccaaatctcttgtaacaaagcaaagaatttgagaatggatccgtctaagggaatccaagaacagaggattgtgattccaaacagacacaacgagaagctggttggtctgcttcatgaaactggttctacagacatcgtagtcttgtgccatggctttcgatcaaacaagagtaaccaaataatgaataatgtggctgctgctatacagaaagaagggatcagcgcttttcgttttgatttctccgggaatggagagagtgaaggcagtttctattatggtaactataaccatgaagctgatgatttacattctgttgtccaatacttctctaacaagaaccgtgtggttcctataatcctcggtcacagtaagggaggtgatgttgtcctcctctacgcctccaagtatcatgatgtcagcaatgtaatcaatctctcgggacgttatgatcttaaaaagggtataagagagcgtcttggagaagattttttggaaagaattaagcaacaaggattcatcgatattggagatggaaaatcggggtatcgtgttactgagaagagcttaatggacaggttaagcactgatattcatgaagcttgcctcaagattgacaaagagtgcagggtcttgacggttcatggatcggaggacgaggtaatacctgtggaagatgcgaaggagtttgcgaagatcataccaaaccacaagctggagattgtggaagtagctaatcatggttatactgagcaccaaagtcaattagtttcaacagttatggagttcataaagacagtcattgtgaagaacaactagaattgagttacgtttgccttttaaatcatgaaagtttgtaattcaaaaaaaaaaaaaaaaaagcttatcgggccgtcgac

SEQ ID NO: 34992 - protein, 291 aa, Arabidopsis thaliana
  peptide (1)..(291): Ceres Seq. ID no. 12334377
KTSPFPTSSFFNVRFPIKNNQISCNKAKNLRMDPSKGIQEQRIVIPNRHNEKLVGLLHETGSTDIVVLCHGFRSNKSNQIMNNVAAAIQKEGISAFRFDFSGNGESEGSFYYGNYNHEADDLHSVVQYFSNKNRVVPIILGHSKGGDVVLLYASKYHDVSNVINLSGRYDLKKGIRERLGEDFLERIKQQGFIDIGDGKSGYRVTEKSLMDRLSTDIHEACLKIDKECRVLTVHGSEDEVIPVEDAKEFAKIIPNHKLEIVEVANHGYTEHQSQLVSTVMEFIKTVIVKNN

SEQ ID NO: 34993 - protein, 260 aa, Arabidopsis thaliana
  peptide (1)..(260): Ceres Seq. ID no. 12334378
MDPSKGIQEQRIVIPNRHNEKLVGLLHETGSTDIVVLCHGFRSNKSNQIMNNVAAAIQKEGISAFRFDFSGNGESEGSFYYGNYNHEADDLHSVVQYFSNKNRVVPIILGHSKGGDVVLLYASKYHDVSNVINLSGRYDLKKGIRERLGEDFLERIKQQGFIDIGDGKSGYRVTEKSLMDRLSTDIHEACLKIDKECRVLTVHGSEDEVIPVEDAKEFAKIIPNHKLEIVEVANHGYTEHQSQLVSTVMEFIKTVIVKNN

SEQ ID NO: 34994 - protein, 211 aa, Arabidopsis thaliana
  peptide (1)..(211): Ceres Seq. ID no. 12334379
MNNVAAAIQKEGISAFRFDFSGNGESEGSFYYGNYNHEADDLHSVVQYFSNKNRVVPIILGHSKGGDVVLLYASKYHDVSNVINLSGRYDLKKGIRERLGEDFLERIKQQGFIDIGDGKSGYRVTEKSLMDRLSTDIHEACLKIDKECRVLTVHGSEDEVIPVEDAKEFAKIIPNHKLEIVEVANHGYTEHQSQLVSTVMEFIKTVIVKNN

SEQ ID NO: 34995 - DNA, 1082 bp, Arabidopsis thaliana
  misc_feature (1)..(1082): Ceres Seq. ID no. 12333955
  misc_feature (1)..(1082): Ortholog of  Ceres SEQ ID NO 12557497 as cited in SEQ ID NO 43
  misc_feature (1)..(1082): Ortholog of  Ceres SEQ ID NO 15177850 as cited in SEQ ID NO 51765
  misc_feature (1)..(1082): Ortholog of  Ceres SEQ ID NO 14303417 as cited in SEQ ID NO 54923
  misc_feature (1)..(1082): Ortholog of  Ceres SEQ ID NO 15169084 as cited in SEQ ID NO 59115
  misc_feature (1)..(1082): Ortholog of  Ceres SEQ ID NO 12635723 as cited in SEQ ID NO 0
acaaaccgcaaactcgacataactaacaaacgacgccggagatggccgccacttcaaccgccgctgctgcttcttcaatcatgggtacccgggtggtttccgacattagctccaattcaagccggttcacagcccggttcggattcggaaccaagaaagcatctcccaaaaaggctaagacggttatctcagaccggcctctatggttcccaggcgcaaaatcacccgaatatctcgacggttcacttgtcggggactacgggttcgatccttttggtttaggcaaaccggcggagtatctccaattcgatttggattccttggaccagaacttagccaagaacttatacggagaagtgatcgggactcgtaccgaggcggtggaccccaaatcgacgccgtttcagccatatagtgaagtcttcgggctacaaagattcagagaatgtgagctgattcacggtcggtgggcaatgctcgccactcttggcgctatcaccgtcgaatggctcaccggtgttacttggcaagacgccggcaaggtagagctagtggatggatcatcttacttaggacagccattgccgttctctatctcgacattgatatggatcgaagtgttagtgatcggctacattgagttccaacgaaacgctgaactggactcggagaagcgtttgtatccaggaggcaagttctttgacccgttaggactagcgtctgacccggtgaagaaggctcagcttcagctagctgagatcaaacatgctcgtttagccatggttggattcttgggttttgcggttcaggcggctgcaaccggtaaaggaccgctcaacaactgggcgactcaccttagtgacccacttcacaccaccattatcgataccttctcttcctcctgatgtggtggcttttagcttctataggtgtcatgtaatgatgtactgtcgttattttaaagaaaatttggcaccttttgtataaacagaatttcttatacctcgcagtttgtgtttacgtagatcatcggagttatgatgagcatttacatcaaattaatcgtttgctaaattctgtcc

SEQ ID NO: 34996 - protein, 287 aa, Arabidopsis thaliana
  peptide (1)..(287): Ceres Seq. ID no. 12333956
MAATSTAAAASSIMGTRVVSDISSNSSRFTARFGFGTKKASPKKAKTVISDRPLWFPGAKSPEYLDGSLVGDYGFDPFGLGKPAEYLQFDLDSLDQNLAKNLYGEVIGTRTEAVDPKSTPFQPYSEVFGLQRFRECELIHGRWAMLATLGAITVEWLTGVTWQDAGKVELVDGSSYLGQPLPFSISTLIWIEVLVIGYIEFQRNAELDSEKRLYPGGKFFDPLGLASDPVKKAQLQLAEIKHARLAMVGFLGFAVQAAATGKGPLNNWATHLSDPLHTTIIDTFSSS

SEQ ID NO: 34997 - protein, 274 aa, Arabidopsis thaliana
  peptide (1)..(274): Ceres Seq. ID no. 12333957
MGTRVVSDISSNSSRFTARFGFGTKKASPKKAKTVISDRPLWFPGAKSPEYLDGSLVGDYGFDPFGLGKPAEYLQFDLDSLDQNLAKNLYGEVIGTRTEAVDPKSTPFQPYSEVFGLQRFRECELIHGRWAMLATLGAITVEWLTGVTWQDAGKVELVDGSSYLGQPLPFSISTLIWIEVLVIGYIEFQRNAELDSEKRLYPGGKFFDPLGLASDPVKKAQLQLAEIKHARLAMVGFLGFAVQAAATGKGPLNNWATHLSDPLHTTIIDTFSSS

SEQ ID NO: 34998 - protein, 143 aa, Arabidopsis thaliana
  peptide (1)..(143): Ceres Seq. ID no. 12333958
MLATLGAITVEWLTGVTWQDAGKVELVDGSSYLGQPLPFSISTLIWIEVLVIGYIEFQRNAELDSEKRLYPGGKFFDPLGLASDPVKKAQLQLAEIKHARLAMVGFLGFAVQAAATGKGPLNNWATHLSDPLHTTIIDTFSSS

SEQ ID NO: 34999 - DNA, 1289 bp, Arabidopsis thaliana
  misc_feature (1)..(1289): Ceres Seq. ID no. 12334274
  misc_feature (1)..(1289): Ortholog of  Ceres SEQ ID NO 13594298 as cited in SEQ ID NO 57803
  misc_feature (1)..(1289): Ortholog of  Ceres SEQ ID NO 13503476 as cited in SEQ ID NO 61978
  misc_feature (1)..(1289): Ortholog of  Ceres SEQ ID NO 12578438 as cited in SEQ ID NO 62201
  misc_feature (1)..(1289): Ortholog of  Ceres SEQ ID NO 12617675 as cited in SEQ ID NO 64656
aattttctcccccacaccaaaagataaacctctctctctctatctatcttatgtcaaaagacagatttattaacaaacacaaatcataaatctttttcttcttccgagaaagaatgtctaaatcatcgtataatcacatcttcatcttgatcttgtgtttatgtttgagatcatcatcagccttcacgaatctcaacaccttaagctttgaagaatcactttctcctctctttggagatgccaatctcgtccgttcacctgatgatctctccgttcgtcttctcctcgatcgctataccggttctggtttcatatcatcgaatatgtatcaacatggattttacagctccatgattaagcttcccgctgattatactgccggcgtcgtcgtcgccttttatacatcaaacggagacgtgttcgagaaaacacacgacgagttagacatagagtttctagggaacataaaaggaaagccgtggaggtttcagacaaatctatacggaaatggaagtacacatagaggtcgtgaagagagatatcgtctctggtttgatccttctaaggagtttcatcgttatagcattctctggactcctcacaagatcatattttgggtagatgatgtgccaataagagaagtgatcagaaacgatgcaatgggagcagattatccggcaaagccaatggctctttacgccaccatttgggacgcttctgattgggctacttccggcggcaaatacaaagctaattacaaatttgcccctttcgtagctgaattcaaatctttctctctagacggttgctccgttgatcctattcaagaagtccccatggattgttccgactcagtcgatttccttgagtctcaagattactcttccattaattcccatcaacgcgccgccatgcgaagatttcgacaacgtttcatgtactattcttactgttacgatacacttaggtatcctgagcctctaccggaatgtgtgattgttccggctgagaaagataggtttaaggaaacgggaaggttgaagtttggtggtacggaggcgcgtgaacggcggagaaatcgccggcagcaacgtcggcctgagattgagattgagagtgatcctgacgacagaaaacttttataagatttgtttgtgccattctttttacttaaaattcgtttgtgagtataataaaataaagagtaaagatttgaaaaagaaagaaagaaatagaggataaatttgataggcctttgggctttcatgaattgtgaatgatttaagctc

SEQ ID NO: 35000 - protein, 343 aa, Arabidopsis thaliana
  peptide (1)..(343): Ceres Seq. ID no. 12334275
MSKSSYNHIFILILCLCLRSSSAFTNLNTLSFEESLSPLFGDANLVRSPDDLSVRLLLDRYTGSGFISSNMYQHGFYSSMIKLPADYTAGVVVAFYTSNGDVFEKTHDELDIEFLGNIKGKPWRFQTNLYGNGSTHRGREERYRLWFDPSKEFHRYSILWTPHKIIFWVDDVPIREVIRNDAMGADYPAKPMALYATIWDASDWATSGGKYKANYKFAPFVAEFKSFSLDGCSVDPIQEVPMDCSDSVDFLESQDYSSINSHQRAAMRRFRQRFMYYSYCYDTLRYPEPLPECVIVPAEKDRFKETGRLKFGGTEARERRRNRRQQRRPEIEIESDPDDRKLL

SEQ ID NO: 35001 - protein, 273 aa, Arabidopsis thaliana
  peptide (1)..(273): Ceres Seq. ID no. 12334276
MYQHGFYSSMIKLPADYTAGVVVAFYTSNGDVFEKTHDELDIEFLGNIKGKPWRFQTNLYGNGSTHRGREERYRLWFDPSKEFHRYSILWTPHKIIFWVDDVPIREVIRNDAMGADYPAKPMALYATIWDASDWATSGGKYKANYKFAPFVAEFKSFSLDGCSVDPIQEVPMDCSDSVDFLESQDYSSINSHQRAAMRRFRQRFMYYSYCYDTLRYPEPLPECVIVPAEKDRFKETGRLKFGGTEARERRRNRRQQRRPEIEIESDPDDRKLL

SEQ ID NO: 35002 - protein, 264 aa, Arabidopsis thaliana
  peptide (1)..(264): Ceres Seq. ID no. 12334277
MIKLPADYTAGVVVAFYTSNGDVFEKTHDELDIEFLGNIKGKPWRFQTNLYGNGSTHRGREERYRLWFDPSKEFHRYSILWTPHKIIFWVDDVPIREVIRNDAMGADYPAKPMALYATIWDASDWATSGGKYKANYKFAPFVAEFKSFSLDGCSVDPIQEVPMDCSDSVDFLESQDYSSINSHQRAAMRRFRQRFMYYSYCYDTLRYPEPLPECVIVPAEKDRFKETGRLKFGGTEARERRRNRRQQRRPEIEIESDPDDRKLL

SEQ ID NO: 35003 - DNA, 1376 bp, Arabidopsis thaliana
  misc_feature (1)..(1376): Ceres Seq. ID no. 12371724
  misc_feature (1)..(1376): Ortholog of  Ceres SEQ ID NO 15180663 as cited in SEQ ID NO 1227
  misc_feature (1)..(1376): Ortholog of  Ceres SEQ ID NO 12415963 as cited in SEQ ID NO 0
aatcttttatttttcttttagaaaccaaacttttcagatttctctctctccatttggcgatagaagaagtcatgtaccaatcatcatcctccacgtcatcatcatcgcagagatcatcgcttcccggcggcggaggactgatccgttacggctcagctccgggatcgtttctaaactctgtggttgacgaagtcatcggaggaggctcatcaaacgctcgtgacttcaccggctatcaaccgtcgtcggataacttcatcggtaactttttcaccggagctgctgactcatcctcgctgagatccgattcgacgacttgtggagtcaacaactcatccgacggacagaaacagctaggcaataacaataataataatagtaataaagatatcttcctcgacagatcctacggtggattcaacgagatctcgcaacaacacaagagcaacgacatcggaggaggaaacagctcaggatcttactctctcgctagacaacgtagctctcccgccgatttcttcacctacctcgcctcagataaaaacaatttctcgttgaaccaaccaaccagtgattatagtccgcaaggagggtctaatgggggacgaggacattccagattgaagtctcagctaagcttcacgaatcacgactctctggctcggatcaacgaggtcaatgagaccccagtccacgacggttcaggccattcgttttctgcggctagctttggtgcagccactactgattcttgggatgacggttccggttcgatagggtttaccgtgactaggcccagtaaacgatccaaggacatggactctggtctcttttcgcagtatagtcttccttcagacacttcaatgaactacatggataacttcatgcagcttccagaagattctgtaccctgcaaaatccgggccaaacgcggctgcgccacccatcctagaagcatcgctgagcgggagaggagaacgagaataagtgggaagctaaagaagctacaagatcttgtccccaacatggataagcaaacaagctattcagacatgctggatttagctgtacaacacatcaaaggccttcagcatcaacttcagaatttgaaaaaagatcaagagaattgcacgtgtgggtgcagtgagaaaccaagctagctcaaacccaaaggtagggtcatcctaattttatttgcattgttccgattttatcatatgagagaattagagaagatgtaaataaaatagattatattaaatgtctaatcctcttataattaagctcctcattcgttatcattataagatagaacagtgacaattgtccattatgtttttgtttcaagtttatgttttgagtgtcgcctattttgt

SEQ ID NO: 35004 - protein, 385 aa, Arabidopsis thaliana
  peptide (1)..(385): Ceres Seq. ID no. 12371725
SFIFLLETKLFRFLSLHLAIEEVMYQSSSSTSSSSQRSSLPGGGGLIRYGSAPGSFLNSVVDEVIGGGSSNARDFTGYQPSSDNFIGNFFTGAADSSSLRSDSTTCGVNNSSDGQKQLGNNNNNNSNKDIFLDRSYGGFNEISQQHKSNDIGGGNSSGSYSLARQRSSPADFFTYLASDKNNFSLNQPTSDYSPQGGSNGGRGHSRLKSQLSFTNHDSLARINEVNETPVHDGSGHSFSAASFGAATTDSWDDGSGSIGFTVTRPSKRSKDMDSGLFSQYSLPSDTSMNYMDNFMQLPEDSVPCKIRAKRGCATHPRSIAERERRTRISGKLKKLQDLVPNMDKQTSYSDMLDLAVQHIKGLQHQLQNLKKDQENCTCGCSEKPS

SEQ ID NO: 35005 - protein, 362 aa, Arabidopsis thaliana
  peptide (1)..(362): Ceres Seq. ID no. 12371726
MYQSSSSTSSSSQRSSLPGGGGLIRYGSAPGSFLNSVVDEVIGGGSSNARDFTGYQPSSDNFIGNFFTGAADSSSLRSDSTTCGVNNSSDGQKQLGNNNNNNSNKDIFLDRSYGGFNEISQQHKSNDIGGGNSSGSYSLARQRSSPADFFTYLASDKNNFSLNQPTSDYSPQGGSNGGRGHSRLKSQLSFTNHDSLARINEVNETPVHDGSGHSFSAASFGAATTDSWDDGSGSIGFTVTRPSKRSKDMDSGLFSQYSLPSDTSMNYMDNFMQLPEDSVPCKIRAKRGCATHPRSIAERERRTRISGKLKKLQDLVPNMDKQTSYSDMLDLAVQHIKGLQHQLQNLKKDQENCTCGCSEKPS

SEQ ID NO: 35006 - DNA, 935 bp, Arabidopsis thaliana
  misc_feature (1)..(935): Ceres Seq. ID no. 12336020
  misc_feature (1)..(935): Ortholog of  Ceres SEQ ID NO 13597604 as cited in SEQ ID NO 65175
aaagttaggtttcaattgattggataaggacaaagactggttgttgtgtcacatttcctctctctctcagattttacaggcaaatcgatttcactcgaagactggttgttgtgtaattgtgttcgtcgtctcaggttttcaatatctgtctctttgagttgtattgatgggttctgaaggaccaacgggtgtgacgattcatatcacagggttcaagaagttccatggagtagctgagaatcctacagagaaaatggctaacaatttgaaagaatatttggctaagaattgtgtttcgaaagatgtgaatcttggaagttgtactgtgcttgagactgctggtcaaggagctcttgcttctctctatcagttgctacaatccgcggttaacacaaaagagtcagagtcgttgaccggaaaaaccatatgggttcactttggagttaatagtggcgctacaaaatttgcaattgagcaacaagctgtgaatgaagcgacttttcgttgtcctgatgaattgggttggaaacctcagaatttgccaattgttccctctgatggtccaatctcaactgtaagaaagactaatcttcctgttgaagagataacaaaggcgttggagaagaatggctttgaagtgataacatcagatgatgcaggtcgatttgtgtgtaactatgtctattaccattctctgagatttgcagagcagaataagaccagatcactctttgttcacgttcctcttttcgttgccgtggatgaagaaacccaaatgagattcactgtttctctgctggaggtactcgcttctatttgcaagtaatgttatcccaaatgtggctattcttattcatgaaatgtgcatcatggaccgattgtctccccacgggaaaaattcgcttatcaataaatggaatataagttcacttctc

SEQ ID NO: 35007 - protein, 219 aa, Arabidopsis thaliana; identical to SEQ ID NO: 22924
  peptide (1)..(219): Ceres Seq. ID no. 12336021

SEQ ID NO: 35008 - protein, 190 aa, Arabidopsis thaliana; identical to SEQ ID NO: 22925
  peptide (1)..(190): Ceres Seq. ID no. 12336022

SEQ ID NO: 35009 - DNA, 1991 bp, Arabidopsis thaliana
  misc_feature (1)..(1991): Ceres Seq. ID no. 13491836
  misc_feature (1)..(1991): Ortholog of  Ceres SEQ ID NO 13585587 as cited in SEQ ID NO 65515
acagactctttcttaatctctctctctttcaaccaaacccctaaacaaaaaaaaaatacattttctgatctctctaaaaatctttctccttcgttaatctcgtgatctctttctttttctatatatggacagaggatggtctggtctcactcttgattcatcttctcttgatcttttaaaccctaatcgtatttctcataagaatcaccgacgtttctcaaatcctttggcgatgtctagaattgacgaagaagatgatcagaagacgagaatatcaaccaacggtagtgaatttaggtttccggtgagtctctcaggtattcgtgatcgtgaagatgaagatttttcatctggcgttgctggagataatgaccgtgaagttcccggcgaagtggatttcttctccgacaagaaatctagggtttgtcgtgaagacgacgaaggatttcgtgtgaagaaggaagaacaagatgatcgaacggacgtaaataccggtttgaatcttcgaacaactggtaatacaaagagtgatgagtcaatgatcgatgatggagaatcttccgaaatggaagataagcgtgcgaaaaatgagttggtgaaattacaagatgagttgaagaaaatgacaatggataatcaaaagcttagagaattgcttacacaagttagcaacagttacacttcacttcagatgcatcttgtttcactaatgcagcaacagcaacaacagaacaataaggtaatagaagctgctgagaagcctgaggagacgatagtaccaaggcaatttattgatttaggccctacgagagcagtaggtgaggccgaggatgtgtcaaattcttcatccgaagatagaactcgttcggggggttcttctgcagccgagaggcgtagtaacgggaagagacttgggcgtgaagaaagccccgaaactgagtccaacaaaattcagaaggtgaattctactaccccgacgacatttgatcaaaccgctgaagctacgatgaggaaagcccgtgtctccgttcgtgcccgatcggaagctccgatgataagcgatggatgtcaatggagaaaatatggccagaagatggccaaagggaatccttgtccgcgggcatattaccgctgcacgatggccacgggctgtcccgttcgcaaacaagttcaacgttgcgcggaagacagatcaattctgattacaacctacgagggaaaccataaccatccgttgccgccagccgcggtagccatggcttctaccaccacggcggcggctaacatgttgctatccgggtcaatgtctagtcacgacgggatgatgaaccctacaaatttactagctagggctgttcttccttgctccacaagcatggcaacaatctcagcctccgcgccgtttccaaccgtcacattagacctcacccactcacctccgcctcctaatggttccaatccttcctcttccgcggctaccaacaacaaccacaactcactgatgcagcggccgcaacaacaacaacagcaaatgacgaacttacctccgggaatgctacctcatgtaataggccaggcattgtataaccaatccaagttctcggggctgcagttctctggtggctctccctcgacggcagcgttttctcagtcacacgcggtggctgatacaataacggcactcacagctgacccgaatttcacggcggctcttgcagccgttatttcttctatgatcaatggtacgaaccaccacgacggcgaaggaaacaacaaaaatcaatagaaaaatattacattttttttttgggtatctacattttttttccaactgggttataggaaacagagagtttatttcattgattcacatttgttctgtttcgtaccaaaatcccagtaaatatacaaaagcaaactatactcaagttcatattcgtaaacactataaaatagttacgtaacttaattagcattgcctttaaagcttt

SEQ ID NO: 35010 - protein, 553 aa, Arabidopsis thaliana
  peptide (1)..(553): Ceres Seq. ID no. 13491837
MDRGWSGLTLDSSSLDLLNPNRISHKNHRRFSNPLAMSRIDEEDDQKTRISTNGSEFRFPVSLSGIRDREDEDFSSGVAGDNDREVPGEVDFFSDKKSRVCREDDEGFRVKKEEQDDRTDVNTGLNLRTTGNTKSDESMIDDGESSEMEDKRAKNELVKLQDELKKMTMDNQKLRELLTQVSNSYTSLQMHLVSLMQQQQQQNNKVIEAAEKPEETIVPRQFIDLGPTRAVGEAEDVSNSSSEDRTRSGGSSAAERRSNGKRLGREESPETESNKIQKVNSTTPTTFDQTAEATMRKARVSVRARSEAPMISDGCQWRKYGQKMAKGNPCPRAYYRCTMATGCPVRKQVQRCAEDRSILITTYEGNHNHPLPPAAVAMASTTTAAANMLLSGSMSSHDGMMNPTNLLARAVLPCSTSMATISASAPFPTVTLDLTHSPPPPNGSNPSSSAATNNNHNSLMQRPQQQQQQMTNLPPGMLPHVIGQALYNQSKFSGLQFSGGSPSTAAFSQSHAVADTITALTADPNFTAALAAVISSMINGTNHHDGEGNNKNQ

SEQ ID NO: 35011 - protein, 517 aa, Arabidopsis thaliana
  peptide (1)..(517): Ceres Seq. ID no. 13491838
MSRIDEEDDQKTRISTNGSEFRFPVSLSGIRDREDEDFSSGVAGDNDREVPGEVDFFSDKKSRVCREDDEGFRVKKEEQDDRTDVNTGLNLRTTGNTKSDESMIDDGESSEMEDKRAKNELVKLQDELKKMTMDNQKLRELLTQVSNSYTSLQMHLVSLMQQQQQQNNKVIEAAEKPEETIVPRQFIDLGPTRAVGEAEDVSNSSSEDRTRSGGSSAAERRSNGKRLGREESPETESNKIQKVNSTTPTTFDQTAEATMRKARVSVRARSEAPMISDGCQWRKYGQKMAKGNPCPRAYYRCTMATGCPVRKQVQRCAEDRSILITTYEGNHNHPLPPAAVAMASTTTAAANMLLSGSMSSHDGMMNPTNLLARAVLPCSTSMATISASAPFPTVTLDLTHSPPPPNGSNPSSSAATNNNHNSLMQRPQQQQQQMTNLPPGMLPHVIGQALYNQSKFSGLQFSGGSPSTAAFSQSHAVADTITALTADPNFTAALAAVISSMINGTNHHDGEGNNKNQ

SEQ ID NO: 35012 - protein, 415 aa, Arabidopsis thaliana
  peptide (1)..(415): Ceres Seq. ID no. 13491839
MIDDGESSEMEDKRAKNELVKLQDELKKMTMDNQKLRELLTQVSNSYTSLQMHLVSLMQQQQQQNNKVIEAAEKPEETIVPRQFIDLGPTRAVGEAEDVSNSSSEDRTRSGGSSAAERRSNGKRLGREESPETESNKIQKVNSTTPTTFDQTAEATMRKARVSVRARSEAPMISDGCQWRKYGQKMAKGNPCPRAYYRCTMATGCPVRKQVQRCAEDRSILITTYEGNHNHPLPPAAVAMASTTTAAANMLLSGSMSSHDGMMNPTNLLARAVLPCSTSMATISASAPFPTVTLDLTHSPPPPNGSNPSSSAATNNNHNSLMQRPQQQQQQMTNLPPGMLPHVIGQALYNQSKFSGLQFSGGSPSTAAFSQSHAVADTITALTADPNFTAALAAVISSMINGTNHHDGEGNNKNQ

SEQ ID NO: 35013 - DNA, 2167 bp, Arabidopsis thaliana
  misc_feature (1)..(2167): Ceres Seq. ID no. 13492886
  misc_feature (1)..(2167): Ortholog of  Ceres SEQ ID NO 14313670 as cited in SEQ ID NO 54491
tggacatcaaaaacacgaatatcgatagtacacttctacgtgcaattttctcctttctcttcctggacatctgtctgtttattacattttcttgtaatctctttttggggttttacaatatctatcccctaaagtttcggaaaattctgtttttctgttctcattcttcgtgatctttttcactttcttcaaaaaaaaaacatgtgtggaatacttgccgtgttaggatgttccgatgattctcaggccaagagagttcgtgttcttgagctttctcgcagattgaggcacagaggacctgactggagtggtttatatcagaacggagataattacttggcccatcaacgtcttgccgtcatcgatcctgcttccggtgatcaacctcttttcaacgaggacaagaccattgttgtcacggtgaacggagagatttataaccatgaggagctgagaaaacgtctgaagaatcacaagttccgtactggtagtgattgtgaagtcattgctcacttgtacgaggagtatggtgtggattttgttgatatgttggatggaatattctcctttgtgttgctcgacacacgagataactctttcatggtggctcgtgatgcgattggtgtcacttcgctctacattggttggggactagacggatctgtgtggatatcttcagagatgaaaggcctaaacgatgactgtgagcatttcgaaacgtttcctccaggtcatttttattcaagcaaattaggagggtttaagcaatggtataatcctccttggttcaatgaatctgttccttcaacgccttatgagcctcttgcgataagacgcgcctttgaaaacgctgtgattaagcggttgatgactgatgttccatttggagttttgctctctggtggtcttgattcttcccttgttgcctccatcactgcacgtcacttggccggtactaaggcggctaagcaatggggtcctcagctccattccttttgcgttggtcttgagggctcaccggacttgaaggcagggaaagaggtggcggaatatttggggacggtgcaccacgagttccacttctcggtgcaggacgggattgatgcgatagaggatgtgatttaccatgttgagacctatgatgtgacgactatcagagcgagcacaccgatgttcttgatgtcccggaaaatcaagtctctaggggtcaagatggttctctccggcgaaggtgcggacgagatctttggagggtacctctatttccacaaggcacctaacaagaaagagtttcaccaagaaacttgtcgcaagatcaaggctcttcacaagtatgactgtctaagagccaacaaatctacctctgcctttggactagaggcacgtgttcctttccttgacaaagacttcatcaacacagctatgtctctcgaccctgaatccaagatgatcaagccagaggaaggaaggatcgagaaatgggttctaaggagagcctttgacgacgaagaacgtccttatctaccaaaacacattctctacagacagaaagaacagttcagtgatggtgttggctacagttggatcgatggcctgaaagatcacgctgctcaaaatgtcaatgacaagatgatgtcgaacgcggggcatatcttccctcacaacactccaaacactaaagaagcttactactacagaatgatctttgaaaggttcttcccgcagaactctgcgagactaacggttcctggaggtgccaccgtggcttgttcgactgcaaaggcagtggagtgggatgcaagctggtccaacaatatggatccatcaggaagagccgctatcggagttcacctttcggcctacgatggcaagaacgtggcattgaccataccaccacttaaggcaattgacaacatgccgatgatgatgggtcaaggagttgtgattcagtcataacttcgaaggagaaatggatgaaatatgtgttatatcttcccaatgggtgaagtgttttgtatgattttaaaaataagaatgtgatcctttttttttcctatgaagatctgaatgtataatctatcttgtaaaaatttgtttctttgtaagatttgaatgtaccgcttttacgtagatcgatgtacatcaatcttataagtttcaattatgg

SEQ ID NO: 35014 - protein, 584 aa, Arabidopsis thaliana
  peptide (1)..(584): Ceres Seq. ID no. 13492887
MCGILAVLGCSDDSQAKRVRVLELSRRLRHRGPDWSGLYQNGDNYLAHQRLAVIDPASGDQPLFNEDKTIVVTVNGEIYNHEELRKRLKNHKFRTGSDCEVIAHLYEEYGVDFVDMLDGIFSFVLLDTRDNSFMVARDAIGVTSLYIGWGLDGSVWISSEMKGLNDDCEHFETFPPGHFYSSKLGGFKQWYNPPWFNESVPSTPYEPLAIRRAFENAVIKRLMTDVPFGVLLSGGLDSSLVASITARHLAGTKAAKQWGPQLHSFCVGLEGSPDLKAGKEVAEYLGTVHHEFHFSVQDGIDAIEDVIYHVETYDVTTIRASTPMFLMSRKIKSLGVKMVLSGEGADEIFGGYLYFHKAPNKKEFHQETCRKIKALHKYDCLRANKSTSAFGLEARVPFLDKDFINTAMSLDPESKMIKPEEGRIEKWVLRRAFDDEERPYLPKHILYRQKEQFSDGVGYSWIDGLKDHAAQNVNDKMMSNAGHIFPHNTPNTKEAYYYRMIFERFFPQNSARLTVPGGATVACSTAKAVEWDASWSNNMDPSGRAAIGVHLSAYDGKNVALTIPPLKAIDNMPMMMGQGVVIQS

SEQ ID NO: 35015 - protein, 469 aa, Arabidopsis thaliana
  peptide (1)..(469): Ceres Seq. ID no. 13492888
MLDGIFSFVLLDTRDNSFMVARDAIGVTSLYIGWGLDGSVWISSEMKGLNDDCEHFETFPPGHFYSSKLGGFKQWYNPPWFNESVPSTPYEPLAIRRAFENAVIKRLMTDVPFGVLLSGGLDSSLVASITARHLAGTKAAKQWGPQLHSFCVGLEGSPDLKAGKEVAEYLGTVHHEFHFSVQDGIDAIEDVIYHVETYDVTTIRASTPMFLMSRKIKSLGVKMVLSGEGADEIFGGYLYFHKAPNKKEFHQETCRKIKALHKYDCLRANKSTSAFGLEARVPFLDKDFINTAMSLDPESKMIKPEEGRIEKWVLRRAFDDEERPYLPKHILYRQKEQFSDGVGYSWIDGLKDHAAQNVNDKMMSNAGHIFPHNTPNTKEAYYYRMIFERFFPQNSARLTVPGGATVACSTAKAVEWDASWSNNMDPSGRAAIGVHLSAYDGKNVALTIPPLKAIDNMPMMMGQGVVIQS

SEQ ID NO: 35016 - protein, 451 aa, Arabidopsis thaliana
  peptide (1)..(451): Ceres Seq. ID no. 13492889
MVARDAIGVTSLYIGWGLDGSVWISSEMKGLNDDCEHFETFPPGHFYSSKLGGFKQWYNPPWFNESVPSTPYEPLAIRRAFENAVIKRLMTDVPFGVLLSGGLDSSLVASITARHLAGTKAAKQWGPQLHSFCVGLEGSPDLKAGKEVAEYLGTVHHEFHFSVQDGIDAIEDVIYHVETYDVTTIRASTPMFLMSRKIKSLGVKMVLSGEGADEIFGGYLYFHKAPNKKEFHQETCRKIKALHKYDCLRANKSTSAFGLEARVPFLDKDFINTAMSLDPESKMIKPEEGRIEKWVLRRAFDDEERPYLPKHILYRQKEQFSDGVGYSWIDGLKDHAAQNVNDKMMSNAGHIFPHNTPNTKEAYYYRMIFERFFPQNSARLTVPGGATVACSTAKAVEWDASWSNNMDPSGRAAIGVHLSAYDGKNVALTIPPLKAIDNMPMMMGQGVVIQS

SEQ ID NO: 35017 - DNA, 912 bp, Arabidopsis thaliana
  misc_feature (1)..(912): Ceres Seq. ID no. 13488171
  misc_feature (1)..(912): Ortholog of  Ceres SEQ ID NO 13660862 as cited in SEQ ID NO 60846
aatttttcatcttcttcgagtgattagtacagattagggttttattcgttattattgtctatattactccttgattgtggtcgatgacctcgctacttcttctcagaacgcttccgcttctccgcaacggatttctcaaccatcgtcatcaagttggtatcgtagctggtggaattctcagtcaccgtcggcgtttgttgtgttctcttgctgatagaccacagttttacgagaataatgattctgtttctccggtggagggatccggcgcggcggcgatgaacgtgacatcgcctgttgttgataatagctggcgttatgaagatcctgattatcggaaatggaagaatctagaggctgagattcttcgagatattgaacctatttctcttctcgctaaagaaattcttcattccgataggtatttggatggagaacgcttagattttgaggatgagaaaattgtcatggaaaagcttcttccttatcacccatattccaaagacaaaattggttgtggtcttgattttataatggttgatcggcatccacaattcaggcactcaagatgcctctttgttgtgagaacagatggtggatggatagatttctcgtaccaaaagtgtcttcgagcctatgttcgagataagtacccgtctcacgctgagaggtttattcgtgaacattttaagcgtgctagtagctaaaaatctgtataactgtcccactcatcatcacagcaaattctcataaatttttagctgaaataacacaatcagctatgaagctttgttgtacaaaatttataaattgctcaatctattggaagacttgaatgagttaggaaaatagtagttggttcagactgcagaacaatcaatttttgagaccgaaagtaattctagttatggc

SEQ ID NO: 35018 - protein, 207 aa, Arabidopsis thaliana
  peptide (1)..(207): Ceres Seq. ID no. 13488172
MTSLLLLRTLPLLRNGFLNHRHQVGIVAGGILSHRRRLLCSLADRPQFYENNDSVSPVEGSGAAAMNVTSPVVDNSWRYEDPDYRKWKNLEAEILRDIEPISLLAKEILHSDRYLDGERLDFEDEKIVMEKLLPYHPYSKDKIGCGLDFIMVDRHPQFRHSRCLFVVRTDGGWIDFSYQKCLRAYVRDKYPSHAERFIREHFKRASS

SEQ ID NO: 35019 - protein, 142 aa, Arabidopsis thaliana
  peptide (1)..(142): Ceres Seq. ID no. 13488173
MNVTSPVVDNSWRYEDPDYRKWKNLEAEILRDIEPISLLAKEILHSDRYLDGERLDFEDEKIVMEKLLPYHPYSKDKIGCGLDFIMVDRHPQFRHSRCLFVVRTDGGWIDFSYQKCLRAYVRDKYPSHAERFIREHFKRASS

SEQ ID NO: 35020 - DNA, 1158 bp, Arabidopsis thaliana
  misc_feature (1)..(1158): Ceres Seq. ID no. 12385478
  misc_feature (1)..(1158): Ortholog of  Ceres SEQ ID NO 13502952 as cited in SEQ ID NO 62271
  misc_feature (1)..(1158): Ortholog of  Ceres SEQ ID NO 13502973 as cited in SEQ ID NO 68052
  misc_feature (1)..(1158): Ortholog of  Ceres SEQ ID NO 13596000 as cited in SEQ ID NO 68188
ataattttttaaaaagtcatggattatcatcttagggttttgttctctgtttctcttatctttgtgttcgtctctgtttcggtttgtggagacgaagatgtgttgatcaggcaagtggttgatgaaacagagccgaaagttttgtcatcggaggatcactttactctcttcaagaagaaattcggcaaggtttacggttccattgaggagcattattacagattctctgttttcaaagcaaatctcctgcgagcgatgcgtcaccagaagatggatccttctgctcgtcacggcgtaacgcagttttcggatctgactcgttctgagtttcggagaaagcatttaggggttaaaggtgggtttaagcttcctaaagacgctaatcaagccccgattctccctactcagaatcttccggaggagtttgattggagagatcgcggcgcggttactcccgtgaaaaaccagggatcttgtggttcttgctggagttttagcactacaggtgcccttgaaggtgctcacttcctcgctactggcaaactcgttagtctcagtgaacaacagctcgtcgattgtgatcacgagtgtgatccagaagaggaaggttcatgtgattctggttgtaacggtgggcttatgaacagtgcctttgaatacacgcttaaaaccggagggcttatgcgagagaaagattatccttacaccggtactgatggagggagctgcaagttagacaggtctaagatcgttgcctctgtctccaactttagtgttgtgtccatcaacgaagatcaaatagctgcaaaccttatcaaaaacggtcctctagctgtggcgatcaatgcagcttatatgcaaacctacattggaggagtctcgtgtccttacatatgctcgaggcggctcaaccacggtgtgttgttggtaggttatggctcggctgggttttctcaagcaaggttaaaggaaaaaccgtattggatcatcaagaactcgtggggtgagtcttggggtgagaatggtttctataagatatgtaaaggtcgtaacatttgcggtgttgacagtttggtctccaccgtcgctgctaccacttcttgagcttttcattattctgctgcaatgctatttaaagtctgtaaataaatgattaac

SEQ ID NO: 35021 - protein, 361 aa, Arabidopsis thaliana
  peptide (1)..(361): Ceres Seq. ID no. 12385479
MDYHLRVLFSVSLIFVFVSVSVCGDEDVLIRQVVDETEPKVLSSEDHFTLFKKKFGKVYGSIEEHYYRFSVFKANLLRAMRHQKMDPSARHGVTQFSDLTRSEFRRKHLGVKGGFKLPKDANQAPILPTQNLPEEFDWRDRGAVTPVKNQGSCGSCWSFSTTGALEGAHFLATGKLVSLSEQQLVDCDHECDPEEEGSCDSGCNGGLMNSAFEYTLKTGGLMREKDYPYTGTDGGSCKLDRSKIVASVSNFSVVSINEDQIAANLIKNGPLAVAINAAYMQTYIGGVSCPYICSRRLNHGVLLVGYGSAGFSQARLKEKPYWIIKNSWGESWGENGFYKICKGRNICGVDSLVSTVAATTS

SEQ ID NO: 35022 - protein, 282 aa, Arabidopsis thaliana
  peptide (1)..(282): Ceres Seq. ID no. 12385480
MRHQKMDPSARHGVTQFSDLTRSEFRRKHLGVKGGFKLPKDANQAPILPTQNLPEEFDWRDRGAVTPVKNQGSCGSCWSFSTTGALEGAHFLATGKLVSLSEQQLVDCDHECDPEEEGSCDSGCNGGLMNSAFEYTLKTGGLMREKDYPYTGTDGGSCKLDRSKIVASVSNFSVVSINEDQIAANLIKNGPLAVAINAAYMQTYIGGVSCPYICSRRLNHGVLLVGYGSAGFSQARLKEKPYWIIKNSWGESWGENGFYKICKGRNICGVDSLVSTVAATTS

SEQ ID NO: 35023 - protein, 277 aa, Arabidopsis thaliana
  peptide (1)..(277): Ceres Seq. ID no. 12385481
MDPSARHGVTQFSDLTRSEFRRKHLGVKGGFKLPKDANQAPILPTQNLPEEFDWRDRGAVTPVKNQGSCGSCWSFSTTGALEGAHFLATGKLVSLSEQQLVDCDHECDPEEEGSCDSGCNGGLMNSAFEYTLKTGGLMREKDYPYTGTDGGSCKLDRSKIVASVSNFSVVSINEDQIAANLIKNGPLAVAINAAYMQTYIGGVSCPYICSRRLNHGVLLVGYGSAGFSQARLKEKPYWIIKNSWGESWGENGFYKICKGRNICGVDSLVSTVAATTS

SEQ ID NO: 35024 - DNA, 724 bp, Arabidopsis thaliana
  misc_feature (1)..(724): Ceres Seq. ID no. 12393307
  misc_feature (1)..(724): Ortholog of  Ceres SEQ ID NO 12584790 as cited in SEQ ID NO 62648
  misc_feature (1)..(724): Ortholog of  Ceres SEQ ID NO 13545965 as cited in SEQ ID NO 67378
  misc_feature (1)..(724): Ortholog of  Ceres SEQ ID NO 15178116 as cited in SEQ ID NO 0
ctcctttgcactccatttttattctcgattctcttctctcccgataaagaagctctcgctttgtgttgtccgtccttcttccaggttttctcgtctctgacgcatggcttctaagaggatcttgaaggagctcaaggatctgcagaaggatcctccttcaaactgcagcgctggtccggtggctgaggacatgttccattggcaagccactatcatgggacctcctgaaagtccgtatgccggaggagtgtttttggtttctattcatttccctccggattatcctttcaagccaccaaaggtgtcttttaagactaaggtgtaccatccaaacatcaatagcaatggaagtatttgccttgatattttgaaagagcaatggagccctgctcttactatctctaaggttctgttgtcgatttgctcgctgttgactgacccaaacccagatgatcctcttgtgccggagatagctcacatgtacaagacagatagatccaagtacgagtcaactgcgagaagctggacacaaaagtacgcaatgggttgatgatataagacaaagcaaaggatatgttattgcgcatcggaataaaataataacttaaaaaaaatgcacttgtttggtttatcaaacgttagcaagtatcgaacaacttagctgctcttactcctcttctgttctgatcactataaactagtattaatttcgattgttgggtct

SEQ ID NO: 35025 - protein, 148 aa, Arabidopsis thaliana
  peptide (1)..(148): Ceres Seq. ID no. 12393308
MASKRILKELKDLQKDPPSNCSAGPVAEDMFHWQATIMGPPESPYAGGVFLVSIHFPPDYPFKPPKVSFKTKVYHPNINSNGSICLDILKEQWSPALTISKVLLSICSLLTDPNPDDPLVPEIAHMYKTDRSKYESTARSWTQKYAMG

SEQ ID NO: 35026 - protein, 119 aa, Arabidopsis thaliana
  peptide (1)..(119): Ceres Seq. ID no. 12393309
MFHWQATIMGPPESPYAGGVFLVSIHFPPDYPFKPPKVSFKTKVYHPNINSNGSICLDILKEQWSPALTISKVLLSICSLLTDPNPDDPLVPEIAHMYKTDRSKYESTARSWTQKYAMG

SEQ ID NO: 35027 - protein, 111 aa, Arabidopsis thaliana
  peptide (1)..(111): Ceres Seq. ID no. 12393310
MGPPESPYAGGVFLVSIHFPPDYPFKPPKVSFKTKVYHPNINSNGSICLDILKEQWSPALTISKVLLSICSLLTDPNPDDPLVPEIAHMYKTDRSKYESTARSWTQKYAMG

SEQ ID NO: 35028 - DNA, 855 bp, Arabidopsis thaliana
  misc_feature (1)..(855): Ceres Seq. ID no. 12332021
  misc_feature (1)..(855): Ortholog of  Ceres SEQ ID NO 14311859 as cited in SEQ ID NO 51658
  misc_feature (1)..(855): Ortholog of  Ceres SEQ ID NO 13638685 as cited in SEQ ID NO 51871
  misc_feature (1)..(855): Ortholog of  Ceres SEQ ID NO 13599200 as cited in SEQ ID NO 0
taatcgaaaacatttggtattgctgcttacgtcgtcagatctgctcgttttttcgctccatttttgggttaccattactcagcttccgttttaaatatcacattagatggacgaaagcggaggtgatagtggttcagtggccacacctgttcaacagcgagcacatgaggcatggaggatttaccaacactatcttgacaagactacacctcatgcaaattacagatggattggaactcttgtcgtcgctcttatctactgtttgagggtttactatattcagggtttctacatcatcgcctatggtcttggaatctaccttctcaatctgcttatcgggttcttgtcccctcttgttgatcctgaagctggtggggtctctgatgggccttctctgcctactagaggttctgatgagttcaagcctttcattcgccgtctccccgagttcaaattctggtactccatgacaaaggctttctgcatagctttcctcatgacattcttctcggtgtttgacgttcctgtgttttggccaattctgctgtgctattggatcgttctctttgttctcaccatgagacgccagatcgcccacatgatcaagtacaaatacatccctttcagcttcggcaaacagaaatatggtggacggagcagcagcggctcacgtgcggattgatctgaccaatttgctgaccattagctactttttttgtctttgcaaaagagaaagaaaaaattgttaagaatatcattttggaccatttttacattgacaaaactatgcagagctataaggaagaattataggcaggataaaaaaggatggaaactaaacttgatttagctcgg

SEQ ID NO: 35029 - protein, 191 aa, Arabidopsis thaliana
  peptide (1)..(191): Ceres Seq. ID no. 12332022
MDESGGDSGSVATPVQQRAHEAWRIYQHYLDKTTPHANYRWIGTLVVALIYCLRVYYIQGFYIIAYGLGIYLLNLLIGFLSPLVDPEAGGVSDGPSLPTRGSDEFKPFIRRLPEFKFWYSMTKAFCIAFLMTFFSVFDVPVFWPILLCYWIVLFVLTMRRQIAHMIKYKYIPFSFGKQKYGGRSSSGSRAD

SEQ ID NO: 35030 - DNA, 427 bp, Arabidopsis thaliana
  misc_feature (1)..(427): Ceres Seq. ID no. 12338550
  misc_feature (1)..(427): Ortholog of  Ceres SEQ ID NO 13656408 as cited in SEQ ID NO 65810
gctcattagggtttctcatctacgacggcgtggtgttcctccttcctgctctgaaaaatggcgaagagaacgaagaaggttggaatcgtcggcaaatacggaacacgttatggtgcgagtatcaggaagcagattaagaagatggaggtcagccagcacagcaagtacttctgtgagttgtatctggggttgcaaggattgtggcaaggtcaaggcaggtggtgcttacacaatgaacaccgccagtgcggtcactgttagaagcacgatcagaaggttgagggagcagatcgagggttaaaagtctgctggctttttatatttggtttccttgttttgacaatttaagttttgcaaactctatgcttgtgattttgaatcaagacttatacattgagcagtttaagcaggtttttattttttgttg

SEQ ID NO: 35031 - protein, 99 aa, Arabidopsis thaliana
  peptide (1)..(99): Ceres Seq. ID no. 12338552
LIRVSHLRRRGVPPSCSEKWRRERRRLESSANTEHVMVRVSGSRLRRWRSASTASTSVSCIWGCKDCGKVKAGGAYTMNTASAVTVRSTIRRLREQIEG

SEQ ID NO: 35032 - protein, 67 aa, Arabidopsis thaliana
  peptide (1)..(67): Ceres Seq. ID no. 12338553
MAKRTKKVGIVGKYGTRYGASIRKQIKKMEVSQHSKYFCELYLGLQGLWQGQGRWCLHNEHRQCGHC

SEQ ID NO: 35033 - protein, 63 aa, Arabidopsis thaliana
  peptide (1)..(63): Ceres Seq. ID no. 12338554
MVRVSGSRLRRWRSASTASTSVSCIWGCKDCGKVKAGGAYTMNTASAVTVRSTIRRLREQIEG

SEQ ID NO: 35034 - DNA, 660 bp, Arabidopsis thaliana
  misc_feature (1)..(660): Ceres Seq. ID no. 12321298
  misc_feature (1)..(660): Ortholog of  Ceres SEQ ID NO 14301506 as cited in SEQ ID NO 61159
  misc_feature (1)..(660): Ortholog of  Ceres SEQ ID NO 12780602 as cited in SEQ ID NO 65695
gttctttcgattctcagagaagacttttcagaacttcctccaactttctcagataagcaacaatggtgaaaggtcccggtctctacaccgaaatcggcaaaaaggccagagatcttctgtacaaagaccacaacagtgaccagaaattcagtatcaccactttctctcctgccggtgttgccatcacctcaaccggaactaagaaaggtgacttattgttgggagatgtcgcttttcagtcgaggcgaaagaacattactactgatttgaaagtttgcactgattctacttttctgatcaccgctaccgttgatgaggctgcacccggactgaggtcaatcttcagcttcaaggttcctgaccaaaattctggcaaggttgagctgcaatacttgcatgagtacgccggtatcagcacaagcatgggattgactcagaacacaactgtcaattgacaagagtgctaaagttggattggctctcgcactcaagccttgaaactgagatggaagaagaagttgcaatagtttttttaaactagtttctttctacgtactctgttttttctctgcttggttcatggtttgagtgggcaactactgatctttcccattttcctgccggatttgtagaagaataaaaaggttgaaaatgatcatc

SEQ ID NO: 35035 - protein, 130 aa, Arabidopsis thaliana
  peptide (1)..(130): Ceres Seq. ID no. 12321299
MVKGPGLYTEIGKKARDLLYKDHNSDQKFSITTFSPAGVAITSTGTKKGDLLLGDVAFQSRRKNITTDLKVCTDSTFLITATVDEAAPGLRSIFSFKVPDQNSGKVELQYLHEYAGISTSMGLTQNTTVN

SEQ ID NO: 35036 - DNA, 1118 bp, Arabidopsis thaliana
  misc_feature (1)..(1118): Ceres Seq. ID no. 12396813
  misc_feature (1)..(1118): Ortholog of  Ceres SEQ ID NO 12636774 as cited in SEQ ID NO 372
  misc_feature (1)..(1118): Ortholog of  Ceres SEQ ID NO 13582350 as cited in SEQ ID NO 56734
  misc_feature (1)..(1118): Ortholog of  Ceres SEQ ID NO 12578315 as cited in SEQ ID NO 62451
  misc_feature (1)..(1118): Ortholog of  Ceres SEQ ID NO 13597295 as cited in SEQ ID NO 63743
  misc_feature (1)..(1118): Ortholog of  Ceres SEQ ID NO 12617090 as cited in SEQ ID NO 64005
  misc_feature (1)..(1118): Ortholog of  Ceres SEQ ID NO 13597439 as cited in SEQ ID NO 64081
  misc_feature (1)..(1118): Ortholog of  Ceres SEQ ID NO 13597233 as cited in SEQ ID NO 64370
  misc_feature (1)..(1118): Ortholog of  Ceres SEQ ID NO 13599438 as cited in SEQ ID NO 0
aggaacgagtgaaactgaaaaccatggagatggagaaaaaccaacacatttcttcgctggacatccccgttattgatctaagtaatcccgatgaagagcttgtggcaagtgcggtggtcaaagcgagccaagagtggggaatatttcaggtggttaaccacggaatcccgaccgagctgatactgcggttgctacaagtgggaatggagtttttcgagctaccggagacagagaaggaagccgtagcgaagccagaagactccttggacatagaaggatacagaaccaagtaccagaaatatctagaaggtagaaacgcatgggtggatcatctctttcaccgcatctggccaccgtctagagtcaatcacaaattctggcctaaaaatcctccagaatacattgaagtgaatgaagagtacgcaagtcacataaagaagctatcggagaaaatcatggaatggttatcagaaggactaggtttaaggcatgaggcgttgaaggaaggtctaggcggcgaaacgattgagtatctaatgaaaatcaattactatccgccgtgtccagatccggagttagtcgtgggagctcctgatcacactgatgtcaatggaatcacactcctagtcgctaatgaagctttagggcttcaagcattcaaagataaccaatggatcgacgcggagtataccacttccgggatcatcgtcatcatcggcgatcaattcttgagaatgagcaatgggaagtataagagtgtggagcatagggcgaagatggataaggagaagacgagaatctcgtggccggtttttgtggaatctagccttgatcaagtcttcggacctttgccggagctaattaccggtgatgagaacgttcccaagtttaagccttatgtctacaaagactacaaatttcgtaagcttaagaagcttcttctcgactgagaaaatctcataataacccataaacagaaaagagatcatgaataaaaaaaatatttgttttgtttgcttctgctttaattaataagttttatctatttatcaaattacagcattgtttgtatggtgcatgtacgtattttagtattaatctatttggattgtaacgtc

SEQ ID NO: 35037 - protein, 315 aa, Arabidopsis thaliana
  peptide (1)..(315): Ceres Seq. ID no. 12396814
ERVKLKTMEMEKNQHISSLDIPVIDLSNPDEELVASAVVKASQEWGIFQVVNHGIPTELILRLLQVGMEFFELPETEKEAVAKPEDSLDIEGYRTKYQKYLEGRNAWVDHLFHRIWPPSRVNHKFWPKNPPEYIEVNEEYASHIKKLSEKIMEWLSEGLGLRHEALKEGLGGETIEYLMKINYYPPCPDPELVVGAPDHTDVNGITLLVANEALGLQAFKDNQWIDAEYTTSGIIVIIGDQFLRMSNGKYKSVEHRAKMDKEKTRISWPVFVESSLDQVFGPLPELITGDENVPKFKPYVYKDYKFRKLKKLLLD

SEQ ID NO: 35038 - protein, 308 aa, Arabidopsis thaliana
  peptide (1)..(308): Ceres Seq. ID no. 12396815
MEMEKNQHISSLDIPVIDLSNPDEELVASAVVKASQEWGIFQVVNHGIPTELILRLLQVGMEFFELPETEKEAVAKPEDSLDIEGYRTKYQKYLEGRNAWVDHLFHRIWPPSRVNHKFWPKNPPEYIEVNEEYASHIKKLSEKIMEWLSEGLGLRHEALKEGLGGETIEYLMKINYYPPCPDPELVVGAPDHTDVNGITLLVANEALGLQAFKDNQWIDAEYTTSGIIVIIGDQFLRMSNGKYKSVEHRAKMDKEKTRISWPVFVESSLDQVFGPLPELITGDENVPKFKPYVYKDYKFRKLKKLLLD

SEQ ID NO: 35039 - protein, 306 aa, Arabidopsis thaliana
  peptide (1)..(306): Ceres Seq. ID no. 12396816
MEKNQHISSLDIPVIDLSNPDEELVASAVVKASQEWGIFQVVNHGIPTELILRLLQVGMEFFELPETEKEAVAKPEDSLDIEGYRTKYQKYLEGRNAWVDHLFHRIWPPSRVNHKFWPKNPPEYIEVNEEYASHIKKLSEKIMEWLSEGLGLRHEALKEGLGGETIEYLMKINYYPPCPDPELVVGAPDHTDVNGITLLVANEALGLQAFKDNQWIDAEYTTSGIIVIIGDQFLRMSNGKYKSVEHRAKMDKEKTRISWPVFVESSLDQVFGPLPELITGDENVPKFKPYVYKDYKFRKLKKLLLD

SEQ ID NO: 35040 - DNA, 854 bp, Arabidopsis thaliana
  misc_feature (1)..(854): Ceres Seq. ID no. 12330366
  misc_feature (1)..(854): Ortholog of  Ceres SEQ ID NO 15172729 as cited in SEQ ID NO 56037
  misc_feature (1)..(854): Ortholog of  Ceres SEQ ID NO 13584899 as cited in SEQ ID NO 64830
  misc_feature (1)..(854): Ortholog of  Ceres SEQ ID NO 14301603 as cited in SEQ ID NO 67721
  misc_feature (1)..(854): Ortholog of  Ceres SEQ ID NO 13596128 as cited in SEQ ID NO 67831
  misc_feature (1)..(854): Ortholog of  Ceres SEQ ID NO 12585194 as cited in SEQ ID NO 68878
  misc_feature (1)..(854): Ortholog of  Ceres SEQ ID NO 12589186 as cited in SEQ ID NO 0
aaaacacacacacacaaagggaaagccaaaccggtatattttctttaaacaggatatatagatgaaccaagaagagcacgtaaagcttctgggcttatggggaagtccttttagcaaaagagtagagatggtcctaaaacttaagggcataccttatgagtacattgaagaagatgtttatggaaacaggagccctatgcttctcaagtacaaccctatacacaagaaggtccctgtcctcatccacaatggtagatcgatagccgaatcattggtgattgtcgaatacatcgaagatacgtggaagacaactcacacgatcttgcctcaagatccttatgaacgtgccatggcccggttttgggctaagtatgtggatgaaaaggtaatgttagcagtgaagaaagcttgttggggaccggagagtgaaagagaaaaagaagtgaaagaggcttatgagggtttgaaatgtttagaaaaggagcttggagataaactttttttcggaggagagacaattggatttgtcgatatagcagctgatttcataggatattggttagggattttccaagaagcttcaggcgtcacgatcatgaccgcggaggagtttccaaaacttcaacgttggtcggaagatttcgtgggaaataactttattaaggaagtcttgccccctaaggagaagctcgtggctgttttgaaggccatgtttggaagtgttacatctaattaaacgtaataagaccatcgtaattcattgtttggtaacagaaaaaaattgatatctatgtcatctttatttttatattttcgtcttctttggtaaatgttttcttctatatggttattct

SEQ ID NO: 35041 - protein, 224 aa, Arabidopsis thaliana
  peptide (1)..(224): Ceres Seq. ID no. 12330367
MNQEEHVKLLGLWGSPFSKRVEMVLKLKGIPYEYIEEDVYGNRSPMLLKYNPIHKKVPVLIHNGRSIAESLVIVEYIEDTWKTTHTILPQDPYERAMARFWAKYVDEKVMLAVKKACWGPESEREKEVKEAYEGLKCLEKELGDKLFFGGETIGFVDIAADFIGYWLGIFQEASGVTIMTAEEFPKLQRWSEDFVGNNFIKEVLPPKEKLVAVLKAMFGSVTSN

SEQ ID NO: 35042 - protein, 202 aa, Arabidopsis thaliana
  peptide (1)..(202): Ceres Seq. ID no. 12330368
MVLKLKGIPYEYIEEDVYGNRSPMLLKYNPIHKKVPVLIHNGRSIAESLVIVEYIEDTWKTTHTILPQDPYERAMARFWAKYVDEKVMLAVKKACWGPESEREKEVKEAYEGLKCLEKELGDKLFFGGETIGFVDIAADFIGYWLGIFQEASGVTIMTAEEFPKLQRWSEDFVGNNFIKEVLPPKEKLVAVLKAMFGSVTSN

SEQ ID NO: 35043 - protein, 179 aa, Arabidopsis thaliana
  peptide (1)..(179): Ceres Seq. ID no. 12330369
MLLKYNPIHKKVPVLIHNGRSIAESLVIVEYIEDTWKTTHTILPQDPYERAMARFWAKYVDEKVMLAVKKACWGPESEREKEVKEAYEGLKCLEKELGDKLFFGGETIGFVDIAADFIGYWLGIFQEASGVTIMTAEEFPKLQRWSEDFVGNNFIKEVLPPKEKLVAVLKAMFGSVTSN

SEQ ID NO: 35044 - DNA, 820 bp, Arabidopsis thaliana
  misc_feature (1)..(820): Ceres Seq. ID no. 12579859
  misc_feature (1)..(820): Ortholog of  Ceres SEQ ID NO 14301742 as cited in SEQ ID NO 54857
aatcaaatcaaatctgtgtttcattctcttctccactgaaacgcgtttgaaggagaagggtcaaagggatctgatcctatcactttcgctgggaaaaacacgaaatcgaaggaagaatcaatcatgggtttcatcggataaactgtagattccatcaaatctatcaagatccgtcaagttctcactcaggctatcactctcggtatgatcgttacatctgcattgataatttggaaggcattgatatgtgtcactggcagtgaatcaccagtggttgttgttctctctgaaagtatggaacctggctttcagagaggagatatattgttcttgcggatgactgatgagcctattcgagcaggcgagattgttgtgttcagtgttgatggtcgtgaaattcccattgttcatcgagcaatcaaagttcatgagagaggagatactaaagcagttgatgttctaacaaaaggtgacaacaatgacattgatgacattggtctctatgctgaaggacagctttggcttcacaggcatcatatcatgggcagagctgttggattcttgccttatgttggatgggttactattatcatgacagaaaagcctatcatcaagtatatactcattggtgcattgggtttgctcgttataacatcgaaagactaagactacataacaagctggtcgttggtaaggaggtagcttctgcaacgctcgggtcatcatctttgtagccatcatctttgaaactgtagaatcatataaacctcaacttataattatagacacttttatctttaaatcagctacgttttgtggc

SEQ ID NO: 35045 - protein, 153 aa, Arabidopsis thaliana
  peptide (1)..(153): Ceres Seq. ID no. 12579860
MIVTSALIIWKALICVTGSESPVVVVLSESMEPGFQRGDILFLRMTDEPIRAGEIVVFSVDGREIPIVHRAIKVHERGDTKAVDVLTKGDNNDIDDIGLYAEGQLWLHRHHIMGRAVGFLPYVGWVTIIMTEKPIIKYILIGALGLLVITSKD

SEQ ID NO: 35046 - protein, 123 aa, Arabidopsis thaliana
  peptide (1)..(123): Ceres Seq. ID no. 12579861
MEPGFQRGDILFLRMTDEPIRAGEIVVFSVDGREIPIVHRAIKVHERGDTKAVDVLTKGDNNDIDDIGLYAEGQLWLHRHHIMGRAVGFLPYVGWVTIIMTEKPIIKYILIGALGLLVITSKD

SEQ ID NO: 35047 - protein, 109 aa, Arabidopsis thaliana
  peptide (1)..(109): Ceres Seq. ID no. 12579862
MTDEPIRAGEIVVFSVDGREIPIVHRAIKVHERGDTKAVDVLTKGDNNDIDDIGLYAEGQLWLHRHHIMGRAVGFLPYVGWVTIIMTEKPIIKYILIGALGLLVITSKD

SEQ ID NO: 35048 - DNA, 721 bp, Arabidopsis thaliana
  misc_feature (1)..(721): Ceres Seq. ID no. 12370040
  misc_feature (1)..(721): Ortholog of  Ceres SEQ ID NO 15174034 as cited in SEQ ID NO 0
aaacacaattataaatctcaccattttttattatacacactttattcttgtctctatagttccacatctcaatctagctctcttctctatctttctctaaatcatgggtcttcctgaagatttcatcaccgagcttcagattccaggttacatattaaagatactttacgtcatcggtttctttagagacatggtcgatgctctttgtccttacattggtctacctagttttctagaccacaacgagacctctggacccgatccgacccgacacgctctctctacgtcagcgagtcttgctaacgagttgatcccggtggttcggttctcggatcttccgaccgatccggaagattgttgtacggtttgtttgtcagattttgagtccgacgataaggttaggcagctacccaagtgtggacacgtgtttcatcatcattgtttagaccgttggatcgttgactacaacaagatgaaatgtccggtttgtcggcaccggttcttaccgaaagaaaagtacacgcaatgtgattggggttctggttcagattggtttagtgatgaagtggaaagtaccaactaattggtagttttaatctatgtcggcagaatgtttgttgtattaattccagtataactctatgtatattagcatagatcatctttttgtgatggaacaacactatatatctttatacaaaaaaaaaacactatatatatt

SEQ ID NO: 35049 - protein, 159 aa, Arabidopsis thaliana
  peptide (1)..(159): Ceres Seq. ID no. 12370041
MGLPEDFITELQIPGYILKILYVIGFFRDMVDALCPYIGLPSFLDHNETSGPDPTRHALSTSASLANELIPVVRFSDLPTDPEDCCTVCLSDFESDDKVRQLPKCGHVFHHHCLDRWIVDYNKMKCPVCRHRFLPKEKYTQCDWGSGSDWFSDEVESTN

SEQ ID NO: 35050 - protein, 130 aa, Arabidopsis thaliana
  peptide (1)..(130): Ceres Seq. ID no. 12370042
MVDALCPYIGLPSFLDHNETSGPDPTRHALSTSASLANELIPVVRFSDLPTDPEDCCTVCLSDFESDDKVRQLPKCGHVFHHHCLDRWIVDYNKMKCPVCRHRFLPKEKYTQCDWGSGSDWFSDEVESTN

SEQ ID NO: 35051 - DNA, 825 bp, Arabidopsis thaliana
  misc_feature (1)..(825): Ceres Seq. ID no. 12332027
  misc_feature (1)..(825): Ortholog of  Ceres SEQ ID NO 13638838 as cited in SEQ ID NO 52011
  misc_feature (1)..(825): Ortholog of  Ceres SEQ ID NO 13585554 as cited in SEQ ID NO 64455
agtcgcagtttcgcagctgtaacaagatttcttctggcgaagaagagagaatcgccgttcaccgattcgtttctttgttcatctcctcccaggtaattatgggagatttctcgattcagatcagttctaagctgatcaatcagctagctgaaggtaacgatcaaccaaagaggagggcaaagaaaaccaaacctaaagtctcaccacagagcaaacagaaaacaaaccaagatgaagagaagaaacctaatccagtggctgaattaccgatgcagccaccgtttttcttcccaataccaccacaaggagcagcaagcacagagctggaatcgataaaatccgttgtgaaagagagtgagaaggttcttgagaagctggagttacaagagaagaacattgttcgtgaagttacggagagagccaaggatctgagggagaaagagtttaagatcccggaacctaaaccaatgccttgttcgtcagatcacgaagcctggatgaaatgctacaaggagaacatcggtagtccgttgaaatgtagcggtttcgttaagagtttccaggattgtgcacgccggtccagacagcaagtgaatcctgaagaaaagtagagataataagattcaaaaggacttttttgagacacgaagggaatagtttttgctttctgagatcatatgaatgacacagaagaattgtgcttgtttccttttgatttcatgaaagcaaaaaagaaagaaaaaaaataagcagaatctgtgattatgttcatgagataaaactttcaaaactatgttcttgattaactattttggcttatcttct

SEQ ID NO: 35052 - protein, 202 aa, Arabidopsis thaliana
  peptide (1)..(202): Ceres Seq. ID no. 12332028
SQFRSCNKISSGEEERIAVHRFVSLFISSQVIMGDFSIQISSKLINQLAEGNDQPKRRAKKTKPKVSPQSKQKTNQDEEKKPNPVAELPMQPPFFFPIPPQGAASTELESIKSVVKESEKVLEKLELQEKNIVREVTERAKDLREKEFKIPEPKPMPCSSDHEAWMKCYKENIGSPLKCSGFVKSFQDCARRSRQQVNPEEK

SEQ ID NO: 35053 - protein, 170 aa, Arabidopsis thaliana
  peptide (1)..(170): Ceres Seq. ID no. 12332029
MGDFSIQISSKLINQLAEGNDQPKRRAKKTKPKVSPQSKQKTNQDEEKKPNPVAELPMQPPFFFPIPPQGAASTELESIKSVVKESEKVLEKLELQEKNIVREVTERAKDLREKEFKIPEPKPMPCSSDHEAWMKCYKENIGSPLKCSGFVKSFQDCARRSRQQVNPEEK

SEQ ID NO: 35054 - protein, 113 aa, Arabidopsis thaliana
  peptide (1)..(113): Ceres Seq. ID no. 12332030
MQPPFFFPIPPQGAASTELESIKSVVKESEKVLEKLELQEKNIVREVTERAKDLREKEFKIPEPKPMPCSSDHEAWMKCYKENIGSPLKCSGFVKSFQDCARRSRQQVNPEEK

SEQ ID NO: 35055 - DNA, 985 bp, Arabidopsis thaliana
  misc_feature (1)..(985): Ceres Seq. ID no. 13496830
  misc_feature (1)..(985): Ortholog of  Ceres SEQ ID NO 14308727 as cited in SEQ ID NO 58726
  misc_feature (1)..(985): Ortholog of  Ceres SEQ ID NO 13663517 as cited in SEQ ID NO 66850
gtcacgacctttttgatccaaaaatcaaaatccaaaaccgaccaatggataccaacaaccagcaaccacctccctccgccgccggaatccctcctccaccacctggaaccaccatctccgccgcaggaggaggagcttcttaccaccaccttctccaacaacaacaacaacagctccaactattctggacctaccaacgccaagagatcgaacaagttaacgatttcaaaaaccatcagcttccactagctaggataaaaaagatcatgaaagccgatgaagatgttcgtatgatctccgcagaagcaccgattctcttcgcgaaagcttgtgagcttttcattctcgagctcacgatcagatcttggcttcacgctgaggagaataaacgtcgtacgcttcagaaaaacgatatcgctgctgcgattactaggactgatatcttcgatttccttgttgatattgttcctagagatgagattaaggacgaagccgcagtcctcggtggtggaatggtggtggctcctaccgcgagcggcgtgccttactattatccgccgatgggacaaccagctggtcctggagggatgatgattgggagaccagctatggatccgaatggtgtttatgtccagcctccgtctcaggcgtggcagagtgtttggcagacttcgacggggacgggagatgatgtctcttatggtagtggtggaagttccggtcaagggaatctcgacggccaaggttaagctcagagtattccagatgatgcttgacctgcttgaagatagcagatattagtcgacctcgccttgaattttggatgtgtttgatagattatgcctaaattcaatgaaaaggcttcgttaaagaagagtaaaaaaaactcttgtttctctctgttaacgtatatgttattgtagcaaaaccatcattgctgcgacttagcctaactatatataatctaatgtgcagtttctattgg

SEQ ID NO: 35056 - protein, 248 aa, Arabidopsis thaliana
  peptide (1)..(248): Ceres Seq. ID no. 13496831
HDLFDPKIKIQNRPMDTNNQQPPPSAAGIPPPPPGTTISAAGGGASYHHLLQQQQQQLQLFWTYQRQEIEQVNDFKNHQLPLARIKKIMKADEDVRMISAEAPILFAKACELFILELTIRSWLHAEENKRRTLQKNDIAAAITRTDIFDFLVDIVPRDEIKDEAAVLGGGMVVAPTASGVPYYYPPMGQPAGPGGMMIGRPAMDPNGVYVQPPSQAWQSVWQTSTGTGDDVSYGSGGSSGQGNLDGQG

SEQ ID NO: 35057 - protein, 234 aa, Arabidopsis thaliana
  peptide (1)..(234): Ceres Seq. ID no. 13496832
MDTNNQQPPPSAAGIPPPPPGTTISAAGGGASYHHLLQQQQQQLQLFWTYQRQEIEQVNDFKNHQLPLARIKKIMKADEDVRMISAEAPILFAKACELFILELTIRSWLHAEENKRRTLQKNDIAAAITRTDIFDFLVDIVPRDEIKDEAAVLGGGMVVAPTASGVPYYYPPMGQPAGPGGMMIGRPAMDPNGVYVQPPSQAWQSVWQTSTGTGDDVSYGSGGSSGQGNLDGQG

SEQ ID NO: 35058 - protein, 160 aa, Arabidopsis thaliana
  peptide (1)..(160): Ceres Seq. ID no. 13496833
MKADEDVRMISAEAPILFAKACELFILELTIRSWLHAEENKRRTLQKNDIAAAITRTDIFDFLVDIVPRDEIKDEAAVLGGGMVVAPTASGVPYYYPPMGQPAGPGGMMIGRPAMDPNGVYVQPPSQAWQSVWQTSTGTGDDVSYGSGGSSGQGNLDGQG

SEQ ID NO: 35059 - DNA, 1178 bp, Arabidopsis thaliana
  misc_feature (1)..(1178): Ceres Seq. ID no. 13495663
  misc_feature (1)..(1178): Ortholog of  Ceres SEQ ID NO 14313038 as cited in SEQ ID NO 59520
  misc_feature (1)..(1178): Ortholog of  Ceres SEQ ID NO 13595464 as cited in SEQ ID NO 59792
  misc_feature (1)..(1178): Ortholog of  Ceres SEQ ID NO 14316416 as cited in SEQ ID NO 60078
  misc_feature (1)..(1178): Ortholog of  Ceres SEQ ID NO 13664262 as cited in SEQ ID NO 61094
tggtgcatcatccgtctatcaataccctgacaaggaaaaccctaattttttttggcccaaagggttttatactttaatctcatactccgattcattgtcgaaaaacgatgatgcataattcaaccgaagaatcggaatgggaggtgagacctggtggtatgctcgtccaacgaagagacgacgccgcttcctccgaccacaaacctctccaggatcccgactctgcttccgccgcttttgctcaaaccatcagaatcactgtttctcatggctcatcgcaccacgatcttcatatttctgctcacgccactttcggggatgtgaagaaagctcttgttcagaaaactggattggaagctagtgaattgaagatcttgttcagaggagttgagagagatgatgctgaacaattgcaagctgctggtgttaaggatgcgtctaagcttgttgttgttgttgaggatacgaataagagagtggaacaacagcctcctgtggtaactaaagagatggaaaaagctattgctgctgttaacgcggttacaggagaggtcgataagctctcggatagagttgttgctttagaagttgctgtgaatggagggacgcaagttgcggtgcgggagtttgacatggctgcagagcttcttatgaggcagctgctcaaattggatggcattgaggctgaaggggacgctaaagtacagcgtaaggctgaggtacgtagaatccaaaacttgcaggaggctgtggataagttgaaggcaagatgttcaaatccgtttgtggatcagagcaaagctgcagctgtaagcactgagtgggaatcgttcggaaacggtgtcggaagcttgaaccctcctccgccagcttcgccttcggccaatgtaactcaagattgggagaaatttgactgacattttagtactgctacgttgccttggaaaaaaatgcttattgaaactgtttatctttttgattattgttaaatattggaaaacgaccatcgtctttatcttctaatgtatagatatattatatatagtatcggaaatctacatctctgtacgaaatgttggaataatccctgggaatagtctttgatgtctctcagtctctgtcgtgcctaattggcttatgtcgtagtactaaagattatggctacgagttttggaggc

SEQ ID NO: 35060 - protein, 269 aa, Arabidopsis thaliana; identical to SEQ ID NO: 24560
  peptide (1)..(269): Ceres Seq. ID no. 13495664

SEQ ID NO: 35061 - protein, 268 aa, Arabidopsis thaliana; identical to SEQ ID NO: 24561
  peptide (1)..(268): Ceres Seq. ID no. 13495665

SEQ ID NO: 35062 - protein, 252 aa, Arabidopsis thaliana; identical to SEQ ID NO: 24562
  peptide (1)..(252): Ceres Seq. ID no. 13495666

SEQ ID NO: 35063 - DNA, 1093 bp, Arabidopsis thaliana
  misc_feature (1)..(1093): Ceres Seq. ID no. 12389089
  misc_feature (1)..(1093): Ortholog of  Ceres SEQ ID NO 14312047 as cited in SEQ ID NO 55656
  misc_feature (1)..(1093): Ortholog of  Ceres SEQ ID NO 13660872 as cited in SEQ ID NO 60830
  misc_feature (1)..(1093): Ortholog of  Ceres SEQ ID NO 12616221 as cited in SEQ ID NO 63291
atttcaagaaccttgagaacatcaaaaactaacacagaaagaaaaaaaacagttcctgttctattagattgttttctaaattgtctgaaaatcatggaagtaacttcccaatctaccctccctccagggttcagatttcatcctaccgacgaagaactcatcgtttactatcttcgaaaccagaccatgtctaaaccatgccctgtctccatcatcccagaagttgatatctacaaattcgacccatggcaattacccgagaaaacagagtttggagaaaatgagtggtatttcttcagccctagagaaagaaaatatccaaacggagtcagaccaaaccgggcagctgtttccggttattggaaagcaaccggtacagacaaagccattcacagcggttcaagtaacgtaggtgtcaagaaagctctagtcttctacaaaggtagacctcctaaaggaatcaaaactgactggatcatgcatgagtatcgtctccatgattcacgtaaagcatcaacgaaacgtaacggttccatgaggttagatgaatgggtactgtgtaggatatacaagaagagaggagcaagtaagcttctgaatgagcaagagggtttcatggacgaagtactaatggaggatgagacaaaagttgtagttaacgaagcagagagaagaactgaagaagagataatgatgatgacgtcgatgaaacttccaaggacgtgttcgctggctcatttgttggaaatggattacatgggacccgtctctcacattgataattttagtcagttcgatcatcttcatcaacctgattcggagtctagttggttcggggaccttcagtttaaccaagacgagatcttaaaccatcatcgtcaagcgatgtttaagttttagtgatggggtcagtaaaaaagaagaagaaacaagaaaagatgtgcttgaaaagttactttggtagatatttggttagtttgggtacatgaatgaaaattgtaaaatattataactaaaacccaatgggattttatatttctcccatatgaatgtgaaatgaaaaacaatgtttaattaaaaattaagttgtttc

SEQ ID NO: 35064 - protein, 299 aa, Arabidopsis thaliana
  peptide (1)..(299): Ceres Seq. ID no. 12389090
ISRTLRTSKTNTERKKTVPVLLDCFLNCLKIMEVTSQSTLPPGFRFHPTDEELIVYYLRNQTMSKPCPVSIIPEVDIYKFDPWQLPEKTEFGENEWYFFSPRERKYPNGVRPNRAAVSGYWKATGTDKAIHSGSSNVGVKKALVFYKGRPPKGIKTDWIMHEYRLHDSRKASTKRNGSMRLDEWVLCRIYKKRGASKLLNEQEGFMDEVLMEDETKVVVNEAERRTEEEIMMMTSMKLPRTCSLAHLLEMDYMGPVSHIDNFSQFDHLHQPDSESSWFGDLQFNQDEILNHHRQAMFKF

SEQ ID NO: 35065 - protein, 268 aa, Arabidopsis thaliana
  peptide (1)..(268): Ceres Seq. ID no. 12389091
MEVTSQSTLPPGFRFHPTDEELIVYYLRNQTMSKPCPVSIIPEVDIYKFDPWQLPEKTEFGENEWYFFSPRERKYPNGVRPNRAAVSGYWKATGTDKAIHSGSSNVGVKKALVFYKGRPPKGIKTDWIMHEYRLHDSRKASTKRNGSMRLDEWVLCRIYKKRGASKLLNEQEGFMDEVLMEDETKVVVNEAERRTEEEIMMMTSMKLPRTCSLAHLLEMDYMGPVSHIDNFSQFDHLHQPDSESSWFGDLQFNQDEILNHHRQAMFKF

SEQ ID NO: 35066 - protein, 237 aa, Arabidopsis thaliana
  peptide (1)..(237): Ceres Seq. ID no. 12389092
MSKPCPVSIIPEVDIYKFDPWQLPEKTEFGENEWYFFSPRERKYPNGVRPNRAAVSGYWKATGTDKAIHSGSSNVGVKKALVFYKGRPPKGIKTDWIMHEYRLHDSRKASTKRNGSMRLDEWVLCRIYKKRGASKLLNEQEGFMDEVLMEDETKVVVNEAERRTEEEIMMMTSMKLPRTCSLAHLLEMDYMGPVSHIDNFSQFDHLHQPDSESSWFGDLQFNQDEILNHHRQAMFKF

SEQ ID NO: 35067 - DNA, 1024 bp, Arabidopsis thaliana
  misc_feature (1)..(1024): Ceres Seq. ID no. 12332053
  misc_feature (1)..(1024): Ortholog of  Ceres SEQ ID NO 13655934 as cited in SEQ ID NO 65278
  misc_feature (1)..(1024): Ortholog of  Ceres SEQ ID NO 15180098 as cited in SEQ ID NO 0
aaagatctacaaacaaagcttcttcttcttcttggtgtcatcaagattttccaaaaatgtctcaacaccaaaaaatctatccggtccaagatccagaagccgcaacagcgcgtccaacagctcctttggttcctcgtggttcctctagatcagaacatggagacccatccaaagtccctttgaaccaaaggccacaacggttcgtgccgttggctcctccaaagaagagaagaagttgttgttgcagatgcttttgctacacgttctgctttcttttgcttcttgtcgttgcagtaggcgcatccattggtatactataccttgtctttaaaccgaagctaccggattactctattgaccggttacagctcacccggtttgcactgaaccaagactcgagtttgactacggcttttaacgtgactataaccgctaagaatccgaacgagaagattggaatttattatgaagatgggagcaagattactgtgtggtacatggaacatcaactaagcaatgggtcgttgccaaaattttaccaaggacatgaaaatacgacagtgatatacgtagaaatgactggccaaacacaaaatgcatcgggtttaaggacgacattagaagagcaacaacaaagaaccgggaatataccattgagaattagagtaaaccaaccggttcgggtcaaatttgggaagttgaagctcttcgaagtaagattcttggtcagatgtggtgtatttgttgatagcttggctaccaataatgttattaagattcaaagtagtagttgcaaatttcgtcttaggttatagatccgtttttttttatataattaatatcgagatatacagagggaattttgtcagatatagtcacatactcatatatagttctcctctaaagtacattattgtgtctcagacctttgttgtataataaactgttggtttaaattaatatattaaagtatacaatactatgtacataggtggaattcaaagtatagtagttgtaagttttt

SEQ ID NO: 35068 - protein, 270 aa, Arabidopsis thaliana
  peptide (1)..(270): Ceres Seq. ID no. 12332054
RSTNKASSSSWCHQDFPKMSQHQKIYPVQDPEAATARPTAPLVPRGSSRSEHGDPSKVPLNQRPQRFVPLAPPKKRRSCCCRCFCYTFCFLLLLVVAVGASIGILYLVFKPKLPDYSIDRLQLTRFALNQDSSLTTAFNVTITAKNPNEKIGIYYEDGSKITVWYMEHQLSNGSLPKFYQGHENTTVIYVEMTGQTQNASGLRTTLEEQQQRTGNIPLRIRVNQPVRVKFGKLKLFEVRFLVRCGVFVDSLATNNVIKIQSSSCKFRLRL

SEQ ID NO: 35069 - protein, 252 aa, Arabidopsis thaliana
  peptide (1)..(252): Ceres Seq. ID no. 12332055
MSQHQKIYPVQDPEAATARPTAPLVPRGSSRSEHGDPSKVPLNQRPQRFVPLAPPKKRRSCCCRCFCYTFCFLLLLVVAVGASIGILYLVFKPKLPDYSIDRLQLTRFALNQDSSLTTAFNVTITAKNPNEKIGIYYEDGSKITVWYMEHQLSNGSLPKFYQGHENTTVIYVEMTGQTQNASGLRTTLEEQQQRTGNIPLRIRVNQPVRVKFGKLKLFEVRFLVRCGVFVDSLATNNVIKIQSSSCKFRLRL

SEQ ID NO: 35070 - DNA, 1096 bp, Arabidopsis thaliana
  misc_feature (1)..(1096): Ceres Seq. ID no. 13491503
  misc_feature (1)..(1096): Ortholog of  Ceres SEQ ID NO 15177091 as cited in SEQ ID NO 52140
  misc_feature (1)..(1096): Ortholog of  Ceres SEQ ID NO 13597324 as cited in SEQ ID NO 64842
  misc_feature (1)..(1096): Ortholog of  Ceres SEQ ID NO 13658672 as cited in SEQ ID NO 66627
atgagtagccgatggaatcgtacgatctacgttgggaatttgcctggagatattcgcaagtgtgaggttgaagatctcttctacaagtatggaccaattgtggacattgatttgaagattccaccgagacctcctggttatgcctttgtcgagtttgaagatcctcgtgatgcagacgatgcaatttatggacgtgatggttatgattttgatgggtgtcgacttcgggttgagattgcacatggtggtcgtagattttcaccatcagttgataggtacagcagcagctacagtgcgagccgtgcaccttcaagacgctctgactaccgcgtgcttgtgaccggattaccgccttctgcttcgtggcaggaccttaaggatcacatgcgcaaagctggagatgtctgcttctctgaagttttccctgaccgtaaaggcatgtctggggttgtggattatagcaactatgatgatatgaagtacgcaataaggaaacttgatgccactgaatttcgaaatgctttctctagtgcttatatacgggtgagggaatatgagtcgaggagtgtgagtcgaagcccagatgattctaaaagctatagaagcaggagtcggagccgtggtccaagctgtagctatagtagcaagagcaggagtgtgtcacctgctagatccatttccccgcgttcacggccccttagtcgttctcgctcgctatacagctctgtctcaaggtcccaatcaagatcaaaatcaagatcaagatcaagatcgaattctccagtttcacctgtgatatctggttgaaaatgaaaactggccactggctgtacccgaatcgtctcaagcttctcaggctccactgctaatagaatttgattccgatttgggattattatactggtcttcttgtatgggacgaccaatatgtctttctagttttagttgtgaacctggaattggtctgttattgtgtcattaaaaagccggaaactctgtctcggctgcataataaagttcatcagacattgtgttgggtgtggtgaggtttttccatacatatacatttacattacaactactggtgtcttttatg

SEQ ID NO: 35071 - protein, 268 aa, Arabidopsis thaliana
  peptide (1)..(268): Ceres Seq. ID no. 13491504
MSSRWNRTIYVGNLPGDIRKCEVEDLFYKYGPIVDIDLKIPPRPPGYAFVEFEDPRDADDAIYGRDGYDFDGCRLRVEIAHGGRRFSPSVDRYSSSYSASRAPSRRSDYRVLVTGLPPSASWQDLKDHMRKAGDVCFSEVFPDRKGMSGVVDYSNYDDMKYAIRKLDATEFRNAFSSAYIRVREYESRSVSRSPDDSKSYRSRSRSRGPSCSYSSKSRSVSPARSISPRSRPLSRSRSLYSSVSRSQSRSKSRSRSRSNSPVSPVISG

SEQ ID NO: 35072 - protein, 140 aa, Arabidopsis thaliana
  peptide (1)..(140): Ceres Seq. ID no. 13491505
MRKAGDVCFSEVFPDRKGMSGVVDYSNYDDMKYAIRKLDATEFRNAFSSAYIRVREYESRSVSRSPDDSKSYRSRSRSRGPSCSYSSKSRSVSPARSISPRSRPLSRSRSLYSSVSRSQSRSKSRSRSRSNSPVSPVISG

SEQ ID NO: 35073 - DNA, 744 bp, Arabidopsis thaliana
  misc_feature (1)..(744): Ceres Seq. ID no. 12698218
  misc_feature (1)..(744): Ortholog of  Ceres SEQ ID NO 13661521 as cited in SEQ ID NO 61309
acttggaatttgagtgaaaaccataagatgggttttagagcactgcctcttcaacacagcagtgggttcatctccacgaccaaagtatccatctcaagaacctcgcccaggattttccggaaccctagatgggtcgttgtctcagcaaagcaagagaaagatgaggataagaagaagaatgaagaggagacttcgttgtttactcaattaacggatgccttggacttctcacaagttcgatcggagaaagacgctgagcttctctacgaggctcgagaagccaccaaatctggtcgcaagatgacccaagaacagtatggggcattgaggagaaaaatcggaggaacatacaaggacttttttaaatcctacgttgaagtggatgggcaatatgtggaggagggatgggtggacaaaacatgtaagatatgcaaaaaggacacaaagggtgaggcaagacaagtggacaagttagggagatatgctcatgtctcttgtcttcaaaatcctccctctggaaatttcttcaccagactcttctctagatgatgatgatcaatttcccaaatcatatgaatgtgtttgcttgtaactaaattactcttgaaattttgtgtgtatttttatagaaatcgaaattcgttctacataccaaaacaaacatcacggttatttgggatcttgttaaacaagagacagaagtggatgtatacatttttggtttaaatgttttcaagtttttat

SEQ ID NO: 35074 - protein, 182 aa, Arabidopsis thaliana
  peptide (1)..(182): Ceres Seq. ID no. 12698219
TWNLSENHKMGFRALPLQHSSGFISTTKVSISRTSPRIFRNPRWVVVSAKQEKDEDKKKNEEETSLFTQLTDALDFSQVRSEKDAELLYEAREATKSGRKMTQEQYGALRRKIGGTYKDFFKSYVEVDGQYVEEGWVDKTCKICKKDTKGEARQVDKLGRYAHVSCLQNPPSGNFFTRLFSR

SEQ ID NO: 35075 - protein, 173 aa, Arabidopsis thaliana
  peptide (1)..(173): Ceres Seq. ID no. 12698220
MGFRALPLQHSSGFISTTKVSISRTSPRIFRNPRWVVVSAKQEKDEDKKKNEEETSLFTQLTDALDFSQVRSEKDAELLYEAREATKSGRKMTQEQYGALRRKIGGTYKDFFKSYVEVDGQYVEEGWVDKTCKICKKDTKGEARQVDKLGRYAHVSCLQNPPSGNFFTRLFSR

SEQ ID NO: 35076 - DNA, 852 bp, Arabidopsis thaliana
  misc_feature (1)..(852): Ceres Seq. ID no. 13645724
  misc_feature (1)..(852): Ortholog of  Ceres SEQ ID NO 14304209 as cited in SEQ ID NO 56460
  misc_feature (1)..(852): Ortholog of  Ceres SEQ ID NO 12615635 as cited in SEQ ID NO 63133
  misc_feature (1)..(852): Ortholog of  Ceres SEQ ID NO 12586351 as cited in SEQ ID NO 64028
  misc_feature (1)..(852): Ortholog of  Ceres SEQ ID NO 14301603 as cited in SEQ ID NO 67721
  misc_feature (1)..(852): Ortholog of  Ceres SEQ ID NO 15177482 as cited in SEQ ID NO 0
atacttagacacaaaacaaacaaacaaaaatatcttagtgagcttaatcaagaacagcaatggcagacgaggtgattcttcttgatttctggccgagcatgtttggaatgaggacgaggattgctttagaagagaaaaatgtcaaattcgattacagagaacaagatctgtggaacaaaagcccgattctcctcgagatgaatccggttcataagaaaataccggttctcatccacaatggtaatccggtatgtgaatcactcatccagatcgaatacatcgacgaagtttggcctagcaaaaccccacttcttccttctgatccttaccaaagagctcaggccaaattttggggagatttcattgataagaaggtgtatgcttcagcgaggttgatttggggagctaaaggcgaagagcatgaggcggggaagaaggagttcatcgagatactcaagacactagagtctgagcttggagacaagacttactttggaggtgaaacattcggttatgttgatatagctctcattggattttacagttggtttgaagcgtatgagaagtttgggagtttcagcattgaagccgagtgtccaaaactgattgcttggggtaaaaggtgtgtggagagagagagtgtggctaagtctcttcctgattcggagaagatcattaagttcgttcctgagctaaggaaaaaacttgggatcgaaatcgaatagattctacgctgatatgtttttatgtttctgtttgtgttgctgtttctgctctgtttcatgttctgtttcttccttgtttcggaaatctttaagataatgtcatcaaaataatacaaatatttactcg

SEQ ID NO: 35077 - protein, 221 aa, Arabidopsis thaliana
  peptide (1)..(221): Ceres Seq. ID no. 13645725
MADEVILLDFWPSMFGMRTRIALEEKNVKFDYREQDLWNKSPILLEMNPVHKKIPVLIHNGNPVCESLIQIEYIDEVWPSKTPLLPSDPYQRAQAKFWGDFIDKKVYASARLIWGAKGEEHEAGKKEFIEILKTLESELGDKTYFGGETFGYVDIALIGFYSWFEAYEKFGSFSIEAECPKLIAWGKRCVERESVAKSLPDSEKIIKFVPELRKKLGIEIE

SEQ ID NO: 35078 - protein, 208 aa, Arabidopsis thaliana
  peptide (1)..(208): Ceres Seq. ID no. 13645726
MFGMRTRIALEEKNVKFDYREQDLWNKSPILLEMNPVHKKIPVLIHNGNPVCESLIQIEYIDEVWPSKTPLLPSDPYQRAQAKFWGDFIDKKVYASARLIWGAKGEEHEAGKKEFIEILKTLESELGDKTYFGGETFGYVDIALIGFYSWFEAYEKFGSFSIEAECPKLIAWGKRCVERESVAKSLPDSEKIIKFVPELRKKLGIEIE

SEQ ID NO: 35079 - protein, 205 aa, Arabidopsis thaliana
  peptide (1)..(205): Ceres Seq. ID no. 13645727
MRTRIALEEKNVKFDYREQDLWNKSPILLEMNPVHKKIPVLIHNGNPVCESLIQIEYIDEVWPSKTPLLPSDPYQRAQAKFWGDFIDKKVYASARLIWGAKGEEHEAGKKEFIEILKTLESELGDKTYFGGETFGYVDIALIGFYSWFEAYEKFGSFSIEAECPKLIAWGKRCVERESVAKSLPDSEKIIKFVPELRKKLGIEIE

SEQ ID NO: 35080 - DNA, 800 bp, Arabidopsis thaliana
  misc_feature (1)..(800): Ceres Seq. ID no. 12344997
  misc_feature (1)..(800): Ortholog of  Ceres SEQ ID NO 13595495 as cited in SEQ ID NO 56624
  misc_feature (1)..(800): Ortholog of  Ceres SEQ ID NO 12608406 as cited in SEQ ID NO 58017
  misc_feature (1)..(800): Ortholog of  Ceres SEQ ID NO 13599397 as cited in SEQ ID NO 0
attcattatataggcgtatatttcggaattctaagttttgttgctacgatcgagccagcgttctgtttctgtacgtctctctgggtaaagaaaaaatgaaggacgaaacgggaaaccctctgcatatcaagtctttgaatcacatctctcttctctgtcgatccgtggaggaatccattagcttttaccaaaacgttttagggttcctccctattcgcagacctgactcttttgatttcgatggcgcgtggttgtttggacatggaattgggattcatcttcttcaatctcctgaacctgagaaattactcaagaaaacagagattaatcccaaggataatcacatttctttccagtgcgaaagcatggaagcagtggagaagaagctcaaggagatggagatagagtatgtgagagcagtggttgaagaaggtggcatccaagtggaccaactcttcttccacgaccctgatgccttcatgatcgagatatgcaactgcgatagcctccccgttatccctctcgctggagaaatggctcgttcatgctctcgacttaatatccgccagctcgttcagccaactcagatccacccctagttctctctgtcttccctaatttctgttttcgtaaataatttcaagtgtccatgtgattgtctctttgattgcgtgtgaatataattgcatgtaataagacagctagtggtaagttgatgtgattcctcaaccgggaaaatgaccatttgcttcacactctagtctctctctaccattacttgagataccaaactctctctc

SEQ ID NO: 35081 - protein, 198 aa, Arabidopsis thaliana
  peptide (1)..(198): Ceres Seq. ID no. 12344998
SLYRRIFRNSKFCCYDRASVLFLYVSLGKEKMKDETGNPLHIKSLNHISLLCRSVEESISFYQNVLGFLPIRRPDSFDFDGAWLFGHGIGIHLLQSPEPEKLLKKTEINPKDNHISFQCESMEAVEKKLKEMEIEYVRAVVEEGGIQVDQLFFHDPDAFMIEICNCDSLPVIPLAGEMARSCSRLNIRQLVQPTQIHP

SEQ ID NO: 35082 - protein, 167 aa, Arabidopsis thaliana
  peptide (1)..(167): Ceres Seq. ID no. 12344999
MKDETGNPLHIKSLNHISLLCRSVEESISFYQNVLGFLPIRRPDSFDFDGAWLFGHGIGIHLLQSPEPEKLLKKTEINPKDNHISFQCESMEAVEKKLKEMEIEYVRAVVEEGGIQVDQLFFHDPDAFMIEICNCDSLPVIPLAGEMARSCSRLNIRQLVQPTQIHP

SEQ ID NO: 35083 - DNA, 1324 bp, Arabidopsis thaliana
  misc_feature (1)..(1324): Ceres Seq. ID no. 13645934
  misc_feature (1)..(1324): Ortholog of  Ceres SEQ ID NO 13595414 as cited in SEQ ID NO 56539
  misc_feature (1)..(1324): Ortholog of  Ceres SEQ ID NO 14314396 as cited in SEQ ID NO 60048
cattattcacttaagtatatagtagcttccataagagtcttagttctaactataaatacacatatctcactctctctgatctccgcttctcttcgccaacaaatgtcgaccgctcctctctccggcttctttctcacttcactttctccttctcaatcttctctccagaaactctctcttcgtacttcttccaccgtcgcttgcctcccacccgcctcttcttcttcctcatcttcctcctcctcgtcttcccgttccgttccaacgcttatccgtaacgagccagtttttgccgctcctgctcctatcattgccccttattggagtgaagagatgggaaccgaagcatacgacgaggctattgaagctctcaagaagcttctcatcgagaaggaagagctaaagacggttgcagcggcaaaggtggagcagatcacagcggctcttcagacaggtacttcatccgacaagaaagctttcgaccccgtcgaaaccattaagcagggcttcatcaaattcaagaaggagaaatacgaaaccaaccctgctttgtacggtgagctcgcaaagggtcaaagtcctaagtacatggtgtttgcttgttcagactcacgtgtgtgtccatcacacgttctggactttcagccaggagatgccttcgtggtccgtaacatagccaacatggttcctcctttcgacaaggtcaaatacggtggcgttggagcagccattgaatacgcggtcttgcaccttaaggtggagaacattgtggtgataggacacagtgcatgtggtgggatcaaagggcttatgtctttccccttagatggaaacaactccactgactttatagaggactgggtcaaaatctgtttaccagccaagtcaaaggttatatcagaacttggagattcagcctttgaagatcaatgtggccgatgtgaaagggaggcagtgaatgtttcactagcaaacctattgacatatccatttgtgagagaaggacttgtgaagggaacacttgctttgaagggaggctactatgacttcgtcaagggtgcttttgagctttggggacttgaatttggcctctccgaaactagctctgtatgaaccaatccatcatcatcatcatcatcatgaccatccatcatcatcatcattattatcatcgtatataatatatatctaccccatatgtaatttgtaatgtgcctttgactgtgatgagttatctctccctctctaccaactttcttcatatatataaaacaaaaaggaaaagcagatgatatagaccaaaaaaaaaaaaaaaaaatatcga

SEQ ID NO: 35084 - protein, 370 aa, Arabidopsis thaliana
  peptide (1)..(370): Ceres Seq. ID no. 13645935
HYSLKYIVASIRVLVLTINTHISLSLISASLRQQMSTAPLSGFFLTSLSPSQSSLQKLSLRTSSTVACLPPASSSSSSSSSSSSRSVPTLIRNEPVFAAPAPIIAPYWSEEMGTEAYDEAIEALKKLLIEKEELKTVAAAKVEQITAALQTGTSSDKKAFDPVETIKQGFIKFKKEKYETNPALYGELAKGQSPKYMVFACSDSRVCPSHVLDFQPGDAFVVRNIANMVPPFDKVKYGGVGAAIEYAVLHLKVENIVVIGHSACGGIKGLMSFPLDGNNSTDFIEDWVKICLPAKSKVISELGDSAFEDQCGRCEREAVNVSLANLLTYPFVREGLVKGTLALKGGYYDFVKGAFELWGLEFGLSETSSV

SEQ ID NO: 35085 - protein, 336 aa, Arabidopsis thaliana
  peptide (1)..(336): Ceres Seq. ID no. 13645936
MSTAPLSGFFLTSLSPSQSSLQKLSLRTSSTVACLPPASSSSSSSSSSSSRSVPTLIRNEPVFAAPAPIIAPYWSEEMGTEAYDEAIEALKKLLIEKEELKTVAAAKVEQITAALQTGTSSDKKAFDPVETIKQGFIKFKKEKYETNPALYGELAKGQSPKYMVFACSDSRVCPSHVLDFQPGDAFVVRNIANMVPPFDKVKYGGVGAAIEYAVLHLKVENIVVIGHSACGGIKGLMSFPLDGNNSTDFIEDWVKICLPAKSKVISELGDSAFEDQCGRCEREAVNVSLANLLTYPFVREGLVKGTLALKGGYYDFVKGAFELWGLEFGLSETSSV

SEQ ID NO: 35086 - protein, 259 aa, Arabidopsis thaliana
  peptide (1)..(259): Ceres Seq. ID no. 13645937
MGTEAYDEAIEALKKLLIEKEELKTVAAAKVEQITAALQTGTSSDKKAFDPVETIKQGFIKFKKEKYETNPALYGELAKGQSPKYMVFACSDSRVCPSHVLDFQPGDAFVVRNIANMVPPFDKVKYGGVGAAIEYAVLHLKVENIVVIGHSACGGIKGLMSFPLDGNNSTDFIEDWVKICLPAKSKVISELGDSAFEDQCGRCEREAVNVSLANLLTYPFVREGLVKGTLALKGGYYDFVKGAFELWGLEFGLSETSSV

SEQ ID NO: 35087 - DNA, 1202 bp, Arabidopsis thaliana
  misc_feature (1)..(1202): Ceres Seq. ID no. 12325085
  misc_feature (1)..(1202): Ortholog of  Ceres SEQ ID NO 13637939 as cited in SEQ ID NO 54930
  misc_feature (1)..(1202): Ortholog of  Ceres SEQ ID NO 13584164 as cited in SEQ ID NO 63681
atcattctcggtttaactgtgaaacacataataaaacaaagagaaagagatataatatgggtgggtgggcaatcgcagtacacggtggtgccggtatcgaccctaatcttccggcagagagacaagaagaggcgaaacagcttttaactcgttgtctcaacctcggcataatagctttgcgttccaatgtttccgccattgacgtcgttgagctcgtcattagagaattggagacggatcctctgtttaattcaggccgtggatctgctttgacggagaaaggaacggttgagatggaagctagcattatggacggtacgaagagacgatgcggtgccgtttcggggataaccaccgtgaaaaatcctatatctcttgctcgtctcgtcatggacaaatctccccactcttaccttgctttctcaggtgcagaggatttcgcccgcaaacagggagttgaaattgtggacaacgagtactttgtcacggacgacaacgtaggaatgctcaagttggccaaggaagctaactccatcttgtttgattaccggattccgccgatgggatgtgccggcgcagctgcgaccgacagtccaatccaaatgaacggtcttccgatcagcatttacgcaccggagacagtcgggtgcgttgtggttgacgggaaaggacattgtgccgccgggacatccacgggtggtttaatgaacaagatgatgggaaggattggtgactcgccgctgataggagccgggacgtatgcgtcggagttttgtggtgtgtcgtgtaccggagaaggagaagccattataagagcaaccctagctcgtgatgtgtcagctgttatggagtataaaggacttaacctccaagaagcggttgattacgtcatcaagcatcgacttgacgaagggttcgctggactcattgctgtctcgaataaaggagaggtggtttgtggttttaactctaatgggatgttcaggggatgtgcaactgaggatggattcatggaggttgctatttgggagtgagaaatattttagattaagaaaatgtcttactagtatttaatcagtcatcgctctattaatttggttattcattatcataaagctggagtagtaaatttagttctgtcgttatcaccagtcctatattgatttgtgtttaatgcggtttcaaatggttagttcgtgttt

SEQ ID NO: 35088 - protein, 343 aa, Arabidopsis thaliana
  peptide (1)..(343): Ceres Seq. ID no. 12325086
HSRFNCETHNKTKRKRYNMGGWAIAVHGGAGIDPNLPAERQEEAKQLLTRCLNLGIIALRSNVSAIDVVELVIRELETDPLFNSGRGSALTEKGTVEMEASIMDGTKRRCGAVSGITTVKNPISLARLVMDKSPHSYLAFSGAEDFARKQGVEIVDNEYFVTDDNVGMLKLAKEANSILFDYRIPPMGCAGAAATDSPIQMNGLPISIYAPETVGCVVVDGKGHCAAGTSTGGLMNKMMGRIGDSPLIGAGTYASEFCGVSCTGEGEAIIRATLARDVSAVMEYKGLNLQEAVDYVIKHRLDEGFAGLIAVSNKGEVVCGFNSNGMFRGCATEDGFMEVAIWE

SEQ ID NO: 35089 - protein, 325 aa, Arabidopsis thaliana
  peptide (1)..(325): Ceres Seq. ID no. 12325087
MGGWAIAVHGGAGIDPNLPAERQEEAKQLLTRCLNLGIIALRSNVSAIDVVELVIRELETDPLFNSGRGSALTEKGTVEMEASIMDGTKRRCGAVSGITTVKNPISLARLVMDKSPHSYLAFSGAEDFARKQGVEIVDNEYFVTDDNVGMLKLAKEANSILFDYRIPPMGCAGAAATDSPIQMNGLPISIYAPETVGCVVVDGKGHCAAGTSTGGLMNKMMGRIGDSPLIGAGTYASEFCGVSCTGEGEAIIRATLARDVSAVMEYKGLNLQEAVDYVIKHRLDEGFAGLIAVSNKGEVVCGFNSNGMFRGCATEDGFMEVAIWE

SEQ ID NO: 35090 - protein, 246 aa, Arabidopsis thaliana
  peptide (1)..(246): Ceres Seq. ID no. 12325088
MEASIMDGTKRRCGAVSGITTVKNPISLARLVMDKSPHSYLAFSGAEDFARKQGVEIVDNEYFVTDDNVGMLKLAKEANSILFDYRIPPMGCAGAAATDSPIQMNGLPISIYAPETVGCVVVDGKGHCAAGTSTGGLMNKMMGRIGDSPLIGAGTYASEFCGVSCTGEGEAIIRATLARDVSAVMEYKGLNLQEAVDYVIKHRLDEGFAGLIAVSNKGEVVCGFNSNGMFRGCATEDGFMEVAIWE

SEQ ID NO: 35091 - DNA, 1100 bp, Arabidopsis thaliana
  misc_feature (1)..(1100): Ceres Seq. ID no. 12327631
  misc_feature (1)..(1100): Ortholog of  Ceres SEQ ID NO 13660172 as cited in SEQ ID NO 67576
ataagaagggcttagggttcacttcagatctgtctttgaacattgctactctcaagtgatcaaattaactccgtcgcaggtgatgaggagatacagtccgccttattacagtcctccgaggagaggatacggtggtcgaggtagaagtcctcctcctcctcctcctcgacgtggatatggtggtggtggtggtggtggtggacgtagaggatctagccatggaagtctcttggttcgtaacattcctcttgattgcagaccagaagagcttcgtgagccctttgagaggtttggacctgtgagagatgtctatatccccagagactattactcagggcaaccgcgggggtttgcgtttgtggagtttgttgatgcatatgatgctggggaggctcaaagaagcatgaacaggagaagctttgctggaagagagataacggtggttgttgcttcagagtctaggaaaaggcctgaagagatgcgtgtgaagactaggactcgtagtagggaaccttcaggctccagggatcgttctcatggacggtctcgttcacgttcaatctctcgatcacgttctccacgtcgtccgtcagattctagaagcagataccgatcaaggtcttactctcctgcaccaagacgaagaggaggtcctcctcgtggggaagaagatgaaaattacagtcgtaggtcctactcccctggctatgaaggtgctgctgctgctgctccagatcgggacagaaatggagacaatgagattagagaaaaaccgggctatgaagcagaggatagacgtcgtggtggaagagcagtttcaaggtcgccatcaggatccaggtccaggtctgtggaggtatctccaagatgaaacttatgtgaagaagtggccgaccaaaactttgtgcaacgctttatgggttttgcatttctctagtagtgcgtctctgtgtctttaaaaactccttactctggcttgtcaaagatattttgtcttgtgatgtgatgttacttgaaatcggtttcggtttatgggtcttattataaaattgtatgaagaagattggttatgcttttgatgtgagacaggtttaaaaccc

SEQ ID NO: 35092 - protein, 262 aa, Arabidopsis thaliana
  peptide (1)..(262): Ceres Seq. ID no. 12327632
MRRYSPPYYSPPRRGYGGRGRSPPPPPPRRGYGGGGGGGGRRGSSHGSLLVRNIPLDCRPEELREPFERFGPVRDVYIPRDYYSGQPRGFAFVEFVDAYDAGEAQRSMNRRSFAGREITVVVASESRKRPEEMRVKTRTRSREPSGSRDRSHGRSRSRSISRSRSPRRPSDSRSRYRSRSYSPAPRRRGGPPRGEEDENYSRRSYSPGYEGAAAAAPDRDRNGDNEIREKPGYEAEDRRRGGRAVSRSPSGSRSRSVEVSPR

SEQ ID NO: 35093 - protein, 155 aa, Arabidopsis thaliana
  peptide (1)..(155): Ceres Seq. ID no. 12327633
MNRRSFAGREITVVVASESRKRPEEMRVKTRTRSREPSGSRDRSHGRSRSRSISRSRSPRRPSDSRSRYRSRSYSPAPRRRGGPPRGEEDENYSRRSYSPGYEGAAAAAPDRDRNGDNEIREKPGYEAEDRRRGGRAVSRSPSGSRSRSVEVSPR

SEQ ID NO: 35094 - protein, 140 aa, Arabidopsis thaliana
  peptide (1)..(140): Ceres Seq. ID no. 12327634
MDGLVHVQSLDHVLHVVRQILEADTDQGLTLLHQDEEEVLLVGKKMKITVVGPTPLAMKVLLLLLQIGTEMETMRLEKNRAMKQRIDVVVEEQFQGRHQDPGPGLWRYLQDETYVKKWPTKTLCNALWVLHFSSSASLCL

SEQ ID NO: 35095 - DNA, 1170 bp, Arabidopsis thaliana
  misc_feature (1)..(1170): Ceres Seq. ID no. 12335601
  misc_feature (1)..(1170): Ortholog of  Ceres SEQ ID NO 15173003 as cited in SEQ ID NO 51318
  misc_feature (1)..(1170): Ortholog of  Ceres SEQ ID NO 15224290 as cited in SEQ ID NO 62810
  misc_feature (1)..(1170): Ortholog of  Ceres SEQ ID NO 14302267 as cited in SEQ ID NO 68607
aagtaaagcagagagaagagcaagggagaggtactaaaaatggcggtgacggaggaggagaagaagcggaattcaacggttgagatctccggattacgtttcacgtatcctggaatcgacggtcatccaccaccgggatcgaaaccacttattgaagatttctcaatcacgcttaattccagcgatcggtgtctcctcgtcggatctaatggcgctgggaaaacgacgattctgaagatattgggagggaaacacatggtggagccgcatatggttagggttctgggtcgctcggcgtttcatgatactggattgacctcttctggtgatctctgttatctcggtggcgagtggaggcgtgatgttgcatttgcaggatttgaagttccgatacaaatggacatttcggcggagaagatgatatttggagtggctggtattgatcctcagagaagagatgagttgatcaaggtgttggatatcgacatctcatggagactgcacaaggtatccgatggccaaagaagacgtgtacagatctgtatgggactcctgaagccattcaaggttctccttttggatgaaataactgttgatcttgacgttctcgctagagcagaccttttgaagtttctgagaaaggaatgtgaagaacgaggagcaaccataatctacgctactcatatattcgatggcttagaggactggccaacacacattgtgtatgtagcaaacggaaaattgcagttagcattgccaatggagaaagtgaaggagacaagcaagaagtcattgatgagaacagttgagagttggctgaggaaagaaagagatgaagagagaaagagaaggaaagagaggaaagctaatgggcttccagagtttgaaacacggactgaagaaagccgtgtgactggtgatccagcacggatgctgaacaatggctgggctgccgggagacttcactctacggttgcaggtggtgaggataatttcgtcttaagctcaaacagagttctaagataaattaagcaagagagacgttggagcaaaagtggaatagtaatatttttacgttatttgtttttaaccacgaataatatttctttttctttttttgaactatttgttactctgaaatatgattttttataatttatattttagttg

SEQ ID NO: 35096 - protein, 328 aa, Arabidopsis thaliana
  peptide (1)..(328): Ceres Seq. ID no. 12335602
MAVTEEEKKRNSTVEISGLRFTYPGIDGHPPPGSKPLIEDFSITLNSSDRCLLVGSNGAGKTTILKILGGKHMVEPHMVRVLGRSAFHDTGLTSSGDLCYLGGEWRRDVAFAGFEVPIQMDISAEKMIFGVAGIDPQRRDELIKVLDIDISWRLHKVSDGQRRRVQICMGLLKPFKVLLLDEITVDLDVLARADLLKFLRKECEERGATIIYATHIFDGLEDWPTHIVYVANGKLQLALPMEKVKETSKKSLMRTVESWLRKERDEERKRRKERKANGLPEFETRTEESRVTGDPARMLNNGWAAGRLHSTVAGGEDNFVLSSNRVLR

SEQ ID NO: 35097 - protein, 256 aa, Arabidopsis thaliana
  peptide (1)..(256): Ceres Seq. ID no. 12335603
MVEPHMVRVLGRSAFHDTGLTSSGDLCYLGGEWRRDVAFAGFEVPIQMDISAEKMIFGVAGIDPQRRDELIKVLDIDISWRLHKVSDGQRRRVQICMGLLKPFKVLLLDEITVDLDVLARADLLKFLRKECEERGATIIYATHIFDGLEDWPTHIVYVANGKLQLALPMEKVKETSKKSLMRTVESWLRKERDEERKRRKERKANGLPEFETRTEESRVTGDPARMLNNGWAAGRLHSTVAGGEDNFVLSSNRVLR

SEQ ID NO: 35098 - protein, 251 aa, Arabidopsis thaliana
  peptide (1)..(251): Ceres Seq. ID no. 12335604
MVRVLGRSAFHDTGLTSSGDLCYLGGEWRRDVAFAGFEVPIQMDISAEKMIFGVAGIDPQRRDELIKVLDIDISWRLHKVSDGQRRRVQICMGLLKPFKVLLLDEITVDLDVLARADLLKFLRKECEERGATIIYATHIFDGLEDWPTHIVYVANGKLQLALPMEKVKETSKKSLMRTVESWLRKERDEERKRRKERKANGLPEFETRTEESRVTGDPARMLNNGWAAGRLHSTVAGGEDNFVLSSNRVLR

SEQ ID NO: 35099 - DNA, 1353 bp, Arabidopsis thaliana
  misc_feature (1)..(1353): Ceres Seq. ID no. 13490251
  misc_feature (1)..(1353): Ortholog of  Ceres SEQ ID NO 13596581 as cited in SEQ ID NO 62420
  misc_feature (1)..(1353): Ortholog of  Ceres SEQ ID NO 13591273 as cited in SEQ ID NO 65904
  misc_feature (1)..(1353): Ortholog of  Ceres SEQ ID NO 13623086 as cited in SEQ ID NO 0
accagaaaaacacacaccaaacaaaacaaaacaaaaaacagagagatggaaaacggaaactcctccagcgacaacaaatcttcacataaaccgatccgatgcaaagcggcggttagtaggaaggctggagagccgttggtgatggaagaaatcatggtggcgccgccgcagcctttcgaggttcggattcgaatcatctgcaccgcgttatgtcacagtgacgtcactttctggaaactccaagttcctccagcctgctttccgaggatactaggccacgaggcaataggcgtagtggaaagtgttggtgaaaatgtgaaggaagtggtagaaggagacaccgtactaccaacgttcatgcctgactgtggtgactgtgttgattgcaaatctcacaaaagcaacttatgtagcaaatttcctttcaaggtatccccttggatgccaagatacgataattccagcagattcaccgacctcaatggcgaaactctctttcatttcttgaacgtctccagcttcagcgaatacacggttcttgatgtcgctaacgttgttaagattgattcttcgattcctcctagtcgtgcttgcctcctaagctgcggagtctccaccggtgttggtgctgcttgggagaccgccaaagttgaaaaaggatcaaccgttgtgattttcggacttggttctatcggattagcggttgcagagggtgcgagactttgtggtgcctctagaatcattggtgtggatataaaccctaccaaattccaagttggccagaaatttggagttaccgagtttgtaaactctatgacatgtgagaaaaaccgtgttagcgaggtgatcaatgagatgactgatgggggagcggactattgcttcgaatgtgttggaagtagttctttggttcaagaagcttatgcttgctgtagacagggatggggaaagacaataactttaggggtggacaagccgggttcacaaatatgtttagattcgtttgatgttcttcaccatgggaagattctgatgggttcgttgtttggaggtttaaaggctaaaacacacattccaattcttcttaaacgctacttgagcaatgaacttgaattggataagtttgtgacacatgagatgaaattcgaggagatcaacgacgcattccagctacttcttgaagggaaatgcatcaggtgtgtcttatggatgggctaagtgaattgacttattttatctttccatcttttgcatcaatttcatatgtttcatgtttaactatttttattggtttgtaatcaaaacaagcaaatgccaaagtgacagcaaaataaaaagtcaatgaattgtaac

SEQ ID NO: 35100 - protein, 405 aa, Arabidopsis thaliana
  peptide (1)..(405): Ceres Seq. ID no. 13490252
TRKTHTKQNKTKNREMENGNSSSDNKSSHKPIRCKAAVSRKAGEPLVMEEIMVAPPQPFEVRIRIICTALCHSDVTFWKLQVPPACFPRILGHEAIGVVESVGENVKEVVEGDTVLPTFMPDCGDCVDCKSHKSNLCSKFPFKVSPWMPRYDNSSRFTDLNGETLFHFLNVSSFSEYTVLDVANVVKIDSSIPPSRACLLSCGVSTGVGAAWETAKVEKGSTVVIFGLGSIGLAVAEGARLCGASRIIGVDINPTKFQVGQKFGVTEFVNSMTCEKNRVSEVINEMTDGGADYCFECVGSSSLVQEAYACCRQGWGKTITLGVDKPGSQICLDSFDVLHHGKILMGSLFGGLKAKTHIPILLKRYLSNELELDKFVTHEMKFEEINDAFQLLLEGKCIRCVLWMG

SEQ ID NO: 35101 - protein, 390 aa, Arabidopsis thaliana
  peptide (1)..(390): Ceres Seq. ID no. 13490253
MENGNSSSDNKSSHKPIRCKAAVSRKAGEPLVMEEIMVAPPQPFEVRIRIICTALCHSDVTFWKLQVPPACFPRILGHEAIGVVESVGENVKEVVEGDTVLPTFMPDCGDCVDCKSHKSNLCSKFPFKVSPWMPRYDNSSRFTDLNGETLFHFLNVSSFSEYTVLDVANVVKIDSSIPPSRACLLSCGVSTGVGAAWETAKVEKGSTVVIFGLGSIGLAVAEGARLCGASRIIGVDINPTKFQVGQKFGVTEFVNSMTCEKNRVSEVINEMTDGGADYCFECVGSSSLVQEAYACCRQGWGKTITLGVDKPGSQICLDSFDVLHHGKILMGSLFGGLKAKTHIPILLKRYLSNELELDKFVTHEMKFEEINDAFQLLLEGKCIRCVLWMG

SEQ ID NO: 35102 - protein, 358 aa, Arabidopsis thaliana
  peptide (1)..(358): Ceres Seq. ID no. 13490254
MEEIMVAPPQPFEVRIRIICTALCHSDVTFWKLQVPPACFPRILGHEAIGVVESVGENVKEVVEGDTVLPTFMPDCGDCVDCKSHKSNLCSKFPFKVSPWMPRYDNSSRFTDLNGETLFHFLNVSSFSEYTVLDVANVVKIDSSIPPSRACLLSCGVSTGVGAAWETAKVEKGSTVVIFGLGSIGLAVAEGARLCGASRIIGVDINPTKFQVGQKFGVTEFVNSMTCEKNRVSEVINEMTDGGADYCFECVGSSSLVQEAYACCRQGWGKTITLGVDKPGSQICLDSFDVLHHGKILMGSLFGGLKAKTHIPILLKRYLSNELELDKFVTHEMKFEEINDAFQLLLEGKCIRCVLWMG

SEQ ID NO: 35103 - DNA, 1200 bp, Arabidopsis thaliana
  misc_feature (1)..(1200): Ceres Seq. ID no. 12421496
  misc_feature (1)..(1200): Ortholog of  Ceres SEQ ID NO 15171279 as cited in SEQ ID NO 51378
  misc_feature (1)..(1200): Ortholog of  Ceres SEQ ID NO 13596816 as cited in SEQ ID NO 62287
atatcatttttcacagaatcatagaaaaatcaagaaaatgtctgaatcaaggagcttagcctcaccaccaatgttgatgattcttctcagccttgtaatagcttccttcttcaaccacacagctggacaaatcggagtatgctacgggatgctaggcgataccttgccaagtccatcggacgttgtggctctttacaaacaacaaaacatccagcgaatgcggctctacggccctgacccaggcgctcttgccgctctccgtggctctgacatcgagctcatcctcgacgttcccagttcagatcttgaacgtctcgcctccagtcaaacggaggccgacaagtgggttcaagaaaacgttcagagctacagagatggtgtcagattccggtacatcaacgttggaaatgaggtgaaaccctcagttggggggtttctcttacaagcaatgcagaacatcgagaacgcggtttctggagcagggcttgaagtcaaggtctcaacagctatagccactgacaccaccactgatacgtctcctccgtctcaaggaaggttcagggatgagtataagagctttctcgaaccagtgataggtttcttggcaagcaagcaatctcccttgctcgtgaatctctacccttacttcagctacatgggagacacggccaacatccatctagactacgctctgttcaccgcccagtccactgttgataacgatccagggtactcataccaaaacctattcgacgcaaatctcgactcggtttatgcagcattggagaaatcagggggcggatcgttggaaatcgtggtgtcggagaccggttggcccacagagggagcagtcgggacgagtgtggaaaacgcaaagacttatgttaacaatttgatacaacatgtgaagaatggatcaccgagaaggccagggaaagctatagagacttatatattcgctatgttcgatgagaataagaaggaaccaacgtatgagaagttttggggactgtttcatccagatcgacagtctaagtatgaagttaatttcaactaatccttagagacttgtgggctttttatgtaagcgtatttaaaaattgggaacttgttgtagtaataaggaataattaatgcgctttcagcgtgtagtatgttgttatttttaaggttataaatgagctgcaagcataaataagg

SEQ ID NO: 35104 - protein, 351 aa, Arabidopsis thaliana
  peptide (1)..(351): Ceres Seq. ID no. 12421497
YHFSQNHRKIKKMSESRSLASPPMLMILLSLVIASFFNHTAGQIGVCYGMLGDTLPSPSDVVALYKQQNIQRMRLYGPDPGALAALRGSDIELILDVPSSDLERLASSQTEADKWVQENVQSYRDGVRFRYINVGNEVKPSVGGFLLQAMQNIENAVSGAGLEVKVSTAIATDTTTDTSPPSQGRFRDEYKSFLEPVIGFLASKQSPLLVNLYPYFSYMGDTANIHLDYALFTAQSTVDNDPGYSYQNLFDANLDSVYAALEKSGGGSLEIVVSETGWPTEGAVGTSVENAKTYVNNLIQHVKNGSPRRPGKAIETYIFAMFDENKKEPTYEKFWGLFHPDRQSKYEVNFN

SEQ ID NO: 35105 - protein, 339 aa, Arabidopsis thaliana
  peptide (1)..(339): Ceres Seq. ID no. 12421498
MSESRSLASPPMLMILLSLVIASFFNHTAGQIGVCYGMLGDTLPSPSDVVALYKQQNIQRMRLYGPDPGALAALRGSDIELILDVPSSDLERLASSQTEADKWVQENVQSYRDGVRFRYINVGNEVKPSVGGFLLQAMQNIENAVSGAGLEVKVSTAIATDTTTDTSPPSQGRFRDEYKSFLEPVIGFLASKQSPLLVNLYPYFSYMGDTANIHLDYALFTAQSTVDNDPGYSYQNLFDANLDSVYAALEKSGGGSLEIVVSETGWPTEGAVGTSVENAKTYVNNLIQHVKNGSPRRPGKAIETYIFAMFDENKKEPTYEKFWGLFHPDRQSKYEVNFN

SEQ ID NO: 35106 - protein, 328 aa, Arabidopsis thaliana
  peptide (1)..(328): Ceres Seq. ID no. 12421499
MLMILLSLVIASFFNHTAGQIGVCYGMLGDTLPSPSDVVALYKQQNIQRMRLYGPDPGALAALRGSDIELILDVPSSDLERLASSQTEADKWVQENVQSYRDGVRFRYINVGNEVKPSVGGFLLQAMQNIENAVSGAGLEVKVSTAIATDTTTDTSPPSQGRFRDEYKSFLEPVIGFLASKQSPLLVNLYPYFSYMGDTANIHLDYALFTAQSTVDNDPGYSYQNLFDANLDSVYAALEKSGGGSLEIVVSETGWPTEGAVGTSVENAKTYVNNLIQHVKNGSPRRPGKAIETYIFAMFDENKKEPTYEKFWGLFHPDRQSKYEVNFN

SEQ ID NO: 35107 - DNA, 1991 bp, Arabidopsis thaliana
  misc_feature (1)..(1991): Ceres Seq. ID no. 13490832
  misc_feature (1)..(1991): Ortholog of  Ceres SEQ ID NO 14302828 as cited in SEQ ID NO 65549
gttgtcgccgtcgtcgtttctctcatttctgctctgttgtgctatcgtagcgtcgcgctcctttaaacgcgacggacgcagccttctctgttcatcgtttcgccggaagttttcttcagcggagatttattttcagctggttagtagttttgagtgactactgaggtaacaatggttgtagaaactatcgagaggtcttgtgagggttcaaagagaagacatgtgaacggtggagatatcgctgttccttgttcgggagaagagtgtagcaatggagatataaatgtagctcctggagtttcagcgaaaagagctagggtttctagagaaatgacgtttgaagatatttacggtgctgatgcattactcaatgatgacgatgatgaggatgatgattgtgattgggaacctgtgcaggcgcctatggagtttgtaaaatggtgttgtgtcaattgcactatgtcgaaccctggtgatatggtccactgttgtatatgcggtgagcacaaggaatctggcattttgaggcatggatatttagcgtctcccttttttaaagacactggtctcattgaagtcgaggagaaatatggaggaagctcatctgcaaccagctcgacagctgttgggttcgacgagagaatgttgctacactcagaatttgaagtgaaggcacaaccacatccagagagacctgatcgtcttcgagctatagctgctagtcttgccacagctggtgtttttcctggaagatgcttgcctatcaatgcaagggaaatcacgaaacaagaactccagatggtccacacttcagagcatgttgatgctgttgatactacaagccagcttctctatagctacttcacctctgacacatatgctaatgagtattcagcacgtgctgctagacttgcagcaggtttgtgcactgatctagctacagatattttcactggccgtgtaaaaaatggttttgctttggttagacctcccggtcatcatgctggcgtcaggcatgctatggggttttgccttcacaataatgcagccgttgctgcattagtagcacaagcagcaggggcaaagaaggtgctgattgtggactgggatgtccatcatggcaacgggacccaagagatattcgaacaaaacaaatctgtattgtacatatccttgcacagacatgagggaggaatcttctatcccggtactggagctgctgatgaggttggttctaatggtggggaaggttattgtgtaaatgttccatggagttgcggtggagttggggataaagactatatctttgcgtttcaacatgtggttctccccatagcttctgcattttctccagattttgtcatcatatctgcgggatttgatgcggctagaggagacccactaggatgctgtgatgtgactccggctggctattctcgaatgacacagatgttgggtgatctgtgtggtgggaaaatgctagttattctcgagggcggctacaatcttcgctccatatctgcttctgcaacagcagtgatcaaggtgcttctgggtgaaaatccggagaacgagttgcccatcgccaccacgccttcagtagccggcctgcaaactgttcttgatgtactgaatatccaactggagttctggccatcacttgctatcagctactccaaattactctcagagttggaagcacgtctgatcgaaaacaaaaaaaatcagatgaaaaggaaggttgttcgggttccgacatggtggaaatggggacgaaagaagcttttgtacaactttctctcggctcgtatgatttcaagatcaaagtgattttagaaagcattcttcctaatccgtcgtaggaattgtctacacttacttgtaaccctaactgatctgggggaatttattgcaattagggagctctgaacaatctttatcacttacatttggtagggttttatagaaagaacccttttaacctgcttacc

SEQ ID NO: 35108 - protein, 552 aa, Arabidopsis thaliana
  peptide (1)..(552): Ceres Seq. ID no. 13490833
MVVETIERSCEGSKRRHVNGGDIAVPCSGEECSNGDINVAPGVSAKRARVSREMTFEDIYGADALLNDDDDEDDDCDWEPVQAPMEFVKWCCVNCTMSNPGDMVHCCICGEHKESGILRHGYLASPFFKDTGLIEVEEKYGGSSSATSSTAVGFDERMLLHSEFEVKAQPHPERPDRLRAIAASLATAGVFPGRCLPINAREITKQELQMVHTSEHVDAVDTTSQLLYSYFTSDTYANEYSARAARLAAGLCTDLATDIFTGRVKNGFALVRPPGHHAGVRHAMGFCLHNNAAVAALVAQAAGAKKVLIVDWDVHHGNGTQEIFEQNKSVLYISLHRHEGGIFYPGTGAADEVGSNGGEGYCVNVPWSCGGVGDKDYIFAFQHVVLPIASAFSPDFVIISAGFDAARGDPLGCCDVTPAGYSRMTQMLGDLCGGKMLVILEGGYNLRSISASATAVIKVLLGENPENELPIATTPSVAGLQTVLDVLNIQLEFWPSLAISYSKLLSELEARLIENKKNQMKRKVVRVPTWWKWGRKKLLYNFLSARMISRSK

SEQ ID NO: 35109 - protein, 499 aa, Arabidopsis thaliana
  peptide (1)..(499): Ceres Seq. ID no. 13490834
MTFEDIYGADALLNDDDDEDDDCDWEPVQAPMEFVKWCCVNCTMSNPGDMVHCCICGEHKESGILRHGYLASPFFKDTGLIEVEEKYGGSSSATSSTAVGFDERMLLHSEFEVKAQPHPERPDRLRAIAASLATAGVFPGRCLPINAREITKQELQMVHTSEHVDAVDTTSQLLYSYFTSDTYANEYSARAARLAAGLCTDLATDIFTGRVKNGFALVRPPGHHAGVRHAMGFCLHNNAAVAALVAQAAGAKKVLIVDWDVHHGNGTQEIFEQNKSVLYISLHRHEGGIFYPGTGAADEVGSNGGEGYCVNVPWSCGGVGDKDYIFAFQHVVLPIASAFSPDFVIISAGFDAARGDPLGCCDVTPAGYSRMTQMLGDLCGGKMLVILEGGYNLRSISASATAVIKVLLGENPENELPIATTPSVAGLQTVLDVLNIQLEFWPSLAISYSKLLSELEARLIENKKNQMKRKVVRVPTWWKWGRKKLLYNFLSARMISRSK

SEQ ID NO: 35110 - protein, 468 aa, Arabidopsis thaliana
  peptide (1)..(468): Ceres Seq. ID no. 13490835
MEFVKWCCVNCTMSNPGDMVHCCICGEHKESGILRHGYLASPFFKDTGLIEVEEKYGGSSSATSSTAVGFDERMLLHSEFEVKAQPHPERPDRLRAIAASLATAGVFPGRCLPINAREITKQELQMVHTSEHVDAVDTTSQLLYSYFTSDTYANEYSARAARLAAGLCTDLATDIFTGRVKNGFALVRPPGHHAGVRHAMGFCLHNNAAVAALVAQAAGAKKVLIVDWDVHHGNGTQEIFEQNKSVLYISLHRHEGGIFYPGTGAADEVGSNGGEGYCVNVPWSCGGVGDKDYIFAFQHVVLPIASAFSPDFVIISAGFDAARGDPLGCCDVTPAGYSRMTQMLGDLCGGKMLVILEGGYNLRSISASATAVIKVLLGENPENELPIATTPSVAGLQTVLDVLNIQLEFWPSLAISYSKLLSELEARLIENKKNQMKRKVVRVPTWWKWGRKKLLYNFLSARMISRSK

SEQ ID NO: 35111 - DNA, 1339 bp, Arabidopsis thaliana
  misc_feature (1)..(1339): Ceres Seq. ID no. 12334128
  misc_feature (1)..(1339): Ortholog of  Ceres SEQ ID NO 15169655 as cited in SEQ ID NO 64922
  misc_feature (1)..(1339): Ortholog of  Ceres SEQ ID NO 13596004 as cited in SEQ ID NO 68212
agaatctgtttctttcttcacccaccaaaagtagcaaacctttgccacctaaaaatcttaccagttgggtgaaagttgccaaaatagagcttgcttttgtcgcaatcctatatttttcagattgattgttggtgggtttgtgtaaatggcggctcttttaggcagatcctgccggaaactgagttttccgagcttgactcacggagctaggagggtatcgacggaaactggaaaaccattgaatctatactctgctattaatcaagcgcttcacatcgctttggacaccgatcctcggtcttatgtctttggggaagacgttggctttggtggagtctttcgctgtacaactggtttagctgaacgattcgggaaaaaccgtgtcttcaatactcctctttgtgagcagggcattgttggatttggcattggtctagcagcaatgggtaatcgagcaattgtagagattcagtttgcagattatatatatcctgcttttgatcagattgttaatgaagctgcaaagttcagataccgaagtggtaaccaattcaactgtggaggacttacgataagagcaccatatggagcagttggtcatggtggacattaccattcacaatcccctgaagctttcttttgccatgtccctggtattaaggttgttatccctcggagtccacgagaagcaaagggactgttgttgtcatgtatccgtgatccaaatcccgttgttttcttcgaaccaaagtggctgtatcgtcaagcagtagaagaagtccctgagcatgactatatgatacctttatcagaagcagaggttataagagaaggcaatgacattacactggttggatggggagctcagcttaccgttatggaacaagcttgtctggacgcggaaaaggaaggaatatcatgtgaactgatagatctcaagacactgcttccttgggacaaagaaaccgttgaggcttcagttaaaaagactggcagacttcttataagccatgaagctcctgtaacaggaggttttggagcagagatctctgcaacaattctggaacgttgctttttgaagttagaagctccagtaagcagagtttgtggtctggatactccatttcctcttgtgtttgaaccattctacatgcccaccaagaacaagatattggatgcaatcaaatcgactgtgaattactagccgtactatctgtagtttactgtttacactaggactaatgtaatcgcatgtctttgttatcaattcgtctaatgtaacactaccgattaactttaatgaatttcaagataacgaaaacatgttataataggactg

SEQ ID NO: 35112 - protein, 352 aa, Arabidopsis thaliana
  peptide (1)..(352): Ceres Seq. ID no. 12334129
MAALLGRSCRKLSFPSLTHGARRVSTETGKPLNLYSAINQALHIALDTDPRSYVFGEDVGFGGVFRCTTGLAERFGKNRVFNTPLCEQGIVGFGIGLAAMGNRAIVEIQFADYIYPAFDQIVNEAAKFRYRSGNQFNCGGLTIRAPYGAVGHGGHYHSQSPEAFFCHVPGIKVVIPRSPREAKGLLLSCIRDPNPVVFFEPKWLYRQAVEEVPEHDYMIPLSEAEVIREGNDITLVGWGAQLTVMEQACLDAEKEGISCELIDLKTLLPWDKETVEASVKKTGRLLISHEAPVTGGFGAEISATILERCFLKLEAPVSRVCGLDTPFPLVFEPFYMPTKNKILDAIKSTVNY

SEQ ID NO: 35113 - protein, 253 aa, Arabidopsis thaliana
  peptide (1)..(253): Ceres Seq. ID no. 12334130
MGNRAIVEIQFADYIYPAFDQIVNEAAKFRYRSGNQFNCGGLTIRAPYGAVGHGGHYHSQSPEAFFCHVPGIKVVIPRSPREAKGLLLSCIRDPNPVVFFEPKWLYRQAVEEVPEHDYMIPLSEAEVIREGNDITLVGWGAQLTVMEQACLDAEKEGISCELIDLKTLLPWDKETVEASVKKTGRLLISHEAPVTGGFGAEISATILERCFLKLEAPVSRVCGLDTPFPLVFEPFYMPTKNKILDAIKSTVNY

SEQ ID NO: 35114 - DNA, 1093 bp, Arabidopsis thaliana
  misc_feature (1)..(1093): Ceres Seq. ID no. 12334332
  misc_feature (1)..(1093): Ortholog of  Ceres SEQ ID NO 12474685 as cited in SEQ ID NO 88
  misc_feature (1)..(1093): Ortholog of  Ceres SEQ ID NO 13638574 as cited in SEQ ID NO 51223
  misc_feature (1)..(1093): Ortholog of  Ceres SEQ ID NO 12610790 as cited in SEQ ID NO 56123
  misc_feature (1)..(1093): Ortholog of  Ceres SEQ ID NO 13655636 as cited in SEQ ID NO 63519
  misc_feature (1)..(1093): Ortholog of  Ceres SEQ ID NO 13655896 as cited in SEQ ID NO 64970
  misc_feature (1)..(1093): Ortholog of  Ceres SEQ ID NO 12627322 as cited in SEQ ID NO 67162
atactgggaaactctcaattctgagcagatatctacccaatcacggattgaggagagaagcaagaagaagaaatggagattacactgaacagtggcttcaaaatgccgatcatcggcttaggagtttggagaatggagaaagaagagcttcgagaccttatcatcgatgccatcaagatcggttatcgtcatctcgactgtgctgctaattataagaacgaagctgaagttggtgaggctcttacagaagcattcacgacaggtcttgtcaagagggaggatctcttcattacgactaagctatggagttcagaccatggccatgttattgaggcatgcaaagacagtctcaagaaacttcaacttgattacctcaaccttttgctcgttcatatacccatagctacaaaacacacgggaataggaacaaccgatagtgccttgggggatgatggggtattggacatagatacaacaatctctctggaaactacatggcacgacatggaaaagcttgtttccatgggtttggtccgcagcattggactcagtaactatgatgtctttctaacgagagattgtttggcttactccaagatcaaacctgcagtgaatcagatcgagacacatccttacttccaacgcgattctctagtcaaattctgccagaaacacaatatctgtgtcactgctcatactcctctgggaggtgccacagccaatgccgaatggtttggcaccgtgtcatgtctggatgacccagttctcaaagatgtggccgagaagtacaaacagacagtggcacagattgtcctgaggtggggaattcagaggaagacggtggtgataccaaagacatcgaagcctgaaagattggaagagaattttcaggttttcgacttccaactatcgaaagaggacatggaagtgatcaaaagcatgaagaggaattaccgcacgcaccaaacagccaagttttggggcattgagctctacgcttgatcacacacacacactctctctctctctatctatctatatgaataaatgaagcttaagaatataatatcagataacttcaacttttttaagg

SEQ ID NO: 35115 - protein, 309 aa, Arabidopsis thaliana
  peptide (1)..(309): Ceres Seq. ID no. 12334333
MEITLNSGFKMPIIGLGVWRMEKEELRDLIIDAIKIGYRHLDCAANYKNEAEVGEALTEAFTTGLVKREDLFITTKLWSSDHGHVIEACKDSLKKLQLDYLNLLLVHIPIATKHTGIGTTDSALGDDGVLDIDTTISLETTWHDMEKLVSMGLVRSIGLSNYDVFLTRDCLAYSKIKPAVNQIETHPYFQRDSLVKFCQKHNICVTAHTPLGGATANAEWFGTVSCLDDPVLKDVAEKYKQTVAQIVLRWGIQRKTVVIPKTSKPERLEENFQVFDFQLSKEDMEVIKSMKRNYRTHQTAKFWGIELYA

SEQ ID NO: 35116 - protein, 299 aa, Arabidopsis thaliana
  peptide (1)..(299): Ceres Seq. ID no. 12334334
MPIIGLGVWRMEKEELRDLIIDAIKIGYRHLDCAANYKNEAEVGEALTEAFTTGLVKREDLFITTKLWSSDHGHVIEACKDSLKKLQLDYLNLLLVHIPIATKHTGIGTTDSALGDDGVLDIDTTISLETTWHDMEKLVSMGLVRSIGLSNYDVFLTRDCLAYSKIKPAVNQIETHPYFQRDSLVKFCQKHNICVTAHTPLGGATANAEWFGTVSCLDDPVLKDVAEKYKQTVAQIVLRWGIQRKTVVIPKTSKPERLEENFQVFDFQLSKEDMEVIKSMKRNYRTHQTAKFWGIELYA

SEQ ID NO: 35117 - protein, 289 aa, Arabidopsis thaliana
  peptide (1)..(289): Ceres Seq. ID no. 12334335
MEKEELRDLIIDAIKIGYRHLDCAANYKNEAEVGEALTEAFTTGLVKREDLFITTKLWSSDHGHVIEACKDSLKKLQLDYLNLLLVHIPIATKHTGIGTTDSALGDDGVLDIDTTISLETTWHDMEKLVSMGLVRSIGLSNYDVFLTRDCLAYSKIKPAVNQIETHPYFQRDSLVKFCQKHNICVTAHTPLGGATANAEWFGTVSCLDDPVLKDVAEKYKQTVAQIVLRWGIQRKTVVIPKTSKPERLEENFQVFDFQLSKEDMEVIKSMKRNYRTHQTAKFWGIELYA

SEQ ID NO: 35118 - DNA, 750 bp, Arabidopsis thaliana
  misc_feature (1)..(750): Ceres Seq. ID no. 12348427
  misc_feature (1)..(750): Ortholog of  Ceres SEQ ID NO 13598422 as cited in SEQ ID NO 68856
aaaaatcttctctatcctttctcgagagaatatggatcagatcttcaacaaggttggatcctactggttaggccaaaaggctaacaagcagtttgactccgtcggcaacgatctcaactcggtgtcaacgagcattgaaggaggaacaaaatggttggtcaacaaaatcaaagggaaaatgcagaagccgttgcctgagttactaaaagaatatgatttgccgattggaatcttcccgggagatgctacaaactacgagttcgatgaagagacaaagaaactaaccgttttgatcccatcgatatgcgaagttggatacaaggattcatcagtgttgaagttcacaacaacagtaacaggacatcttgagaaaggaaagctaacagatgtggaaggaatcaagacaaaagtaatgatatgggtaaaagtgacaagcatatctacagatgcatcaaaggtctatttcactgcaggaatgaagaagagcagaagcagagatgcttatgaggttcaaagaaatggtctccgagtcgataaattctaacacctgtctgtgttctgtctggttccaaagtttcaagcttttccatttacgttttggttttgatttaaagcctcctactgtgagtatacatcaacttatttataaatctgatcataacttcaatatggccggagcaattctactttgttctttttttttccaattgtaaagaactactattcgtgtgctcaatgatttggtcttac

SEQ ID NO: 35119 - protein, 180 aa, Arabidopsis thaliana
  peptide (1)..(180): Ceres Seq. ID no. 12348428
KIFSILSRENMDQIFNKVGSYWLGQKANKQFDSVGNDLNSVSTSIEGGTKWLVNKIKGKMQKPLPELLKEYDLPIGIFPGDATNYEFDEETKKLTVLIPSICEVGYKDSSVLKFTTTVTGHLEKGKLTDVEGIKTKVMIWVKVTSISTDASKVYFTAGMKKSRSRDAYEVQRNGLRVDKF

SEQ ID NO: 35120 - protein, 170 aa, Arabidopsis thaliana
  peptide (1)..(170): Ceres Seq. ID no. 12348429
MDQIFNKVGSYWLGQKANKQFDSVGNDLNSVSTSIEGGTKWLVNKIKGKMQKPLPELLKEYDLPIGIFPGDATNYEFDEETKKLTVLIPSICEVGYKDSSVLKFTTTVTGHLEKGKLTDVEGIKTKVMIWVKVTSISTDASKVYFTAGMKKSRSRDAYEVQRNGLRVDKF

SEQ ID NO: 35121 - protein, 121 aa, Arabidopsis thaliana
  peptide (1)..(121): Ceres Seq. ID no. 12348431
MQKPLPELLKEYDLPIGIFPGDATNYEFDEETKKLTVLIPSICEVGYKDSSVLKFTTTVTGHLEKGKLTDVEGIKTKVMIWVKVTSISTDASKVYFTAGMKKSRSRDAYEVQRNGLRVDKF

SEQ ID NO: 35122 - DNA, 1259 bp, Arabidopsis thaliana
  misc_feature (1)..(1259): Ceres Seq. ID no. 13489103
  misc_feature (1)..(1259): Ortholog of  Ceres SEQ ID NO 15225196 as cited in SEQ ID NO 63947
ttgagaagaagaagacgaagcagaggaatctagggtttatgctacattgaagcaaagatggttacgagcagcgatcaaatccaaaatggttctgaagagcaatcaaaaagatcagagatttacacatacgaagcaccatggcagatctacgcaatgaactggagcattcgtcgagacaagaagtatcggctcgcaatcacaagcctcatcgagcaatatccgaatcgcgtcgaaattgttcagcttgatgaatcaaatggtgagattcgttcagatccaaatctctgcttcgaacatccttacccaccaacgaaaaccagtttcatacccgataaagaatgtcaaagacccgatcttttagctacttctagtgatttccttcgtttatggcgaatctctgatgatgaatctcgtgttgagcttaagtcttgtcttagtagtgataagaatagtgagtttagtggtccaatcacttcatttgattggaatgaagctgagcctagacgaattggtacttctagtattgataccacttgtactatttgggatatagagcgtgaagttgttgatacccagcttattgctcatgataaagaggtttatgacattgcttggggtggtgttggtgtctttgcctctgtctcagaggatggttccgttagagtgtttgatctccgtgataaggagcattcgacgattatctacgagagtggtgagcctagtactcctttggtgcgacttagttggaacaagcaggatccgaggtatatggctactgttatcatgggcagtgctaaaattgttgtgttggatattcggtttccggctcttcctgtcgtggagcttcagcgacatcaggctagtgtcaatgctatagcttgggctcctcatagctcttcccatatctgctccgctggagatgattctcaggcgttgatttgggatatatcttccatgggacagcatgttgaaggtggtctggatccgattctagcttacacagccggcgctgaggttgagcagcttcagtggtcatcttctcagcctgattgggttgccattgccttctctaacaagctgcagattctccgggtctgattatgttttacagatttctgttggatacttggatgtaaaaactcgttgctattgttgattaatgatcttttgatctctgactctaagcctcattgagtttcctttcatagtatggtctgtgtaggaactatgtaccttcaaaattgtgaataactagcttt

SEQ ID NO: 35123 - protein, 346 aa, Arabidopsis thaliana
  peptide (1)..(346): Ceres Seq. ID no. 13489104
MVTSSDQIQNGSEEQSKRSEIYTYEAPWQIYAMNWSIRRDKKYRLAITSLIEQYPNRVEIVQLDESNGEIRSDPNLCFEHPYPPTKTSFIPDKECQRPDLLATSSDFLRLWRISDDESRVELKSCLSSDKNSEFSGPITSFDWNEAEPRRIGTSSIDTTCTIWDIEREVVDTQLIAHDKEVYDIAWGGVGVFASVSEDGSVRVFDLRDKEHSTIIYESGEPSTPLVRLSWNKQDPRYMATVIMGSAKIVVLDIRFPALPVVELQRHQASVNAIAWAPHSSSHICSAGDDSQALIWDISSMGQHVEGGLDPILAYTAGAEVEQLQWSSSQPDWVAIAFSNKLQILRV

SEQ ID NO: 35124 - protein, 314 aa, Arabidopsis thaliana
  peptide (1)..(314): Ceres Seq. ID no. 13489105
MNWSIRRDKKYRLAITSLIEQYPNRVEIVQLDESNGEIRSDPNLCFEHPYPPTKTSFIPDKECQRPDLLATSSDFLRLWRISDDESRVELKSCLSSDKNSEFSGPITSFDWNEAEPRRIGTSSIDTTCTIWDIEREVVDTQLIAHDKEVYDIAWGGVGVFASVSEDGSVRVFDLRDKEHSTIIYESGEPSTPLVRLSWNKQDPRYMATVIMGSAKIVVLDIRFPALPVVELQRHQASVNAIAWAPHSSSHICSAGDDSQALIWDISSMGQHVEGGLDPILAYTAGAEVEQLQWSSSQPDWVAIAFSNKLQILRV

SEQ ID NO: 35125 - DNA, 1876 bp, Arabidopsis thaliana
  misc_feature (1)..(1876): Ceres Seq. ID no. 12600465
  misc_feature (1)..(1876): Ortholog of  Ceres SEQ ID NO 15171626 as cited in SEQ ID NO 57201
acgaacgcatctcattgcttcatcattaccaaatcatcaacttaatcgtttctctcaaatttagggttttctcttttctcgaaagtcttgcggttttctgaatcatctctatctggtttgagggtttcgtttgatatctggagaaaggggtttctggaaacaaggagttcataattcgcgatcttgatctatcgatcttcatttatatataaaagcgtgaatgagattatgatggagtcgaaaggtggtaaaaagaagtccagcagtagtagttccttattttacgaagctcccctcggttacagcattgaagacgttcgtccaaacggtggaatcaagaaattcaaatcttctgtctactcaaactgctccaagaggccatcctgagtaccagcgtgcaccgatcttcataatatagttatagctttctttactttccagtttataattttcttctttcaaagctccttttctgctggttcccggatccaatcgttctctcctcctactacaagtcctgtcgctcacacaacaaggcgagatggccttatctgcaatcggtttcgaaggttacgagaaacggctcgaggtgactttctttgagccaagcatctttcaagactccaagggactgggactccgtgctctgaccaagtcccagcttgatgaaattcttacacctgctgcatgcacgatcgtttcatctctctccaacgatcaattggactcttacgtactctctgagtccagcttctttgtctacccctacaaagtcatcatcaagacttgcggtaccactaagctcctcctctctatcccaccacttctaaagctggctggtgagctctctctgagtgtcaagtctgtgaagtacactcgcggctccttcctctgccccggaggccagccttttcctcaccgcagcttctctgaagaagtctctgttcttgatgggcactttactcagctgggcttgaacagcgtagcctacttgatgggcaatgatgatgagactaagaaatggcatgtctatgctgcctctgcccaggactccagcaactgcaacaacaatgtctacactctcgagatgtgcatgactggtctggacagagagaaagctgctgtcttctacaaggatgaagctgacaagactgggtcaatgactgataactctggaatcagaaagatccttcccaagtctgagatctgcgactttgaattcgagccctgcggctactctatgaactcaattgaaggggatgcaatctccacgatccatgtgacccctgaagatgggtttagctacgctagcttcgaagctgtgggttacgacttcaacacccttgaccttagccagctggtgacaagggttctctcttgcttcgagcccaagcaattctctgtagctgtgcactcgagcgttggagcgaactcatacaagccagagattactgtagacttggaagactatgggtgcagagagaggacatttgagtctctaggagaagagagtggaacagtgatgtatcagacgtttgagaagcttggtaagtactgtggatcgcctagatctaccttgaagtgtgaatggagcagcaacaatagctgcagcagcgaggacgagaaggacgagggaatctagcagaatttttcttcctaataactattttcgagctttctgtttttgttctttctttttaaaaaacttattaagttcttatgaataatgacttgtgaagtttgagttcgtctccttcacaagcaagttgtattggtgttttctactttatgaatatgggttttatatacctaaagacttgttatgttattattcttaaatgttgctgctatgatgattactattatcgatttttac

SEQ ID NO: 35126 - protein, 366 aa, Arabidopsis thaliana
  peptide (1)..(366): Ceres Seq. ID no. 12600466
MALSAIGFEGYEKRLEVTFFEPSIFQDSKGLGLRALTKSQLDEILTPAACTIVSSLSNDQLDSYVLSESSFFVYPYKVIIKTCGTTKLLLSIPPLLKLAGELSLSVKSVKYTRGSFLCPGGQPFPHRSFSEEVSVLDGHFTQLGLNSVAYLMGNDDETKKWHVYAASAQDSSNCNNNVYTLEMCMTGLDREKAAVFYKDEADKTGSMTDNSGIRKILPKSEICDFEFEPCGYSMNSIEGDAISTIHVTPEDGFSYASFEAVGYDFNTLDLSQLVTRVLSCFEPKQFSVAVHSSVGANSYKPEITVDLEDYGCRERTFESLGEESGTVMYQTFEKLGKYCGSPRSTLKCEWSSNNSCSSEDEKDEGI

SEQ ID NO: 35127 - protein, 215 aa, Arabidopsis thaliana
  peptide (1)..(215): Ceres Seq. ID no. 12600467
MGNDDETKKWHVYAASAQDSSNCNNNVYTLEMCMTGLDREKAAVFYKDEADKTGSMTDNSGIRKILPKSEICDFEFEPCGYSMNSIEGDAISTIHVTPEDGFSYASFEAVGYDFNTLDLSQLVTRVLSCFEPKQFSVAVHSSVGANSYKPEITVDLEDYGCRERTFESLGEESGTVMYQTFEKLGKYCGSPRSTLKCEWSSNNSCSSEDEKDEGI

SEQ ID NO: 35128 - protein, 184 aa, Arabidopsis thaliana
  peptide (1)..(184): Ceres Seq. ID no. 12600468
MCMTGLDREKAAVFYKDEADKTGSMTDNSGIRKILPKSEICDFEFEPCGYSMNSIEGDAISTIHVTPEDGFSYASFEAVGYDFNTLDLSQLVTRVLSCFEPKQFSVAVHSSVGANSYKPEITVDLEDYGCRERTFESLGEESGTVMYQTFEKLGKYCGSPRSTLKCEWSSNNSCSSEDEKDEGI

SEQ ID NO: 35129 - DNA, 1085 bp, Arabidopsis thaliana
  misc_feature (1)..(1085): Ceres Seq. ID no. 12338245
  misc_feature (1)..(1085): Ortholog of  Ceres SEQ ID NO 13656486 as cited in SEQ ID NO 69202
acttttgccgagaaaatcagagacagaagaagaagaaaaaaaaaaaagcaaaacatgaaggcgacgacgaagactccgatccacgtggtgtggtcatgggttaggagacaacctccgaaggtgaaggcttttctcgccgtggtcactggcatggcggctttggttcttctcagattcattgttcacgatcacgacaatctcttcgttgccgctgaggctgttcattccatcgggatctgtgtgctcatctacaaactcatgaaggagaagacctgtgccggattgtcactgaaatctcaggagcttacggcgatatttttagctgttaggctgtattgtagcattgtaatggaatatgatatacataccattcttgacttggctactttgggaacaactctctgggttatatttatgattcgtttcaagttaagagctagttacatggaggacaaagacaactttcctctctattatgtgcttgcgccctgtgttgcattagctgtgttcatccatccatcgacctctcataacataataaacagaatttcatgggctttatgtgtataccttgaagctgtttcagtactacctcagctacgagtgatgcagaacacaaagattgttgaaccgttcacggctcattatgtttttgcacttggagtagcaaggttcctcagctgtgcccactgggttttacaggttgtggacacgcggggacggttgcttgtagcattgggttatggattgtggccatcaatggttctgatctcagaaattgttcaaactttcatcttggcagatttctgttactactacgtcaaaagcgttttcggaggccagcttgttctccggctaccgtctggagtagtataagttcaaaagatagaaatactccaacgatgtcctgcgatgagcttgacggaaattctaattgggaaagatagctcaatttttctttacctctgatttcatcgtttatgtgtcttgaggtttcaccaagtgtctcggttacgaattaattttacagtgttgtatattttgcctatcaagggatttaacgtctttcaggtcgataagttacc

SEQ ID NO: 35130 - protein, 291 aa, Arabidopsis thaliana
  peptide (1)..(291): Ceres Seq. ID no. 12338246
TFAEKIRDRRRRKKKKQNMKATTKTPIHVVWSWVRRQPPKVKAFLAVVTGMAALVLLRFIVHDHDNLFVAAEAVHSIGICVLIYKLMKEKTCAGLSLKSQELTAIFLAVRLYCSIVMEYDIHTILDLATLGTTLWVIFMIRFKLRASYMEDKDNFPLYYVLAPCVALAVFIHPSTSHNIINRISWALCVYLEAVSVLPQLRVMQNTKIVEPFTAHYVFALGVARFLSCAHWVLQVVDTRGRLLVALGYGLWPSMVLISEIVQTFILADFCYYYVKSVFGGQLVLRLPSGVV

SEQ ID NO: 35131 - protein, 273 aa, Arabidopsis thaliana; identical to SEQ ID NO: 24275
  peptide (1)..(273): Ceres Seq. ID no. 12338247

SEQ ID NO: 35132 - protein, 241 aa, Arabidopsis thaliana; identical to SEQ ID NO: 24276
  peptide (1)..(241): Ceres Seq. ID no. 12338248

SEQ ID NO: 35133 - DNA, 993 bp, Arabidopsis thaliana
  misc_feature (1)..(993): Ceres Seq. ID no. 12602231
  misc_feature (1)..(993): Ortholog of  Ceres SEQ ID NO 12557497 as cited in SEQ ID NO 43
  misc_feature (1)..(993): Ortholog of  Ceres SEQ ID NO 15177850 as cited in SEQ ID NO 51765
  misc_feature (1)..(993): Ortholog of  Ceres SEQ ID NO 14303417 as cited in SEQ ID NO 54923
  misc_feature (1)..(993): Ortholog of  Ceres SEQ ID NO 15169084 as cited in SEQ ID NO 59115
  misc_feature (1)..(993): Ortholog of  Ceres SEQ ID NO 12635723 as cited in SEQ ID NO 0
atctcacaaatcttacttatacgatcagtctcccacattcacacttccaccaaacacctctcgtccacatctttctcctttggtggcaaacacaacgacagatagagagaaacgatggcgtcgaactcgcttatgagctgtggcatagccgccgtgtacccttcgcttctctcttcttccaagtctaaattcgtatccgccggagttccactcccaaacgccgggaatgttggtcgtatcagaatggctgctcactggatgcctggcgagccacgaccagcttaccttgacggttctgctcctggtgactttgggtttgacccacttggacttggagaagttccagcgaaccttgagagatacaaagagtcagagctcatccactgtagatgggctatgctcgctgttcctgggattttggtaccagaagcattaggatatggaaactgggttaaggctcaggaatgggcagcactaccagggggtcaagccacttacttgggaaacccagtcccgtggggtactttgcccacaatcttggccattgagttcttagccattgcatttgttgagcaccagagaagtatggagaaagaccctgagaagaagaagtacccgggaggcgcatttgaccctcttggatactcgaaggaccccaagaagctcgaggaattgaaagttaaagagatcaagaacgggcggcttgcgctgttggcgtttgtaggattctgtgtgcaacagtcggcttacccggggacaggaccattggagaacttggcaactcacttggcggatccatggcacaacaacattggcgatattgttatccctttcaactaatgaatgtaaaaataaaaatatgtgtaccttatgagctttatgtgtatcaaaaacactgtgtaatgaaagacagatttgtgaattcctgtaatttgtcttggtgatcgaatgctcgtgtgagcttgaattctaagtgatgaaccttttgaaccc

SEQ ID NO: 35134 - protein, 241 aa, Arabidopsis thaliana
  peptide (1)..(241): Ceres Seq. ID no. 12602232
MASNSLMSCGIAAVYPSLLSSSKSKFVSAGVPLPNAGNVGRIRMAAHWMPGEPRPAYLDGSAPGDFGFDPLGLGEVPANLERYKESELIHCRWAMLAVPGILVPEALGYGNWVKAQEWAALPGGQATYLGNPVPWGTLPTILAIEFLAIAFVEHQRSMEKDPEKKKYPGGAFDPLGYSKDPKKLEELKVKEIKNGRLALLAFVGFCVQQSAYPGTGPLENLATHLADPWHNNIGDIVIPFN

SEQ ID NO: 35135 - protein, 235 aa, Arabidopsis thaliana
  peptide (1)..(235): Ceres Seq. ID no. 12602233
MSCGIAAVYPSLLSSSKSKFVSAGVPLPNAGNVGRIRMAAHWMPGEPRPAYLDGSAPGDFGFDPLGLGEVPANLERYKESELIHCRWAMLAVPGILVPEALGYGNWVKAQEWAALPGGQATYLGNPVPWGTLPTILAIEFLAIAFVEHQRSMEKDPEKKKYPGGAFDPLGYSKDPKKLEELKVKEIKNGRLALLAFVGFCVQQSAYPGTGPLENLATHLADPWHNNIGDIVIPFN

SEQ ID NO: 35136 - protein, 198 aa, Arabidopsis thaliana
  peptide (1)..(198): Ceres Seq. ID no. 12602234
MAAHWMPGEPRPAYLDGSAPGDFGFDPLGLGEVPANLERYKESELIHCRWAMLAVPGILVPEALGYGNWVKAQEWAALPGGQATYLGNPVPWGTLPTILAIEFLAIAFVEHQRSMEKDPEKKKYPGGAFDPLGYSKDPKKLEELKVKEIKNGRLALLAFVGFCVQQSAYPGTGPLENLATHLADPWHNNIGDIVIPFN

SEQ ID NO: 35137 - DNA, 1607 bp, Arabidopsis thaliana
  misc_feature (1)..(1607): Ceres Seq. ID no. 12439748
  misc_feature (1)..(1607): Ortholog of  Ceres SEQ ID NO 14316184 as cited in SEQ ID NO 54517
  misc_feature (1)..(1607): Ortholog of  Ceres SEQ ID NO 15226529 as cited in SEQ ID NO 55005
  misc_feature (1)..(1607): Ortholog of  Ceres SEQ ID NO 12616225 as cited in SEQ ID NO 68930
ctaatccaaaaacttcctagaaaagtaagtatatacctttctctgtatttccttcacctccggctaaatctccggcgaccgcgtaacttgttctccggtctgaatagtgaataaacacacacacggagccaaatccaggagaaattaggtttgaattagagagattaggagaatacaaattggtttggtggttttcaagtatgctaccaagtgggttgaaagaaacccaactccgtgagagcaacaacaaccaaaaagtccatcctcaaccaatggaagagtctatcaatcagaatcctgaagctatggaagcacttatctccaatctcttcggaaacatctcgtctttgaaatctgcttatatcgagcttcaaagtgctcatactccttacgatcccgagaagattcaggcagcggacaaagttgtcatttctgaactcaagaatctttccgaaatgaagcatttttacagagagaataaccccaaacctgtatgtgtctctccacaagactctcgtttagctgcagagatccaagagcagcagagtttgttgaagacttatgaggttatggtgaagaagtttcagtctgagattcagaacaaggattctgagatcacgcagatgctacagaagattgaggaagcaaaccagaaacggcttaagcttgataagaatcttaagttaagaggaatgtctacaaacgaaggttctaatggagatggaaatatgcagtttcctgacttaactactgaactctatgtatctacttacgaagctgctgctaaagccgtgcacgatttctccaagccgctaatcaacatgatgaaagcagcaggatgggatcttgattctgcagccaattctattgagcctgatgttgtttacgccaagaggcctcacaagaaatatgcatttgaatcatacatatgccaaaggatgttcagtgggtttcagcagaagaacttctcagtaaactcagagatgctgcggttatggccgatgatgacacagacacctttttccgccagtttcttgctctcaaggacatggatccactagatgctctaggtacaaaccctgattccaactttggtatattctgcaggagcaagtatctcctcttggtccacccaaagatggaagcttctttctttggaaatctagaccagcgtgactacgtgacaggaggtgggcacccgaggactgcgttttaccaggccttcttaaaacttgcaaagtcgatatggatcttgcacaggcttgcttactcttttgatccagctgcaaagatcttccaagtgaaaaagggtagtgagttctctgattcatacatggaaagtgttgtgaagaacatagttgtggatgaaaaagaagagaacccaagagttggtcttatggttatgcctgggttttggattggtggcagtgtcattcaaagccgagtttatgtttctggtgtgaaggtccttgagtgaaggatctcaggaactctcttaatgcttcttcccactttgttgtgcaacttttattttctctttgttataagcaagcctatatgtatcatctattgttaaaaaaaaatggaattaatatcttcttcgtctc

SEQ ID NO: 35138 - protein, 286 aa, Arabidopsis thaliana
  peptide (1)..(286): Ceres Seq. ID no. 12439749
MLPSGLKETQLRESNNNQKVHPQPMEESINQNPEAMEALISNLFGNISSLKSAYIELQSAHTPYDPEKIQAADKVVISELKNLSEMKHFYRENNPKPVCVSPQDSRLAAEIQEQQSLLKTYEVMVKKFQSEIQNKDSEITQMLQKIEEANQKRLKLDKNLKLRGMSTNEGSNGDGNMQFPDLTTELYVSTYEAAAKAVHDFSKPLINMMKAAGWDLDSAANSIEPDVVYAKRPHKKYAFESYICQRMFSGFQQKNFSVNSEMLRLWPMMTQTPFSASFLLSRTWIH

SEQ ID NO: 35139 - protein, 262 aa, Arabidopsis thaliana
  peptide (1)..(262): Ceres Seq. ID no. 12439750
MEESINQNPEAMEALISNLFGNISSLKSAYIELQSAHTPYDPEKIQAADKVVISELKNLSEMKHFYRENNPKPVCVSPQDSRLAAEIQEQQSLLKTYEVMVKKFQSEIQNKDSEITQMLQKIEEANQKRLKLDKNLKLRGMSTNEGSNGDGNMQFPDLTTELYVSTYEAAAKAVHDFSKPLINMMKAAGWDLDSAANSIEPDVVYAKRPHKKYAFESYICQRMFSGFQQKNFSVNSEMLRLWPMMTQTPFSASFLLSRTWIH

SEQ ID NO: 35140 - protein, 251 aa, Arabidopsis thaliana
  peptide (1)..(251): Ceres Seq. ID no. 12439751
MEALISNLFGNISSLKSAYIELQSAHTPYDPEKIQAADKVVISELKNLSEMKHFYRENNPKPVCVSPQDSRLAAEIQEQQSLLKTYEVMVKKFQSEIQNKDSEITQMLQKIEEANQKRLKLDKNLKLRGMSTNEGSNGDGNMQFPDLTTELYVSTYEAAAKAVHDFSKPLINMMKAAGWDLDSAANSIEPDVVYAKRPHKKYAFESYICQRMFSGFQQKNFSVNSEMLRLWPMMTQTPFSASFLLSRTWIH

SEQ ID NO: 35141 - DNA, 1163 bp, Arabidopsis thaliana
  misc_feature (1)..(1163): Ceres Seq. ID no. 12482807
  misc_feature (1)..(1163): Ortholog of  Ceres SEQ ID NO 12582036 as cited in SEQ ID NO 50981
  misc_feature (1)..(1163): Ortholog of  Ceres SEQ ID NO 14311969 as cited in SEQ ID NO 58929
  misc_feature (1)..(1163): Ortholog of  Ceres SEQ ID NO 15173523 as cited in SEQ ID NO 61797
  misc_feature (1)..(1163): Ortholog of  Ceres SEQ ID NO 14309357 as cited in SEQ ID NO 0
catttcttcttcttcttcctcactttgttcatcatcttcttctccgatctaaacaacaatggcgacaccaggagcttcctcagcaagagatgaattcgtatacatggcgaaactcgccgaacaagcagagcgttacgaagaaatggttgaattcatggagaaagtcgcgaaagctgttgacaaagacgaactcaccgtcgaagaacgtaatctcctctccgtcgcttacaaaaacgtcatcggagctcgtcgtgcttcgtggagaatcatttcatcgatcgaacaaaaggaggagtctcgcggtaacgatgaccacgtttcgttgatccgtgactacagaagcaaaatcgaaacggaactttctgatatctgtgacggaatccttaagcttctcgatacgattctcgttcccgctgctgcttctggagattcgaaggtgttttatctgaagatgaaaggtgattatcataggtacttggctgagttcaaatctggtcaagagaggaaagatgctgctgaacatactcttactgcttacaaagctgctcaggatattgctaattctgaattggctccaacgcatccgattcgtcttggtcttgcgttgaacttctctgtgttttactatgagattctcaattctccagatcgtgcttgtaatctcgctaagcaggcgtttgatgaagcaattgctgaattggatactcttggtgaagagtcatacaaggacagtactttgattatgcagcttcttcgtgataacctcactctctggacttctgatatgcaggacgatgttgctgatgacatcaaagaagcagcaccagcagcagcaaaacccgctgacgagcaacaatcctaagtcgtcttaccacaactttgttgtcatttcagtatctaaaacctctccattaatatgtttttctcttggaggtgtttctctgttggtttcttatttccttttatccccaagctctctaaggcagtctaattcttgtccttttttgctgcttttctcaaccgtggatacgaaaactcgattcctattatttttcgtttatctgtttccattttatcgtgatttgactcctatcttctgtgtctttgtttgtaatggattcaacttctctttttgtttcaatgtcaagaaaaatctttggttc

SEQ ID NO: 35142 - protein, 267 aa, Arabidopsis thaliana
  peptide (1)..(267): Ceres Seq. ID no. 12482808
MATPGASSARDEFVYMAKLAEQAERYEEMVEFMEKVAKAVDKDELTVEERNLLSVAYKNVIGARRASWRIISSIEQKEESRGNDDHVSLIRDYRSKIETELSDICDGILKLLDTILVPAAASGDSKVFYLKMKGDYHRYLAEFKSGQERKDAAEHTLTAYKAAQDIANSELAPTHPIRLGLALNFSVFYYEILNSPDRACNLAKQAFDEAIAELDTLGEESYKDSTLIMQLLRDNLTLWTSDMQDDVADDIKEAAPAAAKPADEQQS

SEQ ID NO: 35143 - protein, 252 aa, Arabidopsis thaliana
  peptide (1)..(252): Ceres Seq. ID no. 12482809
MAKLAEQAERYEEMVEFMEKVAKAVDKDELTVEERNLLSVAYKNVIGARRASWRIISSIEQKEESRGNDDHVSLIRDYRSKIETELSDICDGILKLLDTILVPAAASGDSKVFYLKMKGDYHRYLAEFKSGQERKDAAEHTLTAYKAAQDIANSELAPTHPIRLGLALNFSVFYYEILNSPDRACNLAKQAFDEAIAELDTLGEESYKDSTLIMQLLRDNLTLWTSDMQDDVADDIKEAAPAAAKPADEQQS

SEQ ID NO: 35144 - protein, 239 aa, Arabidopsis thaliana
  peptide (1)..(239): Ceres Seq. ID no. 12482810
MVEFMEKVAKAVDKDELTVEERNLLSVAYKNVIGARRASWRIISSIEQKEESRGNDDHVSLIRDYRSKIETELSDICDGILKLLDTILVPAAASGDSKVFYLKMKGDYHRYLAEFKSGQERKDAAEHTLTAYKAAQDIANSELAPTHPIRLGLALNFSVFYYEILNSPDRACNLAKQAFDEAIAELDTLGEESYKDSTLIMQLLRDNLTLWTSDMQDDVADDIKEAAPAAAKPADEQQS

SEQ ID NO: 35145 - DNA, 797 bp, Arabidopsis thaliana
  misc_feature (1)..(797): Ceres Seq. ID no. 12421974
  misc_feature (1)..(797): Ortholog of  Ceres SEQ ID NO 13647991 as cited in SEQ ID NO 187
aaacacatcacacaacaatatggtaacaatgatgagacctactctccttatacttctcttttccacctttctcccacaaatcctcaccgttgatccaccactcccaccatccaacggctccgatttcatccgtttggcctgcaacaccacactctacccggacctttgcttctccactctctcctcttttgccaactccatccaaaatgactcaaaccgcctcgcgcgcgtagccatctccctcactctccacaacactctccagcttctctcttacctccaaaacgcttataaccgcgaccacccaacccccgtccttagagactgcttcgagaatcttaaagatgccgttgacggtatgagaggctccatgaaacagatgaaggagcttgtctccgcgtctggctcgatcgagtcatttaggttccagatgagtaatgtcaagacttggcttagtgcagctcttactgatgagtatacttgtacggacgggttcaaagacgtccacgaagacgactctatcaaagatgacgtctgctctcgagtcgatgacgtcaagaagcttactagcaatgcgctggctttagttaaccgctatgccgacgagtcaataataaattaataatatctcagtcatcgatccttcgagtcttttgttttttttcgaaactatgaacttttatacttaaaaaagtattagtaaactaaaagtactactcgttgttgcatgtaatactgaaaatatatgtgagttttccttggaattattatttacttggatttatttcagtttttgc

SEQ ID NO: 35146 - protein, 206 aa, Arabidopsis thaliana
  peptide (1)..(206): Ceres Seq. ID no. 12421975
NTSHNNMVTMMRPTLLILLFSTFLPQILTVDPPLPPSNGSDFIRLACNTTLYPDLCFSTLSSFANSIQNDSNRLARVAISLTLHNTLQLLSYLQNAYNRDHPTPVLRDCFENLKDAVDGMRGSMKQMKELVSASGSIESFRFQMSNVKTWLSAALTDEYTCTDGFKDVHEDDSIKDDVCSRVDDVKKLTSNALALVNRYADESIIN

SEQ ID NO: 35147 - protein, 200 aa, Arabidopsis thaliana
  peptide (1)..(200): Ceres Seq. ID no. 12421976
MVTMMRPTLLILLFSTFLPQILTVDPPLPPSNGSDFIRLACNTTLYPDLCFSTLSSFANSIQNDSNRLARVAISLTLHNTLQLLSYLQNAYNRDHPTPVLRDCFENLKDAVDGMRGSMKQMKELVSASGSIESFRFQMSNVKTWLSAALTDEYTCTDGFKDVHEDDSIKDDVCSRVDDVKKLTSNALALVNRYADESIIN

SEQ ID NO: 35148 - protein, 197 aa, Arabidopsis thaliana
  peptide (1)..(197): Ceres Seq. ID no. 12421977
MMRPTLLILLFSTFLPQILTVDPPLPPSNGSDFIRLACNTTLYPDLCFSTLSSFANSIQNDSNRLARVAISLTLHNTLQLLSYLQNAYNRDHPTPVLRDCFENLKDAVDGMRGSMKQMKELVSASGSIESFRFQMSNVKTWLSAALTDEYTCTDGFKDVHEDDSIKDDVCSRVDDVKKLTSNALALVNRYADESIIN

SEQ ID NO: 35149 - DNA, 1226 bp, Arabidopsis thaliana
  misc_feature (1)..(1226): Ceres Seq. ID no. 12348505
  misc_feature (1)..(1226): Ortholog of  Ceres SEQ ID NO 12609965 as cited in SEQ ID NO 55883
  misc_feature (1)..(1226): Ortholog of  Ceres SEQ ID NO 13596393 as cited in SEQ ID NO 62144
  misc_feature (1)..(1226): Ortholog of  Ceres SEQ ID NO 13591076 as cited in SEQ ID NO 63757
  misc_feature (1)..(1226): Ortholog of  Ceres SEQ ID NO 13599575 as cited in SEQ ID NO 0
ctcgaagactattaaaggaatatccgcaaagaagaaaaaaaaaacatttttttggtaaaggactaatctttttgtttgcatcggccatctctaaccttacgattgtgtgttcttgctttgagcgaaaccctagaatcggtcttaacccatttgagcagagatgctgcgagtagcaggaaggaggcttttttctgtttcgcagagatcatcgacggtgacctccttcgtcctttcccgtgaccataccctttccgatggaggcaactcctcttccgcttctagatctgtcccctctgcagatctctcatctttcaattcttaccaccggagcgttataagaggttttgcttctcaagttattactcagggaaatgagataggttttggttcggaagtcccagccacagtcgaagctgtcaaaacacctaactcaaagattgtctatgacgaccataaccatgagcgttacccacctggtgaccctagcaagcgggcattcgcctattttgtcttgtcgggtggaaggtttgtttatgcctctgttctccgcctgcttgttctgaagcttattgtgagcatgtctgcaagtaaagatgtccttgcccttgcatccctcgaggttgacctagggagcatagaaccaggaactaccgtgacagtcaagtggcgtggaaagcccgtcttcatcaggcgaagaacagaagatgacatcaagctggccaatagtgtggatgttggatccctgagggacccacaagaagactcggttagagtcaagaatccagaatggttgatcgtggttggagtatgcactcatttggggtgcatccccttgcctaatgctggtgattatggtggttggttttgtccgtgtcacggatcacattacgatatatctggaagaattaggaaaggtcctgcaccatacaacctggaagtaccgacctacagcttcttggaagagaataaattactcattggttaatgaataaagcacaacagtccgagtgtcatggtctggatgatcttaaatctgtttttgtttttatattttccggcattttagcgtgcaagttcgctttcctcacactttgggctcagcaaaaattggcttgttttgctgaataatacaaacttgtcattgtatgacttagtatctgtctcatctggtgaaaatacattgttcatacttcatagtctctgtttattatttgaaaagagttttg

SEQ ID NO: 35150 - protein, 274 aa, Arabidopsis thaliana
  peptide (1)..(274): Ceres Seq. ID no. 12348506
MLRVAGRRLFSVSQRSSTVTSFVLSRDHTLSDGGNSSSASRSVPSADLSSFNSYHRSVIRGFASQVITQGNEIGFGSEVPATVEAVKTPNSKIVYDDHNHERYPPGDPSKRAFAYFVLSGGRFVYASVLRLLVLKLIVSMSASKDVLALASLEVDLGSIEPGTTVTVKWRGKPVFIRRRTEDDIKLANSVDVGSLRDPQEDSVRVKNPEWLIVVGVCTHLGCIPLPNAGDYGGWFCPCHGSHYDISGRIRKGPAPYNLEVPTYSFLEENKLLIG

SEQ ID NO: 35151 - DNA, 1308 bp, Arabidopsis thaliana
  misc_feature (1)..(1308): Ceres Seq. ID no. 12335664
  misc_feature (1)..(1308): Ortholog of  Ceres SEQ ID NO 12610323 as cited in SEQ ID NO 56055
ctctttctctgttttttgtttctggggaaaatgtcttctgcgattgttgtttctcaagatgcggaatcgcttggtctgcaaatttatagccgcaaggagaaatctcttggggttctcgtctccaatttcctgagactgtataaccgagacgatgtggatctcattgggctcgatgatgccgctgggcaattaggagttgaaaggcggcgtatctatgatgtggtcaatatattggagagtattgggattgtggcaagaagagggaagaatcaatactcgtggaaaggttttggagagattcctcgttctctagatgaactcaaggaagaagggatgagagagaggttaggttactcaagttcaaacaattcagacaaggtttcaaatggttgtgaaagagaagaacctttaactttaacacctgatgatcaggagaactcatcatcctctaaaatggaccaaaagaaggaaaaatctctctggcttctcgcacagaattttgtgaagatgtttctatgttctgatgatgatctcatcacacttgatagtgctgcaaaagccttgctgagcgactctccagattcagtccatatgcgaactaaagttagaagactttacgacattgcaaatgtatttgcctcgatgaatttaatcgagaagactcatataccagtgactaggaaaccagcatataggtggttagggtccaaaagcatagctgaaagaggattaagcttatttaattccggagaaccgaagcgggtatttggaacagagatcacaaacttgagggcaaagagaaacaaaacatattgttcatcaatccgcaagcaaattggatataagaaacatgacgaggaaaacacagagcaggaatcgaaaccagctgcaagtaaatatgtgtttggcccgttctccccaataggagcatctaagacgaacaacgacaaagtcggaaagggaaggttactagagatcgaggcccttgcttctacctaccaaccacagtattgcaatcaagaaataactggtcttcttgggcatttcacggaggcatggaagaaatggtatgcagaggttgatcggaataaataacattactgaggtcacatgttttctctgggtacatgagagcacataactcatccaacatatagctttagtctttgtttgccttaaacaatagtaagaaacagagtattgttattgttaataaaagtcacacccaacaaattccgagtgactttgttctatacttgattcgaattcctatcctctccttaacttaatataaatgtttaatccatc

SEQ ID NO: 35152 - protein, 364 aa, Arabidopsis thaliana
  peptide (1)..(364): Ceres Seq. ID no. 12335665
LFLCFLFLGKMSSAIVVSQDAESLGLQIYSRKEKSLGVLVSNFLRLYNRDDVDLIGLDDAAGQLGVERRRIYDVVNILESIGIVARRGKNQYSWKGFGEIPRSLDELKEEGMRERLGYSSSNNSDKVSNGCEREEPLTLTPDDQENSSSSKMDQKKEKSLWLLAQNFVKMFLCSDDDLITLDSAAKALLSDSPDSVHMRTKVRRLYDIANVFASMNLIEKTHIPVTRKPAYRWLGSKSIAERGLSLFNSGEPKRVFGTEITNLRAKRNKTYCSSIRKQIGYKKHDEENTEQESKPAASKYVFGPFSPIGASKTNNDKVGKGRLLEIEALASTYQPQYCNQEITGLLGHFTEAWKKWYAEVDRNK

SEQ ID NO: 35153 - protein, 354 aa, Arabidopsis thaliana
  peptide (1)..(354): Ceres Seq. ID no. 12335666
MSSAIVVSQDAESLGLQIYSRKEKSLGVLVSNFLRLYNRDDVDLIGLDDAAGQLGVERRRIYDVVNILESIGIVARRGKNQYSWKGFGEIPRSLDELKEEGMRERLGYSSSNNSDKVSNGCEREEPLTLTPDDQENSSSSKMDQKKEKSLWLLAQNFVKMFLCSDDDLITLDSAAKALLSDSPDSVHMRTKVRRLYDIANVFASMNLIEKTHIPVTRKPAYRWLGSKSIAERGLSLFNSGEPKRVFGTEITNLRAKRNKTYCSSIRKQIGYKKHDEENTEQESKPAASKYVFGPFSPIGASKTNNDKVGKGRLLEIEALASTYQPQYCNQEITGLLGHFTEAWKKWYAEVDRNK

SEQ ID NO: 35154 - protein, 253 aa, Arabidopsis thaliana
  peptide (1)..(253): Ceres Seq. ID no. 12335667
MRERLGYSSSNNSDKVSNGCEREEPLTLTPDDQENSSSSKMDQKKEKSLWLLAQNFVKMFLCSDDDLITLDSAAKALLSDSPDSVHMRTKVRRLYDIANVFASMNLIEKTHIPVTRKPAYRWLGSKSIAERGLSLFNSGEPKRVFGTEITNLRAKRNKTYCSSIRKQIGYKKHDEENTEQESKPAASKYVFGPFSPIGASKTNNDKVGKGRLLEIEALASTYQPQYCNQEITGLLGHFTEAWKKWYAEVDRNK

SEQ ID NO: 35155 - DNA, 877 bp, Arabidopsis thaliana
  misc_feature (1)..(877): Ceres Seq. ID no. 12738221
  misc_feature (1)..(877): Ortholog of  Ceres SEQ ID NO 13598160 as cited in SEQ ID NO 61317
  misc_feature (1)..(877): Ortholog of  Ceres SEQ ID NO 13579986 as cited in SEQ ID NO 64562
  misc_feature (1)..(877): Ortholog of  Ceres SEQ ID NO 12614253 as cited in SEQ ID NO 68518
aaaaggagaaagcttgaaacgccgcttcttcttcttcttcttcctctgtcgttctctctgtaaatcgcttcttcaatcatctctgtggatttgtctctattcataacttggtgaagaagatgttgacggaagaggagctcaaaagattgtacagaatccagaagacgttgatgcagatgttaagggatcgtggatattttatcgcggattctgaacttacgatgactaaacaacagtttattaggaaacatggtgataacatgaaaagagaggatcttgttactcttaaggctaagcgaaatgataatagtgatcagctctatatattcttccctgatgaggcgaaagttggtgtgaagacgatgaaaatgtacacgaacaggatgaaatcagagaatgtgttcagagctattttggttgtgcaacagaacttgaccccgtttgctcgaacttgcattagtgagatctcttccaagtttcatctggaagttttccaggaggcggaaatgctagtgaacattaaagaacatgttcttgttcctgagcatcaagttcttaccactgaagagaagaaaactttactggagagatacacagtcaaggagacacagctcccaaggatccaagtgactgatccaatcgcaagatactttggactaaaacgtgggcaagtcgtgaagatcattcgtccgagtgaaactgctggtcgttatgttacctatcgttatgttgtataagccaaaacaaaaaggcttttgtggattgtaatgcgaattgaacgctgagagttgtgaaacatagaagtaatgcttttgtaccaaacctaactgtcgactgttttttatttttggttgtcagctatgagacataaagcttg

SEQ ID NO: 35156 - protein, 205 aa, Arabidopsis thaliana; identical to SEQ ID NO: 29287
  peptide (1)..(205): Ceres Seq. ID no. 12738222

SEQ ID NO: 35157 - protein, 188 aa, Arabidopsis thaliana; identical to SEQ ID NO: 29288
  peptide (1)..(188): Ceres Seq. ID no. 12738223

SEQ ID NO: 35158 - protein, 186 aa, Arabidopsis thaliana
  peptide (1)..(186): Ceres Seq. ID no. 12738224
MLRDRGYFIADSELTMTKQQFIRKHGDNMKREDLVTLKAKRNDNSDQLYIFFPDEAKVGVKTMKMYTNRMKSENVFRAILVVQQNLTPFARTCISEISSKFHLEVFQEAEMLVNIKEHVLVPEHQVLTTEEKKTLLERYTVKETQLPRIQVTDPIARYFGLKRGQVVKIIRPSETAGRYVTYRYVV

SEQ ID NO: 35159 - DNA, 1294 bp, Arabidopsis thaliana
  misc_feature (1)..(1294): Ceres Seq. ID no. 12385215
  misc_feature (1)..(1294): Ortholog of  Ceres SEQ ID NO 14311590 as cited in SEQ ID NO 51709
aataacttcatctctcccattctcttcactcttctcaaaaattcgatctttagggtttttcttttatcctcttatcgctaatctggagctctatagagactataaagggtttttgattgattcgggagctcgagatttgacttcttttagctgattcggcaagtttgtatctagaaaggatcgattggtgaggtcaatagtggttggtgggttttagtaatggaagacggtgagcttgatttctccaatcaggaagtgttttcgagttcggagatgggtgaattaccacctagcaattgttcgatggatagtttctttgatgggcttttaatggatactaatgctgcttgtacccacactcacacctgtaaccccactggaccagagaacactcatactcacacgtgcttccatgtccacaccaagattctcccggatgagagcgatgaaaaagtttctactgatgatacagctgagtcttgtgggaagaagggtgaaaagagacctttgggaaaccgggaagcggttagaaagtatagagagaagaagaaggctaaagctgcttctttggaggatgaggttgcaaggcttagggcggtgaatcagcagctggtgaagaggttgcaaaatcaggctaccttggaagctgaggtttcgaggcttaagtgtttgcttgtggatttgagaggaagaatagatggagagattggatcttttccttatcagaaacctatggctgcaaatattccttctttctcgcacatgatgaatccttgtaatgtacaatgtgatgatgaagtttattgccctcagaatgtgtttggagtgaatagccaagaaggtgcctcgatcaatgaccaagggttaagtggttgtgattttgatcagctacaatgcatggctaatcagaacttaaatggaaatggaaacggatcattcagcaacgtcaatacatctgtctcgaataagagaaaaggtgggcatcgtgcatcaagagcagtttgaagcatcatcaagcttgtactatctatttccaccagcatagatattgtattccaaataagttgtagagttcagctgcaggatcagcttcgctcaggttcctttgtatcctcatttttgttttttgttttctgactctctttcccttccattgtatttccttgttgagcttgacaaactagaaggatgatatattgttaatacaacaaactcaaatgttctgtgtgttgcttgccatttgttttcatacttgagctgcttcttcttaagtttatgtcgaagaagttgattg

SEQ ID NO: 35160 - protein, 261 aa, Arabidopsis thaliana
  peptide (1)..(261): Ceres Seq. ID no. 12385216
MEDGELDFSNQEVFSSSEMGELPPSNCSMDSFFDGLLMDTNAACTHTHTCNPTGPENTHTHTCFHVHTKILPDESDEKVSTDDTAESCGKKGEKRPLGNREAVRKYREKKKAKAASLEDEVARLRAVNQQLVKRLQNQATLEAEVSRLKCLLVDLRGRIDGEIGSFPYQKPMAANIPSFSHMMNPCNVQCDDEVYCPQNVFGVNSQEGASINDQGLSGCDFDQLQCMANQNLNGNGNGSFSNVNTSVSNKRKGGHRASRAV

SEQ ID NO: 35161 - protein, 243 aa, Arabidopsis thaliana
  peptide (1)..(243): Ceres Seq. ID no. 12385217
MGELPPSNCSMDSFFDGLLMDTNAACTHTHTCNPTGPENTHTHTCFHVHTKILPDESDEKVSTDDTAESCGKKGEKRPLGNREAVRKYREKKKAKAASLEDEVARLRAVNQQLVKRLQNQATLEAEVSRLKCLLVDLRGRIDGEIGSFPYQKPMAANIPSFSHMMNPCNVQCDDEVYCPQNVFGVNSQEGASINDQGLSGCDFDQLQCMANQNLNGNGNGSFSNVNTSVSNKRKGGHRASRAV

SEQ ID NO: 35162 - protein, 233 aa, Arabidopsis thaliana
  peptide (1)..(233): Ceres Seq. ID no. 12385218
MDSFFDGLLMDTNAACTHTHTCNPTGPENTHTHTCFHVHTKILPDESDEKVSTDDTAESCGKKGEKRPLGNREAVRKYREKKKAKAASLEDEVARLRAVNQQLVKRLQNQATLEAEVSRLKCLLVDLRGRIDGEIGSFPYQKPMAANIPSFSHMMNPCNVQCDDEVYCPQNVFGVNSQEGASINDQGLSGCDFDQLQCMANQNLNGNGNGSFSNVNTSVSNKRKGGHRASRAV

SEQ ID NO: 35163 - DNA, 897 bp, Arabidopsis thaliana
  misc_feature (1)..(897): Ceres Seq. ID no. 12481912
  misc_feature (1)..(897): Ortholog of  Ceres SEQ ID NO 13594172 as cited in SEQ ID NO 58419
atgatgaacacacttcatgcatttcagacaaccttaacaccaaactttcatgttcttttcaatgcctcgagacattctctttcccgaccccaatttctctgtctctccaaatcgggagacggaacttcagattctgattctgatcccgaccctccaaaacccgaaggcgatactcgcaggcaagaactcttagctaggatcgccatgattcagacatcgaaggtccgtttgacggatttcttggacgagagatcagagtatctcaccaagtttgctgaagaagccaatgcggagtttgacaaggttggagaagacgccatgaaagaccttgacgaagctagcacaaggatactggagaatatcgaaagcaagatgcaagcttttgaggaatctgcgggattgaacagattagagatcgaggagaacgataataagttggctgagtttgaggagaagattcaagtagacaggaatgaaggattgttctttaaaagcttacgtgacaaaaaaccagtggatagagagcaagctagagaggaaactgagaaaatacaagaggttaccaaagaaagtgcaggatcaaagtcaagaaggaatatttacctcgggttaattgggattgtggttctcgcaattgctgattccttcgtttcttcaccggattggagaaaagtcgcaattcttggagctatccttgtcccactgctcactcaattcgtatacgagcagacattattatcagaagcagataagggaaaggaaaacaagaaggaatgaacgatagaagccgacaaactctgtattaatcgaaagagatgaatataacttgatggcatagacccaaagtgtgaaacttatcactttaggtttgatgcgtcaagctacagcttttctttt

SEQ ID NO: 35164 - protein, 258 aa, Arabidopsis thaliana
  peptide (1)..(258): Ceres Seq. ID no. 12481913
MMNTLHAFQTTLTPNFHVLFNASRHSLSRPQFLCLSKSGDGTSDSDSDPDPPKPEGDTRRQELLARIAMIQTSKVRLTDFLDERSEYLTKFAEEANAEFDKVGEDAMKDLDEASTRILENIESKMQAFEESAGLNRLEIEENDNKLAEFEEKIQVDRNEGLFFKSLRDKKPVDREQAREETEKIQEVTKESAGSKSRRNIYLGLIGIVVLAIADSFVSSPDWRKVAILGAILVPLLTQFVYEQTLLSEADKGKENKKE

SEQ ID NO: 35165 - protein, 257 aa, Arabidopsis thaliana
  peptide (1)..(257): Ceres Seq. ID no. 12481914
MNTLHAFQTTLTPNFHVLFNASRHSLSRPQFLCLSKSGDGTSDSDSDPDPPKPEGDTRRQELLARIAMIQTSKVRLTDFLDERSEYLTKFAEEANAEFDKVGEDAMKDLDEASTRILENIESKMQAFEESAGLNRLEIEENDNKLAEFEEKIQVDRNEGLFFKSLRDKKPVDREQAREETEKIQEVTKESAGSKSRRNIYLGLIGIVVLAIADSFVSSPDWRKVAILGAILVPLLTQFVYEQTLLSEADKGKENKKE

SEQ ID NO: 35166 - protein, 190 aa, Arabidopsis thaliana
  peptide (1)..(190): Ceres Seq. ID no. 12481915
MIQTSKVRLTDFLDERSEYLTKFAEEANAEFDKVGEDAMKDLDEASTRILENIESKMQAFEESAGLNRLEIEENDNKLAEFEEKIQVDRNEGLFFKSLRDKKPVDREQAREETEKIQEVTKESAGSKSRRNIYLGLIGIVVLAIADSFVSSPDWRKVAILGAILVPLLTQFVYEQTLLSEADKGKENKKE

SEQ ID NO: 35167 - DNA, 1403 bp, Arabidopsis thaliana
  misc_feature (1)..(1403): Ceres Seq. ID no. 12335179
  misc_feature (1)..(1403): Ortholog of  Ceres SEQ ID NO 14303866 as cited in SEQ ID NO 53689
  misc_feature (1)..(1403): Ortholog of  Ceres SEQ ID NO 14315958 as cited in SEQ ID NO 59979
  misc_feature (1)..(1403): Ortholog of  Ceres SEQ ID NO 13597037 as cited in SEQ ID NO 69005
aaacctctctgtcattactctggtcagcgattcttctttcttcttcttctcagatcctttcaccgagtaagaagattttaaagatgccgtcaacgccgacgacgccgactacaacaacgccgatcacggcttcgtattggtgttacagctgtacgcgtttcgtcagcgtttgggctgatcaaggcacaacaaccgtcggtagcgtcgcttgccctcactgcgacggcggttttatcgaacagattaacgattcttcctccgccgctaccgaattaacgattccggcttctactgaagtaagatcgatcaataacaaccgtagatccgtgattagacgccggagatccggtcgtcgtccgtcctttaatccggtcatcgtacttcaaggaggcgccggcgagagagaagagggagaagaaggagatgcggctagagatcgacgcgcttttgagttttattacgatgacggatccggatcgggtcttagaccgcttccggattctgtatctgagatcttgatgggatctggattcgagcggttacttgaacagctaagccaaatcgaagcgtcggctactggaattggtagatctggaaaccctccggcgtctaaatcggcgattgagtctttacctagagtcgaaatctcggattgccacataggctcggaggctaattgcgctgtttgcacggagattttcgagacggagacggaggcgcgtgagatgccgtgtaaacaccttttccacgacgattgcatcgtaccgtggctatcgattcgaaactcttgtcccgtgtgcagattcgagctaccttcagagcctaatcgacggagcaacaacaacgaggaggataacgccgtggggatgacgatttggagacttcccggtggtggattcgccgtagggaggtttaacgcagcaatgagagacggagagagagttttgccagtggtgttaacagaaatggatggtggtgggattggtaatagccaggatggtcctagacggatctcatgggttaggtcacacggtacactcgaatcggatagtaacggtactggctcaggttccggctccggtggaagattgaggaggatggttcgtggaatggtgtcgttaatgaggagagtgagaccaaaccgtagctcttcttcttcatcagctgcgatatcaacttcttctgataatctggatttgaacattgaagtagaatctagggttttggataggtcaaattcagtgatgagaagatacttcagaagaaacagaagtaacagggattcttcgtcttcagttcttcattgattcagaaatatatatatattattttttggtttgttcattcaacaatgtaaatataagattcagaagaaaaagattggtgcttcgttttctattacc

SEQ ID NO: 35168 - protein, 434 aa, Arabidopsis thaliana
  peptide (1)..(434): Ceres Seq. ID no. 12335180
TSLSLLWSAILLSSSSQILSPSKKILKMPSTPTTPTTTTPITASYWCYSCTRFVSVWADQGTTTVGSVACPHCDGGFIEQINDSSSAATELTIPASTEVRSINNNRRSVIRRRRSGRRPSFNPVIVLQGGAGEREEGEEGDAARDRRAFEFYYDDGSGSGLRPLPDSVSEILMGSGFERLLEQLSQIEASATGIGRSGNPPASKSAIESLPRVEISDCHIGSEANCAVCTEIFETETEAREMPCKHLFHDDCIVPWLSIRNSCPVCRFELPSEPNRRSNNNEEDNAVGMTIWRLPGGGFAVGRFNAAMRDGERVLPVVLTEMDGGGIGNSQDGPRRISWVRSHGTLESDSNGTGSGSGSGGRLRRMVRGMVSLMRRVRPNRSSSSSSAAISTSSDNLDLNIEVESRVLDRSNSVMRRYFRRNRSNRDSSSSVLH

SEQ ID NO: 35169 - protein, 407 aa, Arabidopsis thaliana
  peptide (1)..(407): Ceres Seq. ID no. 12335181
MPSTPTTPTTTTPITASYWCYSCTRFVSVWADQGTTTVGSVACPHCDGGFIEQINDSSSAATELTIPASTEVRSINNNRRSVIRRRRSGRRPSFNPVIVLQGGAGEREEGEEGDAARDRRAFEFYYDDGSGSGLRPLPDSVSEILMGSGFERLLEQLSQIEASATGIGRSGNPPASKSAIESLPRVEISDCHIGSEANCAVCTEIFETETEAREMPCKHLFHDDCIVPWLSIRNSCPVCRFELPSEPNRRSNNNEEDNAVGMTIWRLPGGGFAVGRFNAAMRDGERVLPVVLTEMDGGGIGNSQDGPRRISWVRSHGTLESDSNGTGSGSGSGGRLRRMVRGMVSLMRRVRPNRSSSSSSAAISTSSDNLDLNIEVESRVLDRSNSVMRRYFRRNRSNRDSSSSVLH

SEQ ID NO: 35170 - protein, 262 aa, Arabidopsis thaliana
  peptide (1)..(262): Ceres Seq. ID no. 12335182
MGSGFERLLEQLSQIEASATGIGRSGNPPASKSAIESLPRVEISDCHIGSEANCAVCTEIFETETEAREMPCKHLFHDDCIVPWLSIRNSCPVCRFELPSEPNRRSNNNEEDNAVGMTIWRLPGGGFAVGRFNAAMRDGERVLPVVLTEMDGGGIGNSQDGPRRISWVRSHGTLESDSNGTGSGSGSGGRLRRMVRGMVSLMRRVRPNRSSSSSSAAISTSSDNLDLNIEVESRVLDRSNSVMRRYFRRNRSNRDSSSSVLH

SEQ ID NO: 35171 - DNA, 1503 bp, Arabidopsis thaliana
  misc_feature (1)..(1503): Ceres Seq. ID no. 12335175
  misc_feature (1)..(1503): Ortholog of  Ceres SEQ ID NO 15177291 as cited in SEQ ID NO 52286
  misc_feature (1)..(1503): Ortholog of  Ceres SEQ ID NO 13595164 as cited in SEQ ID NO 56222
  misc_feature (1)..(1503): Ortholog of  Ceres SEQ ID NO 14315021 as cited in SEQ ID NO 57018
  misc_feature (1)..(1503): Ortholog of  Ceres SEQ ID NO 15177783 as cited in SEQ ID NO 58894
  misc_feature (1)..(1503): Ortholog of  Ceres SEQ ID NO 13591068 as cited in SEQ ID NO 69043
  misc_feature (1)..(1503): Ortholog of  Ceres SEQ ID NO 13623041 as cited in SEQ ID NO 0
agaaattaaacagcgacgtcgttttgcagctacagtgcgatcatctaatcagtcagtgtcttcaagtttaaaccgcatctctagtctctctctacttctctctgtgtacaatattcggaaagtgaggaagatacactgaagcaaaagagcaagtcatggcggcgacatcttcctctgcttttctccttaatccgttgacttctcgccaccgtcctttcaaatactcgccagagctctcttctctctccttatcctctcgaaaggctgctgctttcgatgtttcctcagctgctttcacgctcaagagacagagccggagtgatgttgtgtgcaaggctgtatctatcaagccagaagctggtgttgaagggctcaatatcgccgataacgccgctcagcttattgggaaaactccgatggtgtacttgaacaatgtagtcaagggctgtgttgcaagtgttgctgctaagcttgagatcatggaaccatgttgcagtgtcaaggataggattgggtacagtatgattactgatgctgaagagaaaggacttataacacctggaaagagtgttcttgtggaatctacgagtgggaacacagggattggccttgcattcattgctgcttcaaaaggctataaacttatcttgacgatgcctgcgtccatgagtttggaaaggcgggttcttttgagggcatttggagctgagcttgtgttaactgaacctgcaaaaggtatgactggagcaattcagaaggctgaagaaatcttgaaaaaaactcccaattcctacatgctccaacagtttgacaaccctgccaatcccaagattcattatgagacgactggtcctgagatttgggaagatacaagaggcaaaatcgatatattggttgcggggattggaactggtggaactatcactggtgttggtcgattcattaaagaaagaaaacctgaattgaaggttattggtgtcgaacccacggaaagtgctatactttctggtggaaaacccggacctcacaagattcaaggaattggagctggatttgtacccaagaatttggatctggctattgtagatgaatacatagcgatttccagtgaggaagctattgaaacctcgaagcaactagctctccaggaaggcttgttggttggtatatcttctggagctgctgctgctgctgcaatccaggttgcaaagagacctgaaaatgccgggaaactcatagccgttgtgttcccgagcttcggggaacgttacctctcgacccagcttttccagtcgattcgagaagagtgcgagcaaatgcagcccgagctttgattttcttctgtaatttcgtgaccaacaaggaacctcttctttgatttattgctgattgtttttcttctaatagacgtttctgcagaaatctctacgtctactgtgtatatttacaattcgcaacgcaatttggtgtttgttattaataaaggcataagaggttttggtc

SEQ ID NO: 35172 - protein, 392 aa, Arabidopsis thaliana
  peptide (1)..(392): Ceres Seq. ID no. 12335176
MAATSSSAFLLNPLTSRHRPFKYSPELSSLSLSSRKAAAFDVSSAAFTLKRQSRSDVVCKAVSIKPEAGVEGLNIADNAAQLIGKTPMVYLNNVVKGCVASVAAKLEIMEPCCSVKDRIGYSMITDAEEKGLITPGKSVLVESTSGNTGIGLAFIAASKGYKLILTMPASMSLERRVLLRAFGAELVLTEPAKGMTGAIQKAEEILKKTPNSYMLQQFDNPANPKIHYETTGPEIWEDTRGKIDILVAGIGTGGTITGVGRFIKERKPELKVIGVEPTESAILSGGKPGPHKIQGIGAGFVPKNLDLAIVDEYIAISSEEAIETSKQLALQEGLLVGISSGAAAAAAIQVAKRPENAGKLIAVVFPSFGERYLSTQLFQSIREECEQMQPEL

SEQ ID NO: 35173 - protein, 305 aa, Arabidopsis thaliana
  peptide (1)..(305): Ceres Seq. ID no. 12335177
MVYLNNVVKGCVASVAAKLEIMEPCCSVKDRIGYSMITDAEEKGLITPGKSVLVESTSGNTGIGLAFIAASKGYKLILTMPASMSLERRVLLRAFGAELVLTEPAKGMTGAIQKAEEILKKTPNSYMLQQFDNPANPKIHYETTGPEIWEDTRGKIDILVAGIGTGGTITGVGRFIKERKPELKVIGVEPTESAILSGGKPGPHKIQGIGAGFVPKNLDLAIVDEYIAISSEEAIETSKQLALQEGLLVGISSGAAAAAAIQVAKRPENAGKLIAVVFPSFGERYLSTQLFQSIREECEQMQPEL

SEQ ID NO: 35174 - protein, 284 aa, Arabidopsis thaliana
  peptide (1)..(284): Ceres Seq. ID no. 12335178
MEPCCSVKDRIGYSMITDAEEKGLITPGKSVLVESTSGNTGIGLAFIAASKGYKLILTMPASMSLERRVLLRAFGAELVLTEPAKGMTGAIQKAEEILKKTPNSYMLQQFDNPANPKIHYETTGPEIWEDTRGKIDILVAGIGTGGTITGVGRFIKERKPELKVIGVEPTESAILSGGKPGPHKIQGIGAGFVPKNLDLAIVDEYIAISSEEAIETSKQLALQEGLLVGISSGAAAAAAIQVAKRPENAGKLIAVVFPSFGERYLSTQLFQSIREECEQMQPEL

SEQ ID NO: 35175 - DNA, 1232 bp, Arabidopsis thaliana
  misc_feature (1)..(1232): Ceres Seq. ID no. 13497527
  misc_feature (1)..(1232): Ortholog of  Ceres SEQ ID NO 13596876 as cited in SEQ ID NO 62696
  misc_feature (1)..(1232): Ortholog of  Ceres SEQ ID NO 13655442 as cited in SEQ ID NO 64359
  misc_feature (1)..(1232): Ortholog of  Ceres SEQ ID NO 14303652 as cited in SEQ ID NO 67569
aaatagaaatttgtggtgcttcattggatcgacgaaaggcgtcccgatattgaggttcgttacgccggcgaagattttcatcggaaacttatctgatcgtttacgccggcgaagatttccatcggaaacttaatctgatcggaaggaagaaggctcgatgaagagcagattgaagagctacaggaggaagaagctagggttagccacagttatcgtcttctgttctctctgtttcctcttcggtttctatggctccactctactttctcagaatgtgcctcgtgttaaacccaggttgagaatgttggatatggttgagaatggggaagaagaagctagctcgatgcctcatggtgttactggagaagaatctattggatcgattccttttcaggtacttagttggagacctagggctatatattttccgaattttgcaactgcagaacaatgccaagctattattgagagagcaaaggttaatctgaaaccttctgctttggctctccggaaaggagaaactgctgagaacactaagggcactagaacaagctcaggaacttttatcagtgcttcagaagagagtactggtgctctggattttgttgaaaggaaaatcgcaagagctacgatgatcccaaggtcccatggagagtcattcaatattttacggtatgaacttggccaaaagtatgattcccactatgatgttttcaacccaacagaatatggaccacaatcaagccaaaggattgcctccttcctgttgtacttatctgatgttgaagaaggcggtgaaaccatgttcccatttgagaacggttctaatatgggcatcggatacgattacaagcaatgtattgggttgaaagtaaagcctcggaaaggagatggtcttcttttttattccgtgtttccaaatggaacgattgatcagacttcgcttcacgggagctgcccggtgaccaaaggagagaaatgggtggcaaccaaatggatcagagaccaagaccaggaagaataagttaggtttttttccatatatctatctcagtctcacagcttctatcttttgactaaaaatctgctgctggatccctcgtgtacagttcttcgctgaaacagtgtaactatttagctttcttataatgcgaatgatacaaaaattaaaacctgataatgaaaacttggttcgaaatatcatttgaacaatagaagtttcttgttgtttg

SEQ ID NO: 35176 - protein, 288 aa, Arabidopsis thaliana; identical to SEQ ID NO: 26258
  peptide (1)..(288): Ceres Seq. ID no. 13497528

SEQ ID NO: 35177 - protein, 240 aa, Arabidopsis thaliana; identical to SEQ ID NO: 26259
  peptide (1)..(240): Ceres Seq. ID no. 13497529

SEQ ID NO: 35178 - protein, 237 aa, Arabidopsis thaliana; identical to SEQ ID NO: 26260
  peptide (1)..(237): Ceres Seq. ID no. 13497530

SEQ ID NO: 35179 - DNA, 1625 bp, Arabidopsis thaliana
  misc_feature (1)..(1625): Ceres Seq. ID no. 12739023
  misc_feature (1)..(1625): Ortholog of  Ceres SEQ ID NO 13595999 as cited in SEQ ID NO 68173
gagtaacatcgagacaaagaagaaaagctaaaaaagagaaccccaaagaatcgaatatttattatttcgccccgaagattctatttctgatcatttacacccctaaaaagagtagagctttcgtgaagccaccatgtgtggaggagctataatctccgatttcatacctccgccgaggtccctccgcgtcactaacgagtttatctggccggatctgaaaaacaaagtgaaagcttcaaagaagagatcgaataagcgatccgatttcttcgatcttgacgatgatttcgaagctgatttccaagggtttaaggatgactcggcttttgactgcgaagacgatgatgatgtcttcgtcaatgttaagcctttcgtcttcaccgcaactactaagcccgtagcttccgctttcgtctccactgtaggttcagcatatgccaagaaaactgtagagtccgctgagcaagctgagaaatcttctaagaggaagaggaagaatcagtaccgagggattaggcagcgtccttggggaaaatgggctgcggagatccgtgatccgagaaaaggctcccgagaatggcttggaacattcgacactgctgaggaagcagcaagagcttatgatgctgcagcacgcagaatccgtggcacgaaagctaaggtgaattttcccgaggagaagaaccctagcgtcgtatcccagaaacgtcctagtgctaagactaataatcttcagaaatcagtggctaaaccaaacaaaagcgtaactttggttcagcagccaacacatctgagtcagcagtactgcaacaactcctttgacaactcttttggtgatatgagtttcatggaagagaagcctcagatgtacaacaatcagtttgggttaacaaactcgttcgatgctggaggtaacaatggataccagtatttcagttccgatcagggcagtaactccttcgactgttctgagttcgggtggagtgatcacggccctaaaacacccgagatctcttcaatgcttgtcaataacaacgaagcatcatttgttgaagaaaccaatgcagccaagaagctcaaacctaactctgatgagtcagacgatctgatggcataccttgacaacgccttgtgggacaccccactagaagtgaaagccatgcttggcgcagatgctggtgctgtgactcaggaagaggaaaacccagtggagctatggagcttagatgagatcaatttcatgctggaaggagacttttgaagtgatcgatggttccttagtttgtaaataaagctgtgttggattttgctgttgggggatggtacaagtcacacctcaagctctatgcattggtatctcatgagcctctcttccatagagagtttctcttttaattttgtcgaaataaaaaaggtgtgatgaagtaaatagaggtataataatatctatctattaagtcttgttttgttctttcatttttgtatttcttttctatttaaaagacagtttattagtcttctgagctctctttttgatctttgttatagcgtatcatcaccctcgaaagtgtaatgttttgtacccccaaacttgtttagcattataataaagtctctttggaacc

SEQ ID NO: 35180 - protein, 375 aa, Arabidopsis thaliana
  peptide (1)..(375): Ceres Seq. ID no. 12739024
MCGGAIISDFIPPPRSLRVTNEFIWPDLKNKVKASKKRSNKRSDFFDLDDDFEADFQGFKDDSAFDCEDDDDVFVNVKPFVFTATTKPVASAFVSTVGSAYAKKTVESAEQAEKSSKRKRKNQYRGIRQRPWGKWAAEIRDPRKGSREWLGTFDTAEEAARAYDAAARRIRGTKAKVNFPEEKNPSVVSQKRPSAKTNNLQKSVAKPNKSVTLVQQPTHLSQQYCNNSFDNSFGDMSFMEEKPQMYNNQFGLTNSFDAGGNNGYQYFSSDQGSNSFDCSEFGWSDHGPKTPEISSMLVNNNEASFVEETNAAKKLKPNSDESDDLMAYLDNALWDTPLEVKAMLGADAGAVTQEEENPVELWSLDEINFMLEGDF

SEQ ID NO: 35181 - DNA, 1246 bp, Arabidopsis thaliana; identical to SEQ ID NO: 26472
  misc_feature (1)..(1246): Ceres Seq. ID no. 13591822
  misc_feature (1)..(1246): Ortholog of  Ceres SEQ ID NO 12614942 as cited in SEQ ID NO 68635

SEQ ID NO: 35182 - protein, 169 aa, Arabidopsis thaliana; identical to SEQ ID NO: 26473
  peptide (1)..(169): Ceres Seq. ID no. 13591823

SEQ ID NO: 35183 - protein, 100 aa, Arabidopsis thaliana; identical to SEQ ID NO: 26474
  peptide (1)..(100): Ceres Seq. ID no. 13591824

SEQ ID NO: 35184 - protein, 95 aa, Arabidopsis thaliana; identical to SEQ ID NO: 26475
  peptide (1)..(95): Ceres Seq. ID no. 13591825

SEQ ID NO: 35185 - DNA, 1344 bp, Arabidopsis thaliana
  misc_feature (1)..(1344): Ceres Seq. ID no. 12333671
  misc_feature (1)..(1344): Ortholog of  Ceres SEQ ID NO 13654989 as cited in SEQ ID NO 63117
  misc_feature (1)..(1344): Ortholog of  Ceres SEQ ID NO 13655640 as cited in SEQ ID NO 63844
  misc_feature (1)..(1344): Ortholog of  Ceres SEQ ID NO 13584744 as cited in SEQ ID NO 69137
aaaacctttgacttcaaatttgttcttcctcttattagtcttcgtcatattttcttccttcttccatcttttagttctgataagttaacattttcataagacctcaaaaatagctcctacatttgttatcttccttttgaagtaaacaatctttttttttgttctgttatcaaagactccttcttttggtgattaaactctgttcaacttctgaaaaaaagttttgatttttcttttgtctgtagtacacaaagatctcaaagtggaggaacctcggtgttttaacatctttacgaagatgaaatgcttcttattccctcttggggacaagaaagatgaaccgagaagccctaaaccggtttcaccaacgtctaacttcagtgacgtaaacaaaagcggttcagatttcagtccccgggatgtctctggaacgagcacagtatcatccactggaaggaactcgaacacaagcatgtcagctagagaaaacaacctcagagagttcaccattggtgatcttaaatctgccacaaggaacttcagcaggtctggtatgatcggggaaggcggttttggttgtgtcttctggggaacaatcaagaacttagaagacccgtcaaagaaaatcgaagtcgcggttaaacagctcggcaaaagagggttgcagggtcataaagaatgggtgactgaagtggactttctcggtgtagtcgagcattcaaacttggtgaagttgctgggacattgtgcagaagacgatgaacgtggaatccaaaggcttttggtttatgaatatatgccaaaccaaagtgtcgagttccatttatctccgcggtcaccgacagtacttacttgggacctcaggttgagaatagcacaagacgcagctcgaggtttaacataccttcatgaagaaatggactttcagataatctttcgtgatttcaagtcatccaacattctactagacgagaattggacagcgaagctttcggatttcggtttggctcgcttaggtccttcaccaggatcaagccatgtttctactgatgtagttggaacaatgggttacgcagctccagagtatatccaaaccggtcgtctcacgtcgaaaagcgatgtgtggggatacggagttttcatctatgagctcattacaggaaggaggccactagaccggaacaagcctaaaggagagcagaagcttttagaatgggtgagaccttacttatccgacacaagaaggttccggctcatagtagacccgaggctcgaggggaagtacatgatcaagtcagtgcagaaactcgcggttgtagccaacctttgccttactagaaacgc

SEQ ID NO: 35186 - protein, 348 aa, Arabidopsis thaliana
  peptide (1)..(348): Ceres Seq. ID no. 12333672
MKCFLFPLGDKKDEPRSPKPVSPTSNFSDVNKSGSDFSPRDVSGTSTVSSTGRNSNTSMSARENNLREFTIGDLKSATRNFSRSGMIGEGGFGCVFWGTIKNLEDPSKKIEVAVKQLGKRGLQGHKEWVTEVDFLGVVEHSNLVKLLGHCAEDDERGIQRLLVYEYMPNQSVEFHLSPRSPTVLTWDLRLRIAQDAARGLTYLHEEMDFQIIFRDFKSSNILLDENWTAKLSDFGLARLGPSPGSSHVSTDVVGTMGYAAPEYIQTGRLTSKSDVWGYGVFIYELITGRRPLDRNKPKGEQKLLEWVRPYLSDTRRFRLIVDPRLEGKYMIKSVQKLAVVANLCLTRN

SEQ ID NO: 35187 - protein, 290 aa, Arabidopsis thaliana
  peptide (1)..(290): Ceres Seq. ID no. 12333673
MSARENNLREFTIGDLKSATRNFSRSGMIGEGGFGCVFWGTIKNLEDPSKKIEVAVKQLGKRGLQGHKEWVTEVDFLGVVEHSNLVKLLGHCAEDDERGIQRLLVYEYMPNQSVEFHLSPRSPTVLTWDLRLRIAQDAARGLTYLHEEMDFQIIFRDFKSSNILLDENWTAKLSDFGLARLGPSPGSSHVSTDVVGTMGYAAPEYIQTGRLTSKSDVWGYGVFIYELITGRRPLDRNKPKGEQKLLEWVRPYLSDTRRFRLIVDPRLEGKYMIKSVQKLAVVANLCLTRN

SEQ ID NO: 35188 - protein, 263 aa, Arabidopsis thaliana
  peptide (1)..(263): Ceres Seq. ID no. 12333674
MIGEGGFGCVFWGTIKNLEDPSKKIEVAVKQLGKRGLQGHKEWVTEVDFLGVVEHSNLVKLLGHCAEDDERGIQRLLVYEYMPNQSVEFHLSPRSPTVLTWDLRLRIAQDAARGLTYLHEEMDFQIIFRDFKSSNILLDENWTAKLSDFGLARLGPSPGSSHVSTDVVGTMGYAAPEYIQTGRLTSKSDVWGYGVFIYELITGRRPLDRNKPKGEQKLLEWVRPYLSDTRRFRLIVDPRLEGKYMIKSVQKLAVVANLCLTRN

SEQ ID NO: 35189 - DNA, 1643 bp, Arabidopsis thaliana
  misc_feature (1)..(1643): Ceres Seq. ID no. 12335609
  misc_feature (1)..(1643): Ortholog of  Ceres SEQ ID NO 14312216 as cited in SEQ ID NO 53930
  misc_feature (1)..(1643): Ortholog of  Ceres SEQ ID NO 13656404 as cited in SEQ ID NO 65806
  misc_feature (1)..(1643): Ortholog of  Ceres SEQ ID NO 12779935 as cited in SEQ ID NO 66774
  misc_feature (1)..(1643): Ortholog of  Ceres SEQ ID NO 13598695 as cited in SEQ ID NO 67368
  misc_feature (1)..(1643): Ortholog of  Ceres SEQ ID NO 13591174 as cited in SEQ ID NO 68289
ttcttcttcgtttatttcaccttttttggtttctttagctcagaaaaagcccattctttttttctattcttgtttattttaatcatactgtgcgtttctacaaagtttgttcctttcttcttcaactctctcactcacggtcacagactcacagagatctgtttctttcttttatttttgctttcactcttctcttccagtgagagagagtgagagaaaacaaaatggtgaagcttttgttagtagggtttgttgtggctggtataatactgggaactcaagcaaatgaatatttagatttcaatgtgacagaaatagatcgcattgaggaattagagtttggattttccaaatatagctccaatttgaaccctttaatggttggtctcacccttatcagaggagctgattctggagctgtttgtttggatggaacattgcctggatatcacttgcaccgtggacatggatctggagctaatagctggctcattcaattggagggaggaggatggtgcaacaacatcaggacctgtgtatacaggaagactactcgacgtggttcctctaattatatggagaaacagcttcagtttacaggaatactgagtgacaaagctcaagaaaatcctgactttttcaactggaatagagttaagcttcgttactgcgatggcgcttctttcagtggagatggccagaatcaggctgcacaacttcagtttagaggagagcgtatctggagagccgcaatagatgatttgaaggcgaatggaatgcgatacgccaatcaggcacttctctccggatgctctgctggtggtttagcagcaatcttgcgctgcgatgagtttaggaacttattccctggatcaaccaaagtcaagtgcttgagtgatgcaggcttgttcttggacactgccgatgtttcaggcggccgcacaatcaggaacttatacaatggtgtcgtagaattgcagagtgtgaagaacaatcttccacgtatatgcacaaaccatcttgatccaacctcgtgtttcttcccacaaaatctgatcagtcaaatgaaaactccactttttatcgtcaacgcagcatatgatacatggcagattcaaagcagtatagctccaacatcagctgatcctagtggattttggcatgactgcagactaaaccatggaaaatgtactcctgcacagttgagattcttgcaaggattcagggaacagatgcttagagtagtcaagggcttctcaatgtctagacagaatggattgttcatcaattcttgctttgctcactgccaaaccgagagacaagatacttggtttgccgatgattctcctgttatcaggaaaaaggcggtggcaatagctgtaggagattggtatttcgatagagcggaagtgaagttagtcgattgcccatacccgtgtgacaagagctgccacaacttggtgttcagatgattgtttgactatgttctttattctctctcatatatacataccttagaaaatttctttctttcaaaaggaaagattttgtatcctttggtagtaaccaatgcctcattggtatatgattaagtgtatcgtggaaaatcataataaaaaaacaaaacaaaacaaagtttgctt

SEQ ID NO: 35190 - protein, 415 aa, Arabidopsis thaliana
  peptide (1)..(415): Ceres Seq. ID no. 12335610
MVKLLLVGFVVAGIILGTQANEYLDFNVTEIDRIEELEFGFSKYSSNLNPLMVGLTLIRGADSGAVCLDGTLPGYHLHRGHGSGANSWLIQLEGGGWCNNIRTCVYRKTTRRGSSNYMEKQLQFTGILSDKAQENPDFFNWNRVKLRYCDGASFSGDGQNQAAQLQFRGERIWRAAIDDLKANGMRYANQALLSGCSAGGLAAILRCDEFRNLFPGSTKVKCLSDAGLFLDTADVSGGRTIRNLYNGVVELQSVKNNLPRICTNHLDPTSCFFPQNLISQMKTPLFIVNAAYDTWQIQSSIAPTSADPSGFWHDCRLNHGKCTPAQLRFLQGFREQMLRVVKGFSMSRQNGLFINSCFAHCQTERQDTWFADDSPVIRKKAVAIAVGDWYFDRAEVKLVDCPYPCDKSCHNLVFR

SEQ ID NO: 35191 - protein, 364 aa, Arabidopsis thaliana
  peptide (1)..(364): Ceres Seq. ID no. 12335611
MVGLTLIRGADSGAVCLDGTLPGYHLHRGHGSGANSWLIQLEGGGWCNNIRTCVYRKTTRRGSSNYMEKQLQFTGILSDKAQENPDFFNWNRVKLRYCDGASFSGDGQNQAAQLQFRGERIWRAAIDDLKANGMRYANQALLSGCSAGGLAAILRCDEFRNLFPGSTKVKCLSDAGLFLDTADVSGGRTIRNLYNGVVELQSVKNNLPRICTNHLDPTSCFFPQNLISQMKTPLFIVNAAYDTWQIQSSIAPTSADPSGFWHDCRLNHGKCTPAQLRFLQGFREQMLRVVKGFSMSRQNGLFINSCFAHCQTERQDTWFADDSPVIRKKAVAIAVGDWYFDRAEVKLVDCPYPCDKSCHNLVFR

SEQ ID NO: 35192 - protein, 298 aa, Arabidopsis thaliana
  peptide (1)..(298): Ceres Seq. ID no. 12335612
MEKQLQFTGILSDKAQENPDFFNWNRVKLRYCDGASFSGDGQNQAAQLQFRGERIWRAAIDDLKANGMRYANQALLSGCSAGGLAAILRCDEFRNLFPGSTKVKCLSDAGLFLDTADVSGGRTIRNLYNGVVELQSVKNNLPRICTNHLDPTSCFFPQNLISQMKTPLFIVNAAYDTWQIQSSIAPTSADPSGFWHDCRLNHGKCTPAQLRFLQGFREQMLRVVKGFSMSRQNGLFINSCFAHCQTERQDTWFADDSPVIRKKAVAIAVGDWYFDRAEVKLVDCPYPCDKSCHNLVFR

SEQ ID NO: 35193 - DNA, 2303 bp, Arabidopsis thaliana
  misc_feature (1)..(2303): Ceres Seq. ID no. 13490817
  misc_feature (1)..(2303): Ortholog of  Ceres SEQ ID NO 14308787 as cited in SEQ ID NO 55614
  misc_feature (1)..(2303): Ortholog of  Ceres SEQ ID NO 13656547 as cited in SEQ ID NO 65935
  misc_feature (1)..(2303): Ortholog of  Ceres SEQ ID NO 15176721 as cited in SEQ ID NO 0
gtgcaacaacctaaccatggaaattgcaatttgcaaacatggcgctcgcgctctcgctgtcggcatgttctcctccactccgccgcactcgtcgtgccggttttcgaacaagctgctcgatcttcgcgaatccagcacagcgagccaagaggaagctgcttgagctgatctccgaggaggatcgaggtctgagaacccagaaagaccccaagaagcgagatgaaatcgtgaacgccatcgaatccatgacggttatcgggcgcagctccatcaccacagacgactctctatctgccacgtggcggctcttgtggacgacggagaaggaacagttgttcatcatagaaaaggcaggcttgtttgggacgaccgccggagacgttttgcaggtgatcgatgtgaataaacggatcctcaataacgtcatcactttcccgccggacggggttttcttcgtacgctccgatatcgatatcgcttccccgcagagagtcaatttcagattcaatagtgcggtattgagagggaagaactgggagctcccactgccaccatttgggaagggctggtttgagaatgtgtatatggacggtgagatcagagtggccaaggacatcagaggagactacttaattgttgatcgtgctccttataactggactgaatcatttgtataatttgtgatgctttttgcttcttgtataagttatacaccatttctgtctctctcctttatcattgggcctcaaatagatgatgcaggaatatagggaggaggaggaagaggaatttgaaggatcattcaaagtgtcatccttgagtttatttagggtttttgtctgtgtttgttacaaacacaccacccacattttctatgcccttttttaatgttattttcacaatccatgacttaaaaggccaacactaatcctttgtctcttatttcattgtgaactcacaaagatgttggtgtccgcaagggtagagaaacaaaagcgtgttgcttatcaggggaaggcgacagtgcttgctctcggtaaggccttgccgagcaatgttgtttcccaggagaatctcgtggaggagtatctccgtgaaatcaaatgcgataacctttctatcaaagacaagctgcaacacttgtgcaaaagcacaactgtcaagacacgctacacagtcatgtcacgggagacgctgcacaaataccctgaactagcaaccgagggttccccaaccatcaaacagaggcttgagattgcaaacgatgcggttgtgcagatggcatatgaagcgagcttggtttgcatcaaggaatggggaagggcagtggaagatatcactcatcttgtctacgtttcctccagtgagttccgtttgcccggaggtgatctttacctctcggcacagctgggccttagcaacgaggttcagagagtgatgctgtattttcttggatgctatggaggtttgagtgggctgcgcgtggccaaagacattgctgagaacaacccagggagccgtgtgttgctcaccacctctgagactaccgttctggggttccgcccacccaacaaagctcgtccttacaacttagtcggggctgcactctttggagatggagcagctgccctgatcatcggagcagaccctacagagtcggaatctcctttcatggagcttcactgtgctatgcagcagttcctgccccaaacacagggggtgatcgacgggcggctgtcagaagagggcataaccttcaagctaggaagagacctccctcagaagatcgaagacaacgtggaggagttctgcaagaagctagtggcaaaggctggctctggtgcgttggagttgaatgaccttttctgggcagttcatcctggtggaccagccatcctgagcgggctggagacaaagctgaagctgaagccggaaaagctggaatgcagcagaagggcgttgatggattatgggaacgtaagcagcaacaccatcttctacataatggacaaagtcagggatgagcttgagaagaaaggcacagagggagaagagtggggtctgggcttagctttcggaccgggaatcactttcgaaggctttctcatgaggaacctctaaatgtatatgaactggacatttctcaacaaataaaatatacaggaaccgatgctaacacacatacatcatgtaatggttgcattagttttgttctttaatggtaaatcacagaaatacatcaatacagtaagtttatatacataattgaagtattcttcaatggcatcttacttcatgcattc

SEQ ID NO: 35194 - protein, 385 aa, Arabidopsis thaliana
  peptide (1)..(385): Ceres Seq. ID no. 13490818
MLVSARVEKQKRVAYQGKATVLALGKALPSNVVSQENLVEEYLREIKCDNLSIKDKLQHLCKSTTVKTRYTVMSRETLHKYPELATEGSPTIKQRLEIANDAVVQMAYEASLVCIKEWGRAVEDITHLVYVSSSEFRLPGGDLYLSAQLGLSNEVQRVMLYFLGCYGGLSGLRVAKDIAENNPGSRVLLTTSETTVLGFRPPNKARPYNLVGAALFGDGAAALIIGADPTESESPFMELHCAMQQFLPQTQGVIDGRLSEEGITFKLGRDLPQKIEDNVEEFCKKLVAKAGSGALELNDLFWAVHPGGPAILSGLETKLKLKPEKLECSRRALMDYGNVSSNTIFYIMDKVRDELEKKGTEGEEWGLGLAFGPGITFEGFLMRNL

SEQ ID NO: 35195 - protein, 313 aa, Arabidopsis thaliana
  peptide (1)..(313): Ceres Seq. ID no. 13490819
MSRETLHKYPELATEGSPTIKQRLEIANDAVVQMAYEASLVCIKEWGRAVEDITHLVYVSSSEFRLPGGDLYLSAQLGLSNEVQRVMLYFLGCYGGLSGLRVAKDIAENNPGSRVLLTTSETTVLGFRPPNKARPYNLVGAALFGDGAAALIIGADPTESESPFMELHCAMQQFLPQTQGVIDGRLSEEGITFKLGRDLPQKIEDNVEEFCKKLVAKAGSGALELNDLFWAVHPGGPAILSGLETKLKLKPEKLECSRRALMDYGNVSSNTIFYIMDKVRDELEKKGTEGEEWGLGLAFGPGITFEGFLMRNL

SEQ ID NO: 35196 - protein, 280 aa, Arabidopsis thaliana
  peptide (1)..(280): Ceres Seq. ID no. 13490820
MAYEASLVCIKEWGRAVEDITHLVYVSSSEFRLPGGDLYLSAQLGLSNEVQRVMLYFLGCYGGLSGLRVAKDIAENNPGSRVLLTTSETTVLGFRPPNKARPYNLVGAALFGDGAAALIIGADPTESESPFMELHCAMQQFLPQTQGVIDGRLSEEGITFKLGRDLPQKIEDNVEEFCKKLVAKAGSGALELNDLFWAVHPGGPAILSGLETKLKLKPEKLECSRRALMDYGNVSSNTIFYIMDKVRDELEKKGTEGEEWGLGLAFGPGITFEGFLMRNL

SEQ ID NO: 35197 - DNA, 1325 bp, Arabidopsis thaliana
  misc_feature (1)..(1325): Ceres Seq. ID no. 13499787
  misc_feature (1)..(1325): Ortholog of  Ceres SEQ ID NO 12364737 as cited in SEQ ID NO 51089
  misc_feature (1)..(1325): Ortholog of  Ceres SEQ ID NO 13594147 as cited in SEQ ID NO 58975
  misc_feature (1)..(1325): Ortholog of  Ceres SEQ ID NO 13597380 as cited in SEQ ID NO 64054
  misc_feature (1)..(1325): Ortholog of  Ceres SEQ ID NO 12625474 as cited in SEQ ID NO 64169
tcaagcaaaatcccctctaaccatcagacttacaaatctagtccatataatacaataagcccacttttcttcttctctcatcaagctttttcttctctcctcatttttcgtataattcgatttgcgaaaaatggtcgagggagagtccaaggcattgtggattattttggccaccgtgtttgcagtcgcggcggtggcaccagcggtgcatggacagcaaacgccgtgttacttcgtgtttggagactctgtcttcgacaacggtaacaacaatgccttgaacaccaaggccaaggtcaactatttaccttatggtatagattactttcaaggtccaaccggtcggtttagcaacggtcggaatattccagacgttatcgctgaactagcgggtttcaataacccaattccaccatttgccggagcatcacaggcacaagctaacatcggactcaactatgcttccggtgccggcggtatccgcgaagaaaccagcgaaaatatgggtgagagaatcagtttgagacagcaagtaaacaaccacttttccgctatcataaccgcggcggtgccactgagtcggttaaggcaatgtctatacacaatcaacatcggaagcaacgattacctcaacaactacttcttgtcgcctcctactctagctcgtcgtctatttaatcctgaccagtacgctcgatctctcataagcctctaccgtatctatctgacgcaattgtacgtactaggagcgaggaatgtagcgttgttcggtatcggtaagatcggatgtacaccacggattgttgctaccctcggtggcggcactggctgcgcagaagaagtgaaccaagccgtgatcatcttcaacactaaactcaaagccctagtcacagatttcaacaacaaaccgggagctatgttcacttatgttgatctcttctctggaaatgctgaagatttcgccgctctagggattacggttggtgataggagttgctgtacggttaatccgggtgaagaactttgtgcggcgaacggaccggtttgtccagacagaaacaaattcatattctgggataacgtgcatactacggaagtgataaatactgtggtggctaacgcagcgtttaacggacctatagctagtccgttcaacatatcccagttagtgaattaaaattagggctctattccattgttaaaatggcatagtccctttatttaaaacttggtttcgtctagattgaaaccatatatcagacacatatgtaataatgatggaataatatatcagatagactgaataatgaataaaacggattgac

SEQ ID NO: 35198 - protein, 348 aa, Arabidopsis thaliana
  peptide (1)..(348): Ceres Seq. ID no. 13499788
MVEGESKALWIILATVFAVAAVAPAVHGQQTPCYFVFGDSVFDNGNNNALNTKAKVNYLPYGIDYFQGPTGRFSNGRNIPDVIAELAGFNNPIPPFAGASQAQANIGLNYASGAGGIREETSENMGERISLRQQVNNHFSAIITAAVPLSRLRQCLYTINIGSNDYLNNYFLSPPTLARRLFNPDQYARSLISLYRIYLTQLYVLGARNVALFGIGKIGCTPRIVATLGGGTGCAEEVNQAVIIFNTKLKALVTDFNNKPGAMFTYVDLFSGNAEDFAALGITVGDRSCCTVNPGEELCAANGPVCPDRNKFIFWDNVHTTEVINTVVANAAFNGPIASPFNISQLVN

SEQ ID NO: 35199 - protein, 224 aa, Arabidopsis thaliana
  peptide (1)..(224): Ceres Seq. ID no. 13499789
MGERISLRQQVNNHFSAIITAAVPLSRLRQCLYTINIGSNDYLNNYFLSPPTLARRLFNPDQYARSLISLYRIYLTQLYVLGARNVALFGIGKIGCTPRIVATLGGGTGCAEEVNQAVIIFNTKLKALVTDFNNKPGAMFTYVDLFSGNAEDFAALGITVGDRSCCTVNPGEELCAANGPVCPDRNKFIFWDNVHTTEVINTVVANAAFNGPIASPFNISQLVN

SEQ ID NO: 35200 - DNA, 1197 bp, Arabidopsis thaliana
  misc_feature (1)..(1197): Ceres Seq. ID no. 12335613
  misc_feature (1)..(1197): Ortholog of  Ceres SEQ ID NO 12465955 as cited in SEQ ID NO 147
aaatttaatgtcgctctcaaaactcatttttttcatatgaattttctaacacaaacaattttccttggaaatctccgccttgtatctcttatataactcatctctctatactccgaacatgtccctctccgttaaccttaacggccatatcagccgccgcagctgaaaccgacgtctctctccgtcgcagatctaactctcttaacggaaaccacactaacggcgtcgccattgacggaaccctagacaacaacaaccgtcgcgtcggagatacaaacactcacatggatatatctgctaagaaaactgacaacggctacgccaatggtgtcggaggaggaggatggagaagcaaagcgtcgttcacgacgtggacggcgcgtgatatcgtctacgtggtgagataccattggataccgtgcatgttcgctgccggacttctgttcttcatgggcgtggagtacacgcttcagatgattcccgcgagatctgagccgttcgatcttgggtttgtggtcacgcgctctttgaatcgcgtattagcatcttcaccggatcttaacactgttttagccgcactaaacacggtgttcgtagggatgcaaacaacgtatattgtatggacatggttagtggaaggacgagcacgagccaccatcgcggctttattcatgttcacttgtcgcggcattctcggctactctactcagcttcctctccctcaggactttctaggatcaggggttgattttccggtgggaaatgtctctttcttcctcttcttctctggccatgtcgccggctcgatgatcgcatcattggacatgagaagaatgcagaggttgagacttgcaatggtctttgacatcctcaatgtattacagtcgatcagactgctcggtacaagaggacattacacaatcgaccttgcggttggagttggcgctgggattctcttcgactcattggccggaaagtacgaagagatgatgagcaagagacatttaggcactggttttagtttgatttcgaaagactctctagtcaattaaatttgttttctatcagaatgtttagttgagttgaatctagcgtaatgaatttttttgtttttctttgaaatggttctacttgactaccgttatttgaacctaactaagtgtgatcaatcttatgttaaggggtattacatagtct

SEQ ID NO: 35201 - protein, 255 aa, Arabidopsis thaliana
  peptide (1)..(255): Ceres Seq. ID no. 12335614
MDISAKKTDNGYANGVGGGGWRSKASFTTWTARDIVYVVRYHWIPCMFAAGLLFFMGVEYTLQMIPARSEPFDLGFVVTRSLNRVLASSPDLNTVLAALNTVFVGMQTTYIVWTWLVEGRARATIAALFMFTCRGILGYSTQLPLPQDFLGSGVDFPVGNVSFFLFFSGHVAGSMIASLDMRRMQRLRLAMVFDILNVLQSIRLLGTRGHYTIDLAVGVGAGILFDSLAGKYEEMMSKRHLGTGFSLISKDSLVN

SEQ ID NO: 35202 - protein, 209 aa, Arabidopsis thaliana
  peptide (1)..(209): Ceres Seq. ID no. 12335615
MFAAGLLFFMGVEYTLQMIPARSEPFDLGFVVTRSLNRVLASSPDLNTVLAALNTVFVGMQTTYIVWTWLVEGRARATIAALFMFTCRGILGYSTQLPLPQDFLGSGVDFPVGNVSFFLFFSGHVAGSMIASLDMRRMQRLRLAMVFDILNVLQSIRLLGTRGHYTIDLAVGVGAGILFDSLAGKYEEMMSKRHLGTGFSLISKDSLVN

SEQ ID NO: 35203 - protein, 200 aa, Arabidopsis thaliana
  peptide (1)..(200): Ceres Seq. ID no. 12335616
MGVEYTLQMIPARSEPFDLGFVVTRSLNRVLASSPDLNTVLAALNTVFVGMQTTYIVWTWLVEGRARATIAALFMFTCRGILGYSTQLPLPQDFLGSGVDFPVGNVSFFLFFSGHVAGSMIASLDMRRMQRLRLAMVFDILNVLQSIRLLGTRGHYTIDLAVGVGAGILFDSLAGKYEEMMSKRHLGTGFSLISKDSLVN

SEQ ID NO: 35204 - DNA, 1249 bp, Arabidopsis thaliana
  misc_feature (1)..(1249): Ceres Seq. ID no. 13491254
  misc_feature (1)..(1249): Ortholog of  Ceres SEQ ID NO 12609394 as cited in SEQ ID NO 52095
aaaagtcaaagttgttcactttacctataaaaacgctctctcactttcttttcaatggcttcttcttcttgtttccttcgctcgattctcttctcttctcctactaaccttcgttcaaatcaccatctccccactttcttccccaagaattatctcatttgctctcattccacttcttctcgcttcgaatcgctctcggtttcatcgatcggaactggatctaccaagaaatcatccgatactcggagaaaggtaaagagcatggctacgacaaatataggaaaggaggagaagaaaagagtcgagatttatgatctcgaagagaatttagtgattgatttggctaaattcacagcagatctctccgataagttttgtaaagagagaggcgctttcaccgtcgttgtctccggtggctctctcatcaaatcactccggaaattagtagaatctccttacgttgattctatagattgggcaaggtggcattttttctgggttgacgagagagttgttcccaagaatcacgatgatagcaactataaactcgcttatgatagttttctatccaaggtaccaattccgcctggaaatgtatatgcaatcaacgaagccctctccgctgaggctgcagcggatgattacgagacctgcctcaaacatttggtcaacaccaacattctccgtgtatctgaatcaactggctttcccaaatttgatctcatgcttctaggtatgggacctgatggtcatgtggcatcattattccctgggcatggtctctgcaacgagagcaagaaatgggtagtttcaatctctgactctccaaaaccaccgtctgagagaatcaccttcacgttcccggtcatcaactcatctgcacatgtagctctagttgtttgcggttctgggaaagctgaagctgtggaggcagctttaaagaagactgggaatgtaccacctgctggttctgtttctgctgaagacgagttggtttggttcctggacaaaccagcatcttccaagctctaaaaacaggtggtatgcttcccattccagtgaacttaccaatgtgactagtccggtttagtttttggattttgactctttggttctctccatttatgttgtgggaagagactgttgtgataaaagcgtgtactttacatggaaataatgaactaatcaatggtttctctgatttgttttggtgtattttggttaaaatctatcggaaccaacactctcc

SEQ ID NO: 35205 - protein, 325 aa, Arabidopsis thaliana
  peptide (1)..(325): Ceres Seq. ID no. 13491255
MASSSCFLRSILFSSPTNLRSNHHLPTFFPKNYLICSHSTSSRFESLSVSSIGTGSTKKSSDTRRKVKSMATTNIGKEEKKRVEIYDLEENLVIDLAKFTADLSDKFCKERGAFTVVVSGGSLIKSLRKLVESPYVDSIDWARWHFFWVDERVVPKNHDDSNYKLAYDSFLSKVPIPPGNVYAINEALSAEAAADDYETCLKHLVNTNILRVSESTGFPKFDLMLLGMGPDGHVASLFPGHGLCNESKKWVVSISDSPKPPSERITFTFPVINSSAHVALVVCGSGKAEAVEAALKKTGNVPPAGSVSAEDELVWFLDKPASSKL

SEQ ID NO: 35206 - protein, 256 aa, Arabidopsis thaliana
  peptide (1)..(256): Ceres Seq. ID no. 13491256
MATTNIGKEEKKRVEIYDLEENLVIDLAKFTADLSDKFCKERGAFTVVVSGGSLIKSLRKLVESPYVDSIDWARWHFFWVDERVVPKNHDDSNYKLAYDSFLSKVPIPPGNVYAINEALSAEAAADDYETCLKHLVNTNILRVSESTGFPKFDLMLLGMGPDGHVASLFPGHGLCNESKKWVVSISDSPKPPSERITFTFPVINSSAHVALVVCGSGKAEAVEAALKKTGNVPPAGSVSAEDELVWFLDKPASSKL

SEQ ID NO: 35207 - DNA, 1337 bp, Arabidopsis thaliana
  misc_feature (1)..(1337): Ceres Seq. ID no. 12562139
  misc_feature (1)..(1337): Ortholog of  Ceres SEQ ID NO 14310547 as cited in SEQ ID NO 55132
  misc_feature (1)..(1337): Ortholog of  Ceres SEQ ID NO 13596261 as cited in SEQ ID NO 67817
  misc_feature (1)..(1337): Ortholog of  Ceres SEQ ID NO 13662360 as cited in SEQ ID NO 68830
tggaaagacggaagatggtatccatcatttcggtgttctcgaaggatggtttggtcaccattggtggaatggaagagctgctattcttctgattactactcttggtgtgtntgctccattggcttgcttcaagcgaatcgattctttgaaatttacatcggccttatccgtggctctggcggttgtgtttctcattattactgcgggaatttcaattatgaagttgatcagtggcggtgtggcgatgccaagattgttaccagatgttactgacttaacatctttctggaatctcttcacagttgtacctgttcttgtcacagcattcatttgccattacaatgttcacagcatacagaacgagctcgaagactcctctcagataagacctgttgttcgatcagcacttatgctctgctcatctgtttacataatgacaagtattttcgggttcctcttgtttggtgatgatactcttgatgatgtccttgcaaactttgacactgatcttggaatcccttttggttctatccttaatgatgcggttcgagttagctacgcgcttcatttgatgctcgtgttcccgattgttttctaccctcttcggattaacattgacgggctcttgttcccttccgctcgatcattatctacctcaaatgtgaggttcggttgcctcactgccggtcttatctctgtaatcttcttgggtgcaaacttcatcccaagcatttgggatgctttccaattcactggagcaaccgccgctgtctgtctcggcttcatcttcccagcttctattatactaaaggatcgtcatgacaaagcaacaaacagggacacaaccttagctattttcatgattgttcttgcggtattgtccaatgcaatcgccatttacagcgatgcttatgcactattcaagaagaacgcgcctcgtgagtagtcccgggaatgagaaaatgtgcagtttggtgtttctgtatgaagaaggaaaaaagcgtttgttttgtcttctatgtgaaatcaaataatgaagaagacaagacttctcttctcttatatgtttgtactattgtcgttgagtgttctaagcggacttttgcttcggggttatataccaccatgagtgttgtttgtaaaaaactctgtataaaaattgtaatgcagatacatattttgccttttcatgactctcttagctattgcttcataactatatacatatttaggcacaaagccacctagatttctcttagaaatgccatgttctaggcgtaaacatatactaatctgttgtatcattcatagtttataataaccaaaccaagcttttg

SEQ ID NO: 35208 - protein, 314 aa, Arabidopsis thaliana
  peptide (1)..(314): Ceres Seq. ID no. 12562140
  misc_feature (37)..(37): Xaa is any aa, unknown or other
GKTEDGIHHFGVLEGWFGHHWWNGRAAILLITTLGVXAPLACFKRIDSLKFTSALSVALAVVFLIITAGISIMKLISGGVAMPRLLPDVTDLTSFWNLFTVVPVLVTAFICHYNVHSIQNELEDSSQIRPVVRSALMLCSSVYIMTSIFGFLLFGDDTLDDVLANFDTDLGIPFGSILNDAVRVSYALHLMLVFPIVFYPLRINIDGLLFPSARSLSTSNVRFGCLTAGLISVIFLGANFIPSIWDAFQFTGATAAVCLGFIFPASIILKDRHDKATNRDTTLAIFMIVLAVLSNAIAIYSDAYALFKKNAPRE

SEQ ID NO: 35209 - protein, 242 aa, Arabidopsis thaliana
  peptide (1)..(242): Ceres Seq. ID no. 12562141
MKLISGGVAMPRLLPDVTDLTSFWNLFTVVPVLVTAFICHYNVHSIQNELEDSSQIRPVVRSALMLCSSVYIMTSIFGFLLFGDDTLDDVLANFDTDLGIPFGSILNDAVRVSYALHLMLVFPIVFYPLRINIDGLLFPSARSLSTSNVRFGCLTAGLISVIFLGANFIPSIWDAFQFTGATAAVCLGFIFPASIILKDRHDKATNRDTTLAIFMIVLAVLSNAIAIYSDAYALFKKNAPRE

SEQ ID NO: 35210 - protein, 233 aa, Arabidopsis thaliana
  peptide (1)..(233): Ceres Seq. ID no. 12562142
MPRLLPDVTDLTSFWNLFTVVPVLVTAFICHYNVHSIQNELEDSSQIRPVVRSALMLCSSVYIMTSIFGFLLFGDDTLDDVLANFDTDLGIPFGSILNDAVRVSYALHLMLVFPIVFYPLRINIDGLLFPSARSLSTSNVRFGCLTAGLISVIFLGANFIPSIWDAFQFTGATAAVCLGFIFPASIILKDRHDKATNRDTTLAIFMIVLAVLSNAIAIYSDAYALFKKNAPRE

SEQ ID NO: 35211 - DNA, 1174 bp, Arabidopsis thaliana
  misc_feature (1)..(1174): Ceres Seq. ID no. 13591839
  misc_feature (1)..(1174): Ortholog of  Ceres SEQ ID NO 15175666 as cited in SEQ ID NO 54985
  misc_feature (1)..(1174): Ortholog of  Ceres SEQ ID NO 14310460 as cited in SEQ ID NO 55105
  misc_feature (1)..(1174): Ortholog of  Ceres SEQ ID NO 13597740 as cited in SEQ ID NO 64482
  misc_feature (1)..(1174): Ortholog of  Ceres SEQ ID NO 15179888 as cited in SEQ ID NO 66879
  misc_feature (1)..(1174): Ortholog of  Ceres SEQ ID NO 13596056 as cited in SEQ ID NO 68307
  misc_feature (1)..(1174): Ortholog of  Ceres SEQ ID NO 12388689 as cited in SEQ ID NO 0
gtgagggtggttttatctctttggcccaaatttcggtgtaaccaaaaaaatcttcacacacatccttgaccattttcttgttcatcgctctctttcttcttcacaaatcctaaacgagtaggagctatggctgcaccgattgttgatgcggagtacttgaaagagatcactaaggctcgccgtgagctccgttctctcatcgcgaacaagaactgtgctcctatcatgctccgattggcatggcacgatgctggaacctatgatgctcaatcgaagaccggtggacctaatggctctatcaggaacgaagaagagcacactcatggtgccaacagtggtttgaagatcgctctcgatctctgtgagggcgtgaaagctaagcatcccaaaatcacatacgcagacctgtatcagcttgctggtgtggtagcagttgaggttactggtggacctgacatcgtgttcgttcccgggagaaaggattcaaatgtctgccccaaggaaggaagacttcctgatgccaaacaaggtttccaacatctcagagatgtcttctaccgcatgggactatctgataaggatattgtggcactctcagggggtcatactctgggaagggctcacccagagaggtcaggctttgatggaccatggacccaagagccgctgaagtttgacaactcctacttcgtggaactgctgaaaggagaatcagagggcttgttgaaacttccaactgacaagaccttattggaagacccggagttccgtcgtcttgttgagctttatgcaaaggatgaagatgcattcttcagagactacgcggaatcgcacaagaaactctctgagcttggtttcaacccaaactcctcagcaggcaaagcagttgcagacagcacgattctggcacagagtgcgttcggggttgcagttgctgctgcggttgtggcatttggttacttttacgagatccggaagaggatgaagtaaacgaaataggaagtaaaacacgaagcaacgatgctcttatttgggtattaaagaaactattaatcgtctatcgaatctattttgctgctacaagattctaaactctttgaatccacgattctactgtttagtagtaaaaaagttaaaaagtcaatattttgggtccgtgattcatttttgcgat

SEQ ID NO: 35212 - protein, 287 aa, Arabidopsis thaliana
  peptide (1)..(287): Ceres Seq. ID no. 13591840
MAAPIVDAEYLKEITKARRELRSLIANKNCAPIMLRLAWHDAGTYDAQSKTGGPNGSIRNEEEHTHGANSGLKIALDLCEGVKAKHPKITYADLYQLAGVVAVEVTGGPDIVFVPGRKDSNVCPKEGRLPDAKQGFQHLRDVFYRMGLSDKDIVALSGGHTLGRAHPERSGFDGPWTQEPLKFDNSYFVELLKGESEGLLKLPTDKTLLEDPEFRRLVELYAKDEDAFFRDYAESHKKLSELGFNPNSSAGKAVADSTILAQSAFGVAVAAAVVAFGYFYEIRKRMK

SEQ ID NO: 35213 - protein, 254 aa, Arabidopsis thaliana
  peptide (1)..(254): Ceres Seq. ID no. 13591841
MLRLAWHDAGTYDAQSKTGGPNGSIRNEEEHTHGANSGLKIALDLCEGVKAKHPKITYADLYQLAGVVAVEVTGGPDIVFVPGRKDSNVCPKEGRLPDAKQGFQHLRDVFYRMGLSDKDIVALSGGHTLGRAHPERSGFDGPWTQEPLKFDNSYFVELLKGESEGLLKLPTDKTLLEDPEFRRLVELYAKDEDAFFRDYAESHKKLSELGFNPNSSAGKAVADSTILAQSAFGVAVAAAVVAFGYFYEIRKRMK

SEQ ID NO: 35214 - DNA, 941 bp, Arabidopsis thaliana
  misc_feature (1)..(941): Ceres Seq. ID no. 12322285
  misc_feature (1)..(941): Ortholog of  Ceres SEQ ID NO 13594037 as cited in SEQ ID NO 55666
  misc_feature (1)..(941): Ortholog of  Ceres SEQ ID NO 13657707 as cited in SEQ ID NO 66407
atagaatataaaagttgctaaatttgattaaagatatggacaaagttccaagattttttgtttgttaatcttaaaatgttttatgttattacttggttttggttttggtaggagttctcggtgatggatttatggctcgtgatttaactatagagaacacggcaggagcagatgcgcaccaagcggttgcgtttagatcagacagtgatttttcggtacttgaaaactgcgagtttcttgggaaccaagacactctttatgctcactctctccgtcagttctacaaacaatgtcgaatccaaggcaacgtagacttcatctttggtaactcagctgccgtattccaagattgtgatatcctaatcgcttcaaaacactccaaactcgagcaaggcggtgcaaacaacgcgatcacagcacacgggaggattgatgcgtcgcagtccacgggatttgtgtttttgaactgttcgattaacggaacagaggaatacatgaaggagtttcaagctaaccctgaaaggcataagaacttcttgggaagaccgtggaaggagttttcgaggacggtttttgtaaactgtaatcttgagtctttgattagtcctgatggatggatgccttggaacggggatttcgcattgaagactttgtattacggtgagtataagaatacgggtccgggatcggttagatcgagtagggttccatggagtagtgagataccagagaagcatgttgatgtttactctgttgccaattttattcaggctgatgagtgggcttccacgactgcttgatttttgttaaaggaaacatgaggttttaggattttgaaaagaagagaagagaagtcgtcattgtaactttattgtagtgtcaaatattagtgtggtttctttatcgctcattggggattcataatagattaataattgaag

SEQ ID NO: 35215 - protein, 222 aa, Arabidopsis thaliana
  peptide (1)..(222): Ceres Seq. ID no. 12322286
MARDLTIENTAGADAHQAVAFRSDSDFSVLENCEFLGNQDTLYAHSLRQFYKQCRIQGNVDFIFGNSAAVFQDCDILIASKHSKLEQGGANNAITAHGRIDASQSTGFVFLNCSINGTEEYMKEFQANPERHKNFLGRPWKEFSRTVFVNCNLESLISPDGWMPWNGDFALKTLYYGEYKNTGPGSVRSSRVPWSSEIPEKHVDVYSVANFIQADEWASTTA

SEQ ID NO: 35216 - DNA, 785 bp, Arabidopsis thaliana
  misc_feature (1)..(785): Ceres Seq. ID no. 12325167
  misc_feature (1)..(785): Ortholog of  Ceres SEQ ID NO 13597908 as cited in SEQ ID NO 64404
gagaagaagaatggtgacaagaatggcgacgaaggtgagtttggaagggaagagagtggttttggtaccgtacatggcggaacatgtaccaaagtaccatcaatggatgcaagattcggctcttcttgaagctacgggatctgagccgttgagtcttgagcaagagtatgagatgcagctttcttggactcaagatcccaataagcggactttcattgtcttggacaaggatttcgttaagggagacctggctcatggccaacctcatgtagaagcaatgacaggtgatgtgaacatttacatgaatgatgtggatgatccaaaggttgcagaagttgaaataatgatagctgagcccagaagccgtggtaaaggactaggaaaggaatctgtgttgataatgatggcttatggtgtcaagaacttggagattcacaagtttacagccaaaattggggaatcaaacacagcttccctcagcttattccgcaaactaggtttcgaggagtcttcttacagcggtatcttcaaagaggttacactcgagtatccggtgactaatctccgtcgagaagagctcttgaagttattggatgaagtcattaggcacactcattcatcgaacaacccatcagactcactgctatcaggagaagctactgcataaagcattttcttcagtgtttattgttatttttctcttcaacttaggaaagaatttgaaatcattgtagcatgtatgagtttataaattatgattactaatatacatggtccattgtttc

SEQ ID NO: 35217 - protein, 221 aa, Arabidopsis thaliana
  peptide (1)..(221): Ceres Seq. ID no. 12325168
RRRMVTRMATKVSLEGKRVVLVPYMAEHVPKYHQWMQDSALLEATGSEPLSLEQEYEMQLSWTQDPNKRTFIVLDKDFVKGDLAHGQPHVEAMTGDVNIYMNDVDDPKVAEVEIMIAEPRSRGKGLGKESVLIMMAYGVKNLEIHKFTAKIGESNTASLSLFRKLGFEESSYSGIFKEVTLEYPVTNLRREELLKLLDEVIRHTHSSNNPSDSLLSGEATA

SEQ ID NO: 35218 - protein, 218 aa, Arabidopsis thaliana
  peptide (1)..(218): Ceres Seq. ID no. 12325169
MVTRMATKVSLEGKRVVLVPYMAEHVPKYHQWMQDSALLEATGSEPLSLEQEYEMQLSWTQDPNKRTFIVLDKDFVKGDLAHGQPHVEAMTGDVNIYMNDVDDPKVAEVEIMIAEPRSRGKGLGKESVLIMMAYGVKNLEIHKFTAKIGESNTASLSLFRKLGFEESSYSGIFKEVTLEYPVTNLRREELLKLLDEVIRHTHSSNNPSDSLLSGEATA

SEQ ID NO: 35219 - protein, 214 aa, Arabidopsis thaliana
  peptide (1)..(214): Ceres Seq. ID no. 12325170
MATKVSLEGKRVVLVPYMAEHVPKYHQWMQDSALLEATGSEPLSLEQEYEMQLSWTQDPNKRTFIVLDKDFVKGDLAHGQPHVEAMTGDVNIYMNDVDDPKVAEVEIMIAEPRSRGKGLGKESVLIMMAYGVKNLEIHKFTAKIGESNTASLSLFRKLGFEESSYSGIFKEVTLEYPVTNLRREELLKLLDEVIRHTHSSNNPSDSLLSGEATA

SEQ ID NO: 35220 - DNA, 765 bp, Arabidopsis thaliana
  misc_feature (1)..(765): Ceres Seq. ID no. 12322107
  misc_feature (1)..(765): Ortholog of  Ceres SEQ ID NO 13662677 as cited in SEQ ID NO 63824
atcttcgagggaaagagaaagatcacaagaaaaagctctctcagaataatcgcaatggcttcaaagctcgtgatcatcattgtgttcattctagatctcattgctgttggattagccattgctgccgaacaaagaagaagtgtcggtaaggttgttccggatggtgagaaggaatttgagcattgtgagtatggctcagacatagctacaagttatggagctggtgcatttgtgcttctcttcattagtcaagtcattattatggtggctagtcggtgtttctgctgcggcaaagctcttaaacccggtggttcaagagcttgtggcattatgctcttccttatttgctgggtgtttttcttgattgctgaggtatgtttctcgcgggatcaatcagaaacgcgtaccacactacgtacagaaggatgtggaacatcgaaaaccctcctagctgtgaagtgatccgtaaaggagtgtttgctgctggtgcttcctttgctctcttcactgctattgtctctcagttctattacatctcctattctcgtgcccgagacggttaccaaaccccacattactagtgagtagtgagatccagaacaagaaaagctaaaccctgaatgagtttgtccatttatccactcactgatcaataggatattaaaatttgatgatgttagtcattttgcttcttgcttgtatcacaattgtttttttttgttttcttgtgatgtataaaatcttattaatatagacagctattct

SEQ ID NO: 35221 - protein, 153 aa, Arabidopsis thaliana
  peptide (1)..(153): Ceres Seq. ID no. 12322108
IFEGKRKITRKSSLRIIAMASKLVIIIVFILDLIAVGLAIAAEQRRSVGKVVPDGEKEFEHCEYGSDIATSYGAGAFVLLFISQVIIMVASRCFCCGKALKPGGSRACGIMLFLICWVFFLIAEVCFSRDQSETRTTLRTEGCGTSKTLLAVK

SEQ ID NO: 35222 - protein, 135 aa, Arabidopsis thaliana
  peptide (1)..(135): Ceres Seq. ID no. 12322109
MASKLVIIIVFILDLIAVGLAIAAEQRRSVGKVVPDGEKEFEHCEYGSDIATSYGAGAFVLLFISQVIIMVASRCFCCGKALKPGGSRACGIMLFLICWVFFLIAEVCFSRDQSETRTTLRTEGCGTSKTLLAVK

SEQ ID NO: 35223 - DNA, 1377 bp, Arabidopsis thaliana
  misc_feature (1)..(1377): Ceres Seq. ID no. 13603958
  misc_feature (1)..(1377): Ortholog of  Ceres SEQ ID NO 12364737 as cited in SEQ ID NO 51089
  misc_feature (1)..(1377): Ortholog of  Ceres SEQ ID NO 14311515 as cited in SEQ ID NO 51680
  misc_feature (1)..(1377): Ortholog of  Ceres SEQ ID NO 13582301 as cited in SEQ ID NO 56509
  misc_feature (1)..(1377): Ortholog of  Ceres SEQ ID NO 14315035 as cited in SEQ ID NO 56880
  misc_feature (1)..(1377): Ortholog of  Ceres SEQ ID NO 13594276 as cited in SEQ ID NO 57728
  misc_feature (1)..(1377): Ortholog of  Ceres SEQ ID NO 13594147 as cited in SEQ ID NO 58975
  misc_feature (1)..(1377): Ortholog of  Ceres SEQ ID NO 13655302 as cited in SEQ ID NO 63307
  misc_feature (1)..(1377): Ortholog of  Ceres SEQ ID NO 13597380 as cited in SEQ ID NO 64054
  misc_feature (1)..(1377): Ortholog of  Ceres SEQ ID NO 12625474 as cited in SEQ ID NO 64169
  misc_feature (1)..(1377): Ortholog of  Ceres SEQ ID NO 13597502 as cited in SEQ ID NO 64681
attcttcaaaactatattatataaacacatttttcgtttcttcacattcacaaaacatctctctctttcttctcccattcactcactatcttgctcctagaaaaagatggcgagaatgagtttgatgatcatgatgattatggttgctgtgaccatgattaacattgctaagagtgatcccattgcaccatgttacttcatatttggtgactctttggttgataatggcaacaataatcagcttcagtcattagctagagctaattactttccttacggtattgactttgctgccggtccaaccggtcggtttagcaacggcttaaccactgtcgatgttatcgctcagcttttgggtttcgaggactacattacaccttacgcttctgcaagaggacaagacattctccgaggagttaactatgcttccgctgctgccggaatccgagacgaaaccggcagacaattgggaggtcgaatagcatttgcagggcaagtagcaaatcacgtgaacactgtgtcacaagtagtgaacatacttggtgatcaaaacgaagcctcgaattacctcagcaaatgcatttactctatcggattaggcagtaacgattatcttaacaactacttcatgcctactttttactctaccggtaaccagttctcccccgaatcctatgccgacgatctcgttgcccgttacaccgaacaactcagggtactgtataccaatggagcgaggaagtttgcgttgataggagtcggggcaatcggttgcagcccgaacgagctagctcaaaacagcagagacggaagaacgtgtgacgaaagaatcaactcagcgaacagaatctttaacagcaaactcatatctatagtcgacgcttttaaccagaacacaccagatgcaaaattcacttacatcaacgcttatggcatcttccaagacattattacaaaccctgctcgctacgggtttagagtgacaaatgcaggatgttgtggagttgggaggaacaatggacagataacttgtcttccaggtcaagcaccatgtctaaataggaatgagtatgtgttttgggatgcgtttcatcccggtgaagctgcgaatattgttattggaagacgatcttttaagcgagaagctgcttctgatgctcatccttatgatattcagcagctagcatctctctaaagagagaaagatcttttggttgtctaagtattttgatagttcttcaatggcagctgagttttggactcaagaagaagtgatttggtttgtgttgtgtgatgtcataactgtttatgtaatgatttggagttactgtttatctctttttctcttaacagttttataaatttgattctttcatt

SEQ ID NO: 35224 - protein, 362 aa, Arabidopsis thaliana; identical to SEQ ID NO: 30581
  peptide (1)..(362): Ceres Seq. ID no. 13603959

SEQ ID NO: 35225 - protein, 359 aa, Arabidopsis thaliana; identical to SEQ ID NO: 30582
  peptide (1)..(359): Ceres Seq. ID no. 13603960

SEQ ID NO: 35226 - protein, 356 aa, Arabidopsis thaliana; identical to SEQ ID NO: 30583
  peptide (1)..(356): Ceres Seq. ID no. 13603961

SEQ ID NO: 35227 - DNA, 1244 bp, Arabidopsis thaliana
  misc_feature (1)..(1244): Ceres Seq. ID no. 13488403
  misc_feature (1)..(1244): Ortholog of  Ceres SEQ ID NO 13598499 as cited in SEQ ID NO 64013
aaaaaaaaaaaacgagcagctgtttatcttccaacaaagcttcttcgtgcatcttcgctcttctcaactcgtcatcctctccctctgattctcttaagtcgccttgaaaaattaagacaaaacaacaacaaaagaacaagagaagctctaaaatccagcagctatggcgtttcttctccccaatctctctccttctttccttcttccgaccggaaaatcactcaaagagaaacccatttccaaccaagctttatcatcatcatcatcatcgtccaatagctacgagtttgaagaagatagtctctctccactttctctctttagcgtccaggctcctcctcctgttcgaggtgcgcaggttaagaccaaaccaagtgcgcaggataagtaccagcacggcagcaaagatgacttctacatcaatctcggtttagctgtacgtacccttcgcgaagatttgcctctcctcttcaccaaagatctcaattacgacatttacagggatgatataacattagtggatccaatgaacacgttctctgggattgacaactacaaattgatcttctgggcacttagatttcatggcaagattctcttcagggatatctcacttgagatcttcagggtttggcaaccatcagagaacatgattctcatcaggtggaatcttaaaggtgtacctagagtcccatgggaggcaaagggagagtttcagggtacttctcgctataaactcgaccgaaatggcaaaatctatgagcataaggtcgataacttggccttcaacttccctcaccagctcaaacctgccacttctgttttggatatggtcaccgcttgccctgcaagtcccaatccaactttcatgtttggcgccatggattcatactcatcttcttggattgagttctacaaagcagtgcaaaggacactagacaagcaagaagagcaaatgcttgtgcaagaccatttcgtcccatgctcataatgccattaggtcacactcaggtgtatatatatatactgttacattgaagatacaatacatatatctatgtgtgcaggcatatgcatatgagtagatgtggttgacttagatatcaaagagggtagggaaccaagaatactcatgagcttgtacaacttgcctattgaatgtaaacagaattccttacagttgttttgttatgtaaaacacattgatgatttgtctttacgatcaagcgaaattatatcccttg

SEQ ID NO: 35228 - protein, 275 aa, Arabidopsis thaliana
  peptide (1)..(275): Ceres Seq. ID no. 13488404
MAFLLPNLSPSFLLPTGKSLKEKPISNQALSSSSSSSNSYEFEEDSLSPLSLFSVQAPPPVRGAQVKTKPSAQDKYQHGSKDDFYINLGLAVRTLREDLPLLFTKDLNYDIYRDDITLVDPMNTFSGIDNYKLIFWALRFHGKILFRDISLEIFRVWQPSENMILIRWNLKGVPRVPWEAKGEFQGTSRYKLDRNGKIYEHKVDNLAFNFPHQLKPATSVLDMVTACPASPNPTFMFGAMDSYSSSWIEFYKAVQRTLDKQEEQMLVQDHFVPCS

SEQ ID NO: 35229 - protein, 154 aa, Arabidopsis thaliana
  peptide (1)..(154): Ceres Seq. ID no. 13488405
MNTFSGIDNYKLIFWALRFHGKILFRDISLEIFRVWQPSENMILIRWNLKGVPRVPWEAKGEFQGTSRYKLDRNGKIYEHKVDNLAFNFPHQLKPATSVLDMVTACPASPNPTFMFGAMDSYSSSWIEFYKAVQRTLDKQEEQMLVQDHFVPCS

SEQ ID NO: 35230 - DNA, 1097 bp, Arabidopsis thaliana
  misc_feature (1)..(1097): Ceres Seq. ID no. 12334453
  misc_feature (1)..(1097): Ortholog of  Ceres SEQ ID NO 13662984 as cited in SEQ ID NO 64419
attcggtttcatttccacgagatctctttggctttcttgttgagatctttccacaagaaagtttagttgttttcttcttcctgtgatttcttcgcctaattttttctggatttaaaaacacgagaagtcaaggtgaaatattatcgaagtctctgaatctgtgtttgaatggaaccatcatctggaaccggtcctgagaagagaccaaccgttgacttggtcaaggatagaaatggaacggatcagattcttcttcagaatcctagaggcgcctctgtaaagattagtttacatggaggacaagttctttcatggaagactgacaagggtgatgaattgttattcaacagcaccaaggccaacttgaagcctccccatccggtacgaggaggaatccctatatgctttcctcagtttggaactcggggatcacttgagcaacacgggtttgcaagaaacaagatgtggcttgtagaaaacaatccacctgctttaccttcatttgactcaactggaaaagcctatgttgatttggtgcttaagtcatctgatgaagatacgatgaggatctggccttacagctttgagtttcatctgagagtctcattggcattagatgggaacctaacactgatatcacgagtcagaaacatcaattcaaagccttttagcttttccattgcttaccacacttacttctccatttccgatattagtgaagttagacttgaagggctggaaactcttgactatcttgataatatgcatgatagagagcggttcacagagcaaggcgatgcattaacctttgaatcagagatcgatagagtgtacctaaattctaaagacgtggttgccattttcgaccatgagagaaaacgcacattcctcatcaagaaagaaggtctacctgatgtcgtggtatggaatccatgggagaagaaagcgagagcattgacggatttgggagatgatgagtatagacacatgttgtgtgtggatggagcagccattgagaaacccatcaccttgaaaccgggtgaagaatggaccgggaaattacatctctcgcttgttctttccacctaaaacccggt

SEQ ID NO: 35231 - protein, 306 aa, Arabidopsis thaliana
  peptide (1)..(306): Ceres Seq. ID no. 12334454
MEPSSGTGPEKRPTVDLVKDRNGTDQILLQNPRGASVKISLHGGQVLSWKTDKGDELLFNSTKANLKPPHPVRGGIPICFPQFGTRGSLEQHGFARNKMWLVENNPPALPSFDSTGKAYVDLVLKSSDEDTMRIWPYSFEFHLRVSLALDGNLTLISRVRNINSKPFSFSIAYHTYFSISDISEVRLEGLETLDYLDNMHDRERFTEQGDALTFESEIDRVYLNSKDVVAIFDHERKRTFLIKKEGLPDVVVWNPWEKKARALTDLGDDEYRHMLCVDGAAIEKPITLKPGEEWTGKLHLSLVLST

SEQ ID NO: 35232 - protein, 208 aa, Arabidopsis thaliana
  peptide (1)..(208): Ceres Seq. ID no. 12334455
MWLVENNPPALPSFDSTGKAYVDLVLKSSDEDTMRIWPYSFEFHLRVSLALDGNLTLISRVRNINSKPFSFSIAYHTYFSISDISEVRLEGLETLDYLDNMHDRERFTEQGDALTFESEIDRVYLNSKDVVAIFDHERKRTFLIKKEGLPDVVVWNPWEKKARALTDLGDDEYRHMLCVDGAAIEKPITLKPGEEWTGKLHLSLVLST

SEQ ID NO: 35233 - protein, 175 aa, Arabidopsis thaliana
  peptide (1)..(175): Ceres Seq. ID no. 12334456
MRIWPYSFEFHLRVSLALDGNLTLISRVRNINSKPFSFSIAYHTYFSISDISEVRLEGLETLDYLDNMHDRERFTEQGDALTFESEIDRVYLNSKDVVAIFDHERKRTFLIKKEGLPDVVVWNPWEKKARALTDLGDDEYRHMLCVDGAAIEKPITLKPGEEWTGKLHLSLVLST

SEQ ID NO: 35234 - DNA, 1683 bp, Arabidopsis thaliana
  misc_feature (1)..(1683): Ceres Seq. ID no. 13488989
  misc_feature (1)..(1683): Ortholog of  Ceres SEQ ID NO 14311854 as cited in SEQ ID NO 51455
  misc_feature (1)..(1683): Ortholog of  Ceres SEQ ID NO 14313097 as cited in SEQ ID NO 58902
gtcttcttcttcttcttctttttttttcgtaaaaattcttcttcttcttcttcttctccgagctccgtccgagcagagaagaagagtaaggtaagttttagagtgcacttgtgtggcactctcatttcttatcctgcgcctcttacgatttcttatggtgcgcttctccgactagtttcggtgtctaatggactcttcctcttcttctctatctctccaagaaaaaatctcttctggttatttctagggtttcgttggttcttttttcgaaatgctttggataacgagatttgctggattattctccgccgcgatggcagtgatcgtgttatctccgtcgcttcagtcatttcctccggcggcggcaatccgttcttctccatcaccgatcttcagaaaagctccagcggtgttcaacaacggcgacgaatgtctctcctccggcggcgtctgcaatccgtcgttggtccacgtggcgatcacgttagacgtagagtacctgcgtggctcaatcgcagccgttaactcgatccttcagcactcggtgtgtccagagagcgtcttcttccacttcatcgccgtctccgaggaaacaaacctgttggagtcgctggtgagatcggttttcccgagactgaaattcaatatttacgattttgcccctgagacagttcgtggtttgatttcttcttccgtgagacaagctctcgagcagcctctgaactacgctagaagctacttagcggatctgctggagccttgtgttaaccgtgtcatatacttggattcggatcttgtcgtcgtcgatgacatcgctaagctttggaaaactagcctaggctcgaggataatcggagctccggagtattgtcacgcgaatttcacgaaatacttcaccggaggattctggtcggaggagagattctccggtacctttagagggaggaagccatgttacttcaacacaggtgtgatggtgatagatcttaagaaatggagaagaggtggttacacgaaacgtatcgagaaatggatggagattcagagaagagagaggatttacgaactaggctcgcttccaccgtttcttctagttttctccggtcacgtggctcccatctctcaccggtggaaccagcatggacttggtggtgacaatgttagaggtagctgtcgtgatttgcatcctggtcctgtgagtttgctgcattggtctggtagtggcaagccctggataagactcgattccaaacggccttgtcccttagacgcattatggacgccttacgacttgtatcgacattcgcattgacgtttcagcgaatggtggtgctatatgaggagagagtagaggaaggtttcattggtcttgaccggcccagtctgaaagaaaatcaaaggtagcttttgtagtagaagatgaaaaccctttgccgataaaatgggtttggtttagccaaaccggagacacaactgagatgtgggaattttattttcaaaccggcgggttggatcatatttttttttgttttgttgggggacaagaaaaatcaatcagagttaggttattcatgtggatgagattctgtttttttttttatcattaatttgtgtttaaaaaacattctttcttattttgtgcagatacttattctctttgaaaaataataattagaattaccc

SEQ ID NO: 35235 - protein, 346 aa, Arabidopsis thaliana
  peptide (1)..(346): Ceres Seq. ID no. 13488990
MLWITRFAGLFSAAMAVIVLSPSLQSFPPAAAIRSSPSPIFRKAPAVFNNGDECLSSGGVCNPSLVHVAITLDVEYLRGSIAAVNSILQHSVCPESVFFHFIAVSEETNLLESLVRSVFPRLKFNIYDFAPETVRGLISSSVRQALEQPLNYARSYLADLLEPCVNRVIYLDSDLVVVDDIAKLWKTSLGSRIIGAPEYCHANFTKYFTGGFWSEERFSGTFRGRKPCYFNTGVMVIDLKKWRRGGYTKRIEKWMEIQRRERIYELGSLPPFLLVFSGHVAPISHRWNQHGLGGDNVRGSCRDLHPGPVSLLHWSGSGKPWIRLDSKRPCPLDALWTPYDLYRHSH

SEQ ID NO: 35236 - protein, 332 aa, Arabidopsis thaliana
  peptide (1)..(332): Ceres Seq. ID no. 13488991
MAVIVLSPSLQSFPPAAAIRSSPSPIFRKAPAVFNNGDECLSSGGVCNPSLVHVAITLDVEYLRGSIAAVNSILQHSVCPESVFFHFIAVSEETNLLESLVRSVFPRLKFNIYDFAPETVRGLISSSVRQALEQPLNYARSYLADLLEPCVNRVIYLDSDLVVVDDIAKLWKTSLGSRIIGAPEYCHANFTKYFTGGFWSEERFSGTFRGRKPCYFNTGVMVIDLKKWRRGGYTKRIEKWMEIQRRERIYELGSLPPFLLVFSGHVAPISHRWNQHGLGGDNVRGSCRDLHPGPVSLLHWSGSGKPWIRLDSKRPCPLDALWTPYDLYRHSH

SEQ ID NO: 35237 - protein, 174 aa, Arabidopsis thaliana
  peptide (1)..(174): Ceres Seq. ID no. 13488992
VFFFFFFFFRKNSSSSSSSPSSVRAEKKSKVSFRVHLCGTLISYPAPLTISYGALLRLVSVSNGLFLFFSISPRKNLFWLFLGFRWFFFRNALDNEICWIILRRDGSDRVISVASVISSGGGNPFFSITDLQKSSSGVQQRRRMSLLRRRLQSVVGPRGDHVRRRVPAWLNRSR

SEQ ID NO: 35238 - DNA, 1664 bp, Arabidopsis thaliana
  misc_feature (1)..(1664): Ceres Seq. ID no. 12334766
  misc_feature (1)..(1664): Ortholog of  Ceres SEQ ID NO 14303770 as cited in SEQ ID NO 53890
attgtgagtcactctctctgtttctcatctcctcatctttttatcttctttgattgatccacatggcttccgctgccgcaagttccgccttttcactccttaagtccaccggcgctgttgcttcctccgccggaactcgcgcacgtgcctcccttctgccaattccctctacctctgtttccgcgcgtcctctaggcttctccgccactctagattcccgtcgtttctctctccacgttgcttccaaagttgaatcggtgcgtgggaagggaagcagaggagtggtttctatggcgaagaagagcgtcggagatctgacctcagctgatttgaaggggaagaaggttttcgtgagagctgatctcaatgtacctctcgatgataatcagactatcactgacgataccagaatccgtgccgccattccaacgatcaagtatttgattgaaaatggtgctaaagttatcctctccactcatctgggaaggccaaagggagtcaccccaaagtttagtttggctcctcttgtccctaggctctccgagcttcttggtattgaggtcacgaaagctgatgattgtattggcccagaagtggaaagcttggtggcttctctacctgaaggtggagttttgcttcttgagaacgtcaggttttacaaggaggaagagaagaacgatcctgagtttgctaagaagcttgcttctctagctgacctttatgtcaatgatgctttcggaactgctcacagagctcatgcttctaccgaaggagtcactaagttcttgaagccttcagttgctggtttccttttgcaaaaggaactggactacctagttggtgctgtttcaaacccaaagagaccatttgcagccatagtgggtggttccaaagtctcatccaagattggagttattgaatcgcttctggagaagtgtgatattcttcttcttggtggtggaatgatcttcacattctacaaggcacagggtctttcagttggttcgtcccttgttgaagaagacaagcttgaattggctacagaactccttgccaaagctaaggccaaaggagtctctcttttgttgccaacagatgttgtagttgctgacaagtttgctcctgatgccaacagcaagattgtgcctgcatcaggcattgaggacggatggatgggactggacattggtccagactctatcaaaactttcaacgaagctctggacacaacacaaacagtcatttggaatggacctatgggagttttcgagatggaaaagtttgcggctggaacagaggcgatagcgaataaactagcagagctaagtgaaaaaggagtgacaacgataataggaggaggagactcagtggctgcagtggagaaagtaggagtagcaggagtcatgagtcacatctccactggtggtggagccagcttggagctgttggaaggaaaagtacttcccggtgtgatcgcccttgatgaagcaatcccagtcactgtttagaaactcttaccatctataaggcaaacgctgtatacttaaaagagtttctttcgctttaaatctacctatgcaaaactttactatgtatcagagtctcattccccggaaaagaaaactcacatattaaaattctgaaaaaaaatatcaagagataag

SEQ ID NO: 35239 - protein, 481 aa, Arabidopsis thaliana
  peptide (1)..(481): Ceres Seq. ID no. 12334767
MASAAASSAFSLLKSTGAVASSAGTRARASLLPIPSTSVSARPLGFSATLDSRRFSLHVASKVESVRGKGSRGVVSMAKKSVGDLTSADLKGKKVFVRADLNVPLDDNQTITDDTRIRAAIPTIKYLIENGAKVILSTHLGRPKGVTPKFSLAPLVPRLSELLGIEVTKADDCIGPEVESLVASLPEGGVLLLENVRFYKEEEKNDPEFAKKLASLADLYVNDAFGTAHRAHASTEGVTKFLKPSVAGFLLQKELDYLVGAVSNPKRPFAAIVGGSKVSSKIGVIESLLEKCDILLLGGGMIFTFYKAQGLSVGSSLVEEDKLELATELLAKAKAKGVSLLLPTDVVVADKFAPDANSKIVPASGIEDGWMGLDIGPDSIKTFNEALDTTQTVIWNGPMGVFEMEKFAAGTEAIANKLAELSEKGVTTIIGGGDSVAAVEKVGVAGVMSHISTGGGASLELLEGKVLPGVIALDEAIPVTV

SEQ ID NO: 35240 - protein, 405 aa, Arabidopsis thaliana
  peptide (1)..(405): Ceres Seq. ID no. 12334768
MAKKSVGDLTSADLKGKKVFVRADLNVPLDDNQTITDDTRIRAAIPTIKYLIENGAKVILSTHLGRPKGVTPKFSLAPLVPRLSELLGIEVTKADDCIGPEVESLVASLPEGGVLLLENVRFYKEEEKNDPEFAKKLASLADLYVNDAFGTAHRAHASTEGVTKFLKPSVAGFLLQKELDYLVGAVSNPKRPFAAIVGGSKVSSKIGVIESLLEKCDILLLGGGMIFTFYKAQGLSVGSSLVEEDKLELATELLAKAKAKGVSLLLPTDVVVADKFAPDANSKIVPASGIEDGWMGLDIGPDSIKTFNEALDTTQTVIWNGPMGVFEMEKFAAGTEAIANKLAELSEKGVTTIIGGGDSVAAVEKVGVAGVMSHISTGGGASLELLEGKVLPGVIALDEAIPVTV

SEQ ID NO: 35241 - DNA, 1351 bp, Arabidopsis thaliana
  misc_feature (1)..(1351): Ceres Seq. ID no. 12396093
  misc_feature (1)..(1351): Ortholog of  Ceres SEQ ID NO 13596585 as cited in SEQ ID NO 62424
  misc_feature (1)..(1351): Ortholog of  Ceres SEQ ID NO 15225240 as cited in SEQ ID NO 66495
ccgtttgttcttcatctcctcgccgccgcctcctactctctctttctctctaaattgctcaattctctcggccacagttctgctatagacctagacaaggatggtgactaaagcagaaaaacaattcgccaaaaatttcaacatagacgatctccctgacgtccctgccggacttcctccacatctcaaagcccagcaaactcgtgtcgtctctaaaaacaacgctcctgctcatactgcgagtgccatttactcgggtacctatgtttcttctacggaagaggacgacaatgtgaagctaggaaacttctatgataacttcaaagttgatgtggttagtctcacaaagacagatatggaatttgatatgattggtattgatgcagcgtttgccaatgcattccgaagattccttatagctgaggttccttcaatggctattgaaaaagtgtttatagcgtacaacacatcggttattatagacgaagttcttgctcacaggatgggtcttattccaattgccgcagatccaagactttttgaatatttatccgaacatgatcaggcgaatgaaaagaacaccattgtattcaaactccatgtgaaatgtccgaaaaatagaccacgtcttaaagttttaacgagtgatttaaaatggttaccaaatggaagtgagcttctgagagaatcggaaaataaaacctcaaagctaaaaacttacacttcattcagttgcagccaagattcattacctgaatttgctaataatcctatcactccatgcgacctcgatatcttgatagcaaaactcgcccctggtcaggaaatcgagctcgaagctcatgcggttaagggcattggtaaaacacatgcaaagtggtctccagtagggactgcttggtatagaatgcatcctgaggtggttctacgtggggaagttgaggatgaacttgctgaacgacttgtaaacgtctgcccacagaatgttttcgacattgaagacatgggaaaaggtaagaaaagggcaacagtagcgcagccacgtaagtgcacattgtgtaaggaatgcgtaagagacgatgatttggtagaccatgtggatcttggcagtgttaagaaccattttatatttaacattgagtccaccggatcactgcctccagaggttctcttcactgaagctgtgaagatattggaagctaaatgtgaagctataaccgacttttgagttctggtttagttcaattttgaattgtctgtctatcaatgtttctcctcctattgataaattaccaacaaacaacattgacatatttatttatacggttgttgttcaatttggattttcatt

SEQ ID NO: 35242 - protein, 375 aa, Arabidopsis thaliana
  peptide (1)..(375): Ceres Seq. ID no. 12396094
MVTKAEKQFAKNFNIDDLPDVPAGLPPHLKAQQTRVVSKNNAPAHTASAIYSGTYVSSTEEDDNVKLGNFYDNFKVDVVSLTKTDMEFDMIGIDAAFANAFRRFLIAEVPSMAIEKVFIAYNTSVIIDEVLAHRMGLIPIAADPRLFEYLSEHDQANEKNTIVFKLHVKCPKNRPRLKVLTSDLKWLPNGSELLRESENKTSKLKTYTSFSCSQDSLPEFANNPITPCDLDILIAKLAPGQEIELEAHAVKGIGKTHAKWSPVGTAWYRMHPEVVLRGEVEDELAERLVNVCPQNVFDIEDMGKGKKRATVAQPRKCTLCKECVRDDDLVDHVDLGSVKNHFIFNIESTGSLPPEVLFTEAVKILEAKCEAITDF

SEQ ID NO: 35243 - protein, 290 aa, Arabidopsis thaliana
  peptide (1)..(290): Ceres Seq. ID no. 12396095
MEFDMIGIDAAFANAFRRFLIAEVPSMAIEKVFIAYNTSVIIDEVLAHRMGLIPIAADPRLFEYLSEHDQANEKNTIVFKLHVKCPKNRPRLKVLTSDLKWLPNGSELLRESENKTSKLKTYTSFSCSQDSLPEFANNPITPCDLDILIAKLAPGQEIELEAHAVKGIGKTHAKWSPVGTAWYRMHPEVVLRGEVEDELAERLVNVCPQNVFDIEDMGKGKKRATVAQPRKCTLCKECVRDDDLVDHVDLGSVKNHFIFNIESTGSLPPEVLFTEAVKILEAKCEAITDF

SEQ ID NO: 35244 - protein, 286 aa, Arabidopsis thaliana
  peptide (1)..(286): Ceres Seq. ID no. 12396096
MIGIDAAFANAFRRFLIAEVPSMAIEKVFIAYNTSVIIDEVLAHRMGLIPIAADPRLFEYLSEHDQANEKNTIVFKLHVKCPKNRPRLKVLTSDLKWLPNGSELLRESENKTSKLKTYTSFSCSQDSLPEFANNPITPCDLDILIAKLAPGQEIELEAHAVKGIGKTHAKWSPVGTAWYRMHPEVVLRGEVEDELAERLVNVCPQNVFDIEDMGKGKKRATVAQPRKCTLCKECVRDDDLVDHVDLGSVKNHFIFNIESTGSLPPEVLFTEAVKILEAKCEAITDF

SEQ ID NO: 35245 - DNA, 667 bp, Arabidopsis thaliana
  misc_feature (1)..(667): Ceres Seq. ID no. 13490933
  misc_feature (1)..(667): Ortholog of  Ceres SEQ ID NO 13596504 as cited in SEQ ID NO 60622
aataaggcaaaaaggatttgcttttacgaacagagagcgagccagagagagtgagtaagagaatgacgagcgtgagtgggtgtggttcagtgagtctgataactaaccgcagtgcgttcttgggaaacggacttcaacaccgtgccgttttccttaaaccatggtcgtcttcttcgcttcagtctcggtccatggttgtcgaagccaaaaccaaaaccagcagcgaagacagaatcgcccgccactctcgtatccgtaagaaggttaatggtacaacagagaggccaaggctgtgtgtattccgatcaaacaagcatctttatgttcaagtgattgatgataccaagatgcacaccttagcttcagcttctactaagcagaaacctatctctgaagagttcgactacacctctggaccaaccattgaggtagcgaagaaagttggggaagtgatagcaaaatcttgcttggagaaaggtatcacaaaggtagcctttgaccgtggtggttacccttaccatggacgtattgaggctcttgctgctgcagcacgtgaacacggtcttcagttttaaccgtcgttttctttccttgtttctttccgatgaacagcagtgtatgaatgtagagaacccattttccccaattgaaatgttgagatttttct

SEQ ID NO: 35246 - protein, 170 aa, Arabidopsis thaliana
  peptide (1)..(170): Ceres Seq. ID no. 13490934
MTSVSGCGSVSLITNRSAFLGNGLQHRAVFLKPWSSSSLQSRSMVVEAKTKTSSEDRIARHSRIRKKVNGTTERPRLCVFRSNKHLYVQVIDDTKMHTLASASTKQKPISEEFDYTSGPTIEVAKKVGEVIAKSCLEKGITKVAFDRGGYPYHGRIEALAAAAREHGLQF

SEQ ID NO: 35247 - protein, 127 aa, Arabidopsis thaliana
  peptide (1)..(127): Ceres Seq. ID no. 13490935
MVVEAKTKTSSEDRIARHSRIRKKVNGTTERPRLCVFRSNKHLYVQVIDDTKMHTLASASTKQKPISEEFDYTSGPTIEVAKKVGEVIAKSCLEKGITKVAFDRGGYPYHGRIEALAAAAREHGLQF

SEQ ID NO: 35248 - DNA, 818 bp, Arabidopsis thaliana
  misc_feature (1)..(818): Ceres Seq. ID no. 12396779
  misc_feature (1)..(818): Ortholog of  Ceres SEQ ID NO 12635162 as cited in SEQ ID NO 0
  misc_feature (1)..(818): Ortholog of  Ceres SEQ ID NO 15175178 as cited in SEQ ID NO 0
aacttctctctccaaagccatcatcttaattagttttggttagtacctgcaggttcttggtttttaaagtcaaagtctcttttgtgcttctcgtaaagagcgatcatgaaagtgcttctcggtcttttgcttctcttgtccttgaccaattcttcaagtgcaatttactgtctctgtaaagatgggataggagacacagagcttcaaacatcaatagactatgcatgtggaaccttagctgattgtaatcctatacatgataagggtacttgttatcaaccagacaccatcaaaagccactgtgattgggctgtgaatagctacttccaaaacgcagctcaagtccctggaagctgcaatttctctggcactgccactaccaatccaaacccaccttccaatttggctaatggttgcatctatccgtcaagccctagctctactaggtctcctccatcaacaacaccaccaacgggaacaactcccacaaacggaaccactccatttccgggaactccatttccaggaacaccgttcccgggaactcctccggtgtttggtccaaccggagtcttcaacccaagcaacccaggcagtggtgcttcaagtttgggcacctcctctgttttcacactctgtttttcattactagcctttctatggggctctgatgtaaggttcggatttagccacgtgtagagactaaaagacatccacttgtgttagtctttgattctattttgggtggaacaagaagcttaggcgtttgttgagctttcgtctatgtaaaggttgctctaatagaaagaatcttgagt

SEQ ID NO: 35249 - protein, 197 aa, Arabidopsis thaliana
  peptide (1)..(197): Ceres Seq. ID no. 12396780
MKVLLGLLLLLSLTNSSSAIYCLCKDGIGDTELQTSIDYACGTLADCNPIHDKGTCYQPDTIKSHCDWAVNSYFQNAAQVPGSCNFSGTATTNPNPPSNLANGCIYPSSPSSTRSPPSTTPPTGTTPTNGTTPFPGTPFPGTPFPGTPPVFGPTGVFNPSNPGSGASSLGTSSVFTLCFSLLAFLWGSDVRFGFSHV

SEQ ID NO: 35250 - DNA, 542 bp, Arabidopsis thaliana
  misc_feature (1)..(542): Ceres Seq. ID no. 12348596
  misc_feature (1)..(542): Ortholog of  Ceres SEQ ID NO 14302474 as cited in SEQ ID NO 60589
ctcagaacatctcaatctcaattgaaatcttaaaatccaaaattttcccgagaaaaattaaagtttcctgagaaaatgtcaggtcgtgggaagggaggcaaaggattgggcaaaggaggagctaaacgtcacaggaaggttctgagagacaacatccaaggaatcactaagccggcgattcggagattggctcgtagaggtggagtcaagcgtattagtggtttgatctacgaggagacacgtggcgttctcaagatctttttggagaatgttatccgtgacgccgttacttacactgagcacgctcggaggaagacggtgactgctatggatgttgtttatgctcttaagagacaaggaagaactctctacggattcggcggctagggtttttgattgttgttttttgtgtttctacgtttattaggatgttaattttcagaatttggtgttaacttcgaaaaaattaaagaattgaaggttgttgttgcaatttcgtgattgttgaaggtgttgttgcaaacttnnagtaatttcagttt

SEQ ID NO: 35251 - protein, 103 aa, Arabidopsis thaliana; identical to SEQ ID NO: 7737
  peptide (1)..(103): Ceres Seq. ID no. 12348597

SEQ ID NO: 35252 - DNA, 1647 bp, Arabidopsis thaliana
  misc_feature (1)..(1647): Ceres Seq. ID no. 12561457
  misc_feature (1)..(1647): Ortholog of  Ceres SEQ ID NO 15175849 as cited in SEQ ID NO 55644
acatgttctctcccgcctgaatcatgtcaatctcccacaaaagatctttgataaaaagaattgagccctaattccttgatgtttgttgaatcgcacagcagataaaaaaaaatggtgttggcggagctcggcggccggataacccgcgccatacagcagatgaacaatgtgacaataatcgatgaaaaggttttgaatgatttcttaaacgagattactcgcgctttgctccagtccgatgtttcttttggccttgtggaaaagatgcagaccaatattaagaagatcgttaacctcgacgatctagcagctggccacaacaaacgcctgatcatcgagcaggctatcttcaaggaactctgtaggatgctggatccaggaaagcctgcctttgcccccaaaaaggccaaacctagtgtagtgatgttcgtcggtttacaaggtgctggaaaaaccacaacatgtaccaagtatgcttactatcatcagaagaaagggtacaaagcagctctagtgtgtgcggatactttcagggccggtgcttttgatcagctgaaacagaatgccaccaaggctaagatccccttttatggaagctacacagaatccgatcctgtgaaaattgctgttgagggagttgataggttcaagaaagaaaagtgtgatcttattattgttgacaccagtggtcgccataaacaagcagcttctctctttgaagaaatgcgtcaagttgctgaagcaacggaaccagatcttgttatatttgttatggatagcagtattggtcaagctgcatttgaacaagctgaagcttttaaggaaactgtatctgttggagctgtaattattactaagatggacggccatgccaagggaggtggtgctcttagcgctgttgcagctacaaaaagtcctgtgatattcattggaacaggagagcatatggatgagtttgaagtgtttgacgttaaaccatttgtcagccgtctcttaggaaagggtgattggtctggactcgtggataaactacaagaggtggtacctaaagatctacagaatgaacttgtagaaaatctctctcagggtaactttacgttgagaagtatgtacgaccagttccagtgctctctgcggattccacttaatcagcttttctcgatgctgcctggaattagtgctgaaatgatgccgaaaggacatggtgaagaaagccgagtgaagatgaagcgatacatgacaatgatggattctatgacaaataaagaacttgacagcccaaacccaaagatttttaacgagtcaaggataatgaggatagcgagagggtcagggaggttagtaagagaagtgatggagatgttggaagagtacaagaggatagcaaagacaatgaaagggatcaagatcccaaagaacggagacatgagcaaggtcataccgcctcagatgctaaaacagatgggcggcatgagcggtctgcagagtctcatgaagcagatgggttcggctaaggacatgatgggaatgtttggtggcggaggcaagtagtttctatctttcttgcacacagtgcacggagggcagtggtaaaacttttgttacatactgtattagtaccttataattttaacacatcctaacgac

SEQ ID NO: 35253 - protein, 479 aa, Arabidopsis thaliana
  peptide (1)..(479): Ceres Seq. ID no. 12561458
MVLAELGGRITRAIQQMNNVTIIDEKVLNDFLNEITRALLQSDVSFGLVEKMQTNIKKIVNLDDLAAGHNKRLIIEQAIFKELCRMLDPGKPAFAPKKAKPSVVMFVGLQGAGKTTTCTKYAYYHQKKGYKAALVCADTFRAGAFDQLKQNATKAKIPFYGSYTESDPVKIAVEGVDRFKKEKCDLIIVDTSGRHKQAASLFEEMRQVAEATEPDLVIFVMDSSIGQAAFEQAEAFKETVSVGAVIITKMDGHAKGGGALSAVAATKSPVIFIGTGEHMDEFEVFDVKPFVSRLLGKGDWSGLVDKLQEVVPKDLQNELVENLSQGNFTLRSMYDQFQCSLRIPLNQLFSMLPGISAEMMPKGHGEESRVKMKRYMTMMDSMTNKELDSPNPKIFNESRIMRIARGSGRLVREVMEMLEEYKRIAKTMKGIKIPKNGDMSKVIPPQMLKQMGGMSGLQSLMKQMGSAKDMMGMFGGGGK

SEQ ID NO: 35254 - protein, 463 aa, Arabidopsis thaliana
  peptide (1)..(463): Ceres Seq. ID no. 12561459
MNNVTIIDEKVLNDFLNEITRALLQSDVSFGLVEKMQTNIKKIVNLDDLAAGHNKRLIIEQAIFKELCRMLDPGKPAFAPKKAKPSVVMFVGLQGAGKTTTCTKYAYYHQKKGYKAALVCADTFRAGAFDQLKQNATKAKIPFYGSYTESDPVKIAVEGVDRFKKEKCDLIIVDTSGRHKQAASLFEEMRQVAEATEPDLVIFVMDSSIGQAAFEQAEAFKETVSVGAVIITKMDGHAKGGGALSAVAATKSPVIFIGTGEHMDEFEVFDVKPFVSRLLGKGDWSGLVDKLQEVVPKDLQNELVENLSQGNFTLRSMYDQFQCSLRIPLNQLFSMLPGISAEMMPKGHGEESRVKMKRYMTMMDSMTNKELDSPNPKIFNESRIMRIARGSGRLVREVMEMLEEYKRIAKTMKGIKIPKNGDMSKVIPPQMLKQMGGMSGLQSLMKQMGSAKDMMGMFGGGGK

SEQ ID NO: 35255 - protein, 428 aa, Arabidopsis thaliana
  peptide (1)..(428): Ceres Seq. ID no. 12561460
MQTNIKKIVNLDDLAAGHNKRLIIEQAIFKELCRMLDPGKPAFAPKKAKPSVVMFVGLQGAGKTTTCTKYAYYHQKKGYKAALVCADTFRAGAFDQLKQNATKAKIPFYGSYTESDPVKIAVEGVDRFKKEKCDLIIVDTSGRHKQAASLFEEMRQVAEATEPDLVIFVMDSSIGQAAFEQAEAFKETVSVGAVIITKMDGHAKGGGALSAVAATKSPVIFIGTGEHMDEFEVFDVKPFVSRLLGKGDWSGLVDKLQEVVPKDLQNELVENLSQGNFTLRSMYDQFQCSLRIPLNQLFSMLPGISAEMMPKGHGEESRVKMKRYMTMMDSMTNKELDSPNPKIFNESRIMRIARGSGRLVREVMEMLEEYKRIAKTMKGIKIPKNGDMSKVIPPQMLKQMGGMSGLQSLMKQMGSAKDMMGMFGGGGK

SEQ ID NO: 35256 - DNA, 687 bp, Arabidopsis thaliana; identical to SEQ ID NO: 30473
  misc_feature (1)..(687): Ceres Seq. ID no. 12580320
  misc_feature (1)..(687): Ortholog of  Ceres SEQ ID NO 13661089 as cited in SEQ ID NO 61053

SEQ ID NO: 35257 - protein, 95 aa, Arabidopsis thaliana; identical to SEQ ID NO: 30474
  peptide (1)..(95): Ceres Seq. ID no. 12580321

SEQ ID NO: 35258 - protein, 87 aa, Arabidopsis thaliana; identical to SEQ ID NO: 30475
  peptide (1)..(87): Ceres Seq. ID no. 12580322

SEQ ID NO: 35259 - protein, 82 aa, Arabidopsis thaliana; identical to SEQ ID NO: 30476
  peptide (1)..(82): Ceres Seq. ID no. 12580323

SEQ ID NO: 35260 - DNA, 2168 bp, Arabidopsis thaliana
  misc_feature (1)..(2168): Ceres Seq. ID no. 13488399
  misc_feature (1)..(2168): Ortholog of  Ceres SEQ ID NO 12613725 as cited in SEQ ID NO 68196
  misc_feature (1)..(2168): Ortholog of  Ceres SEQ ID NO 14301486 as cited in SEQ ID NO 69222
actacacccaaaaaagcttctaacaaagagaaagtgtctgtatgttgtgcccactctctacatttatcaatcacttcatgtgtgttaccttgattgcaaaaaagtgagaatatattctcacaacattaaatccaccccgaaatcgaagtgagtatatcacgagtgtagtaatatcttagagatggttttggaggatagaaaggacggttcttctttgccgggacgatccggtagtttctctaaatcgtcaccgtcggagttggatgttgttgatccctacaagcggataagttcgccgggatctatattggatgctgagaaggtagagaaaaagcctggaggatggagagccgtctcgttcattttaggaaatgagacgctggagagactgggatcgataggattgttggcaaacttcatggtttatctaaccaaagtgtttcacttagaacaagtcgacgctgcaaatgtcatcaacatttggtcaggtttcaccaatctcactcctctcgtcggagcgtatatctcagacacttatgttggccgcttcaagaccatcgctttcgcctcattcgccactctcctcggactaataacaattacactcacagcatcgtttcctcaactccacccagcatcatgcaacagccaggacccactcagttgcggcggtccgaataagctccagatcggagttttgctattgggactctgtttcctctccgtagggagtggaggaatacgaccttgtagcatcccttttggggttgatcagtttgaccaacgaactgaggaaggggttaaaggagtggccagtttcttcaactggtattacatgactttcactgtggttctgatcattacacagaccgtagttgtgtatatccaggatcaagtcagttggattatcggttttagtatccctaccggactcatggctcttgcggttgttatgttttttgccggaatgaagcgttatgtctacgttaaaccagaaggaagtatattctctgggatcgctcaagttatcgtggcagctcgtaagaagcgaaagctgaaacttccggcggaagatgacggcactgtcacctattacgacccagccatcaagtctagcgtgttatccaagttacaccgcagtaaccaattcaggtgtcttgacaaagccgcggtggttatagaaggtgacctaacacccgagggacctcccgcagacaagtggcggttatgcagcgtccaagaagtggaagaagtgaagtgtttgatccgaattgttcctatctggtcggccggaataatctcactcgcggccatgacaacacaaggcactttcacggtctctcaagctttgaaaatggatcgaaacttaggtcctaaattcgagattccggctggttcactctccgtcatctctctcctcacaatcggcatctttcttcccttctacgaccgcgtttttgtaccattcatgcggcgaatcaccggccataaatccggaatcacactcctccaaaggataggaacagggatcgttttcgcgatcttttctatgatcgttgcgggcattgtggagcgtatgagacgcatacgctccatcaatgccggagatccaacgggaatgactccaatgtcggtgttttggctttcgccgcagctaattctcatgggactatgtgaagcattcaatatcatcggacaaattgagttcttcaacagtcagtttccagagcacatgagaagtatcgctaactctctcttctctttatcgttcgccggttcgagctaccttagtagtttccttgtgactgtcgttcataaattctccggtgggcatgatcgtccggattggctaaacaagaatctcaacgcgggaaaattggattacttctattatctgattgcggttttgggtgtggttaatctggtttacttttggtattgtgctcggggataccggtacaaggtcggtttaccgattgaagactttgaggaggacaagtcctccgatgatgttgagatgacttcgaagaaatcgatgaaatgatttaatagactatccttagggacaacaagaagattgtcgatgttgtttgaataattactatgacaatgtatgtatcataatatgtaagaactagaatatttaataaaattttacctttcattag

SEQ ID NO: 35261 - protein, 620 aa, Arabidopsis thaliana
  peptide (1)..(620): Ceres Seq. ID no. 13488400
MVLEDRKDGSSLPGRSGSFSKSSPSELDVVDPYKRISSPGSILDAEKVEKKPGGWRAVSFILGNETLERLGSIGLLANFMVYLTKVFHLEQVDAANVINIWSGFTNLTPLVGAYISDTYVGRFKTIAFASFATLLGLITITLTASFPQLHPASCNSQDPLSCGGPNKLQIGVLLLGLCFLSVGSGGIRPCSIPFGVDQFDQRTEEGVKGVASFFNWYYMTFTVVLIITQTVVVYIQDQVSWIIGFSIPTGLMALAVVMFFAGMKRYVYVKPEGSIFSGIAQVIVAARKKRKLKLPAEDDGTVTYYDPAIKSSVLSKLHRSNQFRCLDKAAVVIEGDLTPEGPPADKWRLCSVQEVEEVKCLIRIVPIWSAGIISLAAMTTQGTFTVSQALKMDRNLGPKFEIPAGSLSVISLLTIGIFLPFYDRVFVPFMRRITGHKSGITLLQRIGTGIVFAIFSMIVAGIVERMRRIRSINAGDPTGMTPMSVFWLSPQLILMGLCEAFNIIGQIEFFNSQFPEHMRSIANSLFSLSFAGSSYLSSFLVTVVHKFSGGHDRPDWLNKNLNAGKLDYFYYLIAVLGVVNLVYFWYCARGYRYKVGLPIEDFEEDKSSDDVEMTSKKSMK

SEQ ID NO: 35262 - protein, 541 aa, Arabidopsis thaliana
  peptide (1)..(541): Ceres Seq. ID no. 13488401
MVYLTKVFHLEQVDAANVINIWSGFTNLTPLVGAYISDTYVGRFKTIAFASFATLLGLITITLTASFPQLHPASCNSQDPLSCGGPNKLQIGVLLLGLCFLSVGSGGIRPCSIPFGVDQFDQRTEEGVKGVASFFNWYYMTFTVVLIITQTVVVYIQDQVSWIIGFSIPTGLMALAVVMFFAGMKRYVYVKPEGSIFSGIAQVIVAARKKRKLKLPAEDDGTVTYYDPAIKSSVLSKLHRSNQFRCLDKAAVVIEGDLTPEGPPADKWRLCSVQEVEEVKCLIRIVPIWSAGIISLAAMTTQGTFTVSQALKMDRNLGPKFEIPAGSLSVISLLTIGIFLPFYDRVFVPFMRRITGHKSGITLLQRIGTGIVFAIFSMIVAGIVERMRRIRSINAGDPTGMTPMSVFWLSPQLILMGLCEAFNIIGQIEFFNSQFPEHMRSIANSLFSLSFAGSSYLSSFLVTVVHKFSGGHDRPDWLNKNLNAGKLDYFYYLIAVLGVVNLVYFWYCARGYRYKVGLPIEDFEEDKSSDDVEMTSKKSMK

SEQ ID NO: 35263 - protein, 402 aa, Arabidopsis thaliana
  peptide (1)..(402): Ceres Seq. ID no. 13488402
MTFTVVLIITQTVVVYIQDQVSWIIGFSIPTGLMALAVVMFFAGMKRYVYVKPEGSIFSGIAQVIVAARKKRKLKLPAEDDGTVTYYDPAIKSSVLSKLHRSNQFRCLDKAAVVIEGDLTPEGPPADKWRLCSVQEVEEVKCLIRIVPIWSAGIISLAAMTTQGTFTVSQALKMDRNLGPKFEIPAGSLSVISLLTIGIFLPFYDRVFVPFMRRITGHKSGITLLQRIGTGIVFAIFSMIVAGIVERMRRIRSINAGDPTGMTPMSVFWLSPQLILMGLCEAFNIIGQIEFFNSQFPEHMRSIANSLFSLSFAGSSYLSSFLVTVVHKFSGGHDRPDWLNKNLNAGKLDYFYYLIAVLGVVNLVYFWYCARGYRYKVGLPIEDFEEDKSSDDVEMTSKKSMK

SEQ ID NO: 35264 - DNA, 2154 bp, Arabidopsis thaliana
  misc_feature (1)..(2154): Ceres Seq. ID no. 13490925
  misc_feature (1)..(2154): Ortholog of  Ceres SEQ ID NO 13599900 as cited in SEQ ID NO 531
  misc_feature (1)..(2154): Ortholog of  Ceres SEQ ID NO 14310556 as cited in SEQ ID NO 54965
agagagagagggagaggtgcttttttagtcgttctcgtcgagagacttatttatacacgaaaaaggaagaagaagactgttgaaagcgagagagagagagagagagagagagagagagagagagagagagagatggaggatatacaggaggaagagaacggtacggacgaggaggttctgggatcgagcttgaccatggagaaagtggccgcagcgaagcagtacatcgagaatcactacaaagctcagaacaagaacattcaagagaggaaagagagacggtggatcttagaaagaaagttggcgtcttctggagtgccaaaagaggagcaaatcaacatgattaaagacctggagagaaaagagacagagtttatgaggcttaaaaggaacaagattagtgtcgatgactttgagcttttgactatcattggaagaggtgcttttggtgaggttcgcttatgtcgggagagaaagtctggaaatatttatgccatgaagaagttaaagaaatctgaaatggtcatgagaggacaggttgagcatgtcagagcagagaggaacctgctggctgaggttgaaagccattatattgtgaagctttactattcatttcaggatcccgagtatctgtatctgattatggaatatctccccggtggtgatatgatgaccttgctcatgagggaggacacattacgggaagatgttgccagattttatattgctcaaagtgtcctggccattgaatccatacacagatacaactatattcatagggatatcaaacctgataacctacttttggacaaagatgggcacatgaaactctcggactttgggctctgtaagcctcttgattgtagaaatttaccttcaattcaggagaatagggccacggatgatgaaactatgtcagaacctatggatgttgatagatgctttcctgacactgataacaagagaagctggcgcagtccccaggaacaacttcagcattggcagatgaatcgcagaaaactagcattttcaactgtgggaacaccggactatattgctcctgaagttttgctgaagaaaggatatggcatggaatgtgattggtggtcattaggtgcaattatgtacgaaatgctcgttgggtatcctcctttttatgctgatgaccctatatcaacttgcagaaagatcgtccattggagaaaccatttgaaatttcctgaggatgcgaagttttcatctgaggcaaaagatcttatctgcaggttgctgtgcaacgttgaccataggcttggtactggaggaggagcccagcaaatcaaggatcatccttggttcaaggatgttgtgtgggaaaagctctatgaaatggaggctgcgtacaaaccagaagtgaacgacgagctagatacacaaaattttatgaagtttgatgaagtgaattctcctgcacctgaaagaactagatcaggactctccaggaagatgcttcttgctcccaaggatttaagttttgttggctacacatacaagaactttgacgctgtaaaaggattgcgtcattcacttgagatggcaagaactatgtctctagatcgatcaccagctgaggcgatgcctgtggagctgataagcggggaagcagcagaggcacagatggtatcatcgatggatgatccaatgataatttgaaagaaccgatcaaagatataagatcttcctcaggtttgggatcttaaagccttctaaaaaaaaataactgtacagcaagcccagaggttaaagaggaagaagatcaaaatggtttgtgtgggagattgattaacaatgttagcctttcctgattattctgtgtattagaagaagaagacaagagaagggagaaaaagatttagaggtatgagtaaaagtctcagtgttatataaaagctgcccaggttggctgtagtaatgttgccttctctagtggcagttttattgcaacttttttactttttacctttatgtatgtgtgtgtgtgtatcaacttctatttctaaatttgaagacccaccgaggagtgaggacttagattgtatatttgagttttgttgggagtccatttctaaccaaacttgtatattaaatttaaaggatcattttgccttaggttga

SEQ ID NO: 35265 - protein, 563 aa, Arabidopsis thaliana
  peptide (1)..(563): Ceres Seq. ID no. 13490926
RERGRGAFLVVLVERLIYTRKRKKKTVESEREREREREREREREMEDIQEEENGTDEEVLGSSLTMEKVAAAKQYIENHYKAQNKNIQERKERRWILERKLASSGVPKEEQINMIKDLERKETEFMRLKRNKISVDDFELLTIIGRGAFGEVRLCRERKSGNIYAMKKLKKSEMVMRGQVEHVRAERNLLAEVESHYIVKLYYSFQDPEYLYLIMEYLPGGDMMTLLMREDTLREDVARFYIAQSVLAIESIHRYNYIHRDIKPDNLLLDKDGHMKLSDFGLCKPLDCRNLPSIQENRATDDETMSEPMDVDRCFPDTDNKRSWRSPQEQLQHWQMNRRKLAFSTVGTPDYIAPEVLLKKGYGMECDWWSLGAIMYEMLVGYPPFYADDPISTCRKIVHWRNHLKFPEDAKFSSEAKDLICRLLCNVDHRLGTGGGAQQIKDHPWFKDVVWEKLYEMEAAYKPEVNDELDTQNFMKFDEVNSPAPERTRSGLSRKMLLAPKDLSFVGYTYKNFDAVKGLRHSLEMARTMSLDRSPAEAMPVELISGEAAEAQMVSSMDDPMII

SEQ ID NO: 35266 - protein, 519 aa, Arabidopsis thaliana
  peptide (1)..(519): Ceres Seq. ID no. 13490927
MEDIQEEENGTDEEVLGSSLTMEKVAAAKQYIENHYKAQNKNIQERKERRWILERKLASSGVPKEEQINMIKDLERKETEFMRLKRNKISVDDFELLTIIGRGAFGEVRLCRERKSGNIYAMKKLKKSEMVMRGQVEHVRAERNLLAEVESHYIVKLYYSFQDPEYLYLIMEYLPGGDMMTLLMREDTLREDVARFYIAQSVLAIESIHRYNYIHRDIKPDNLLLDKDGHMKLSDFGLCKPLDCRNLPSIQENRATDDETMSEPMDVDRCFPDTDNKRSWRSPQEQLQHWQMNRRKLAFSTVGTPDYIAPEVLLKKGYGMECDWWSLGAIMYEMLVGYPPFYADDPISTCRKIVHWRNHLKFPEDAKFSSEAKDLICRLLCNVDHRLGTGGGAQQIKDHPWFKDVVWEKLYEMEAAYKPEVNDELDTQNFMKFDEVNSPAPERTRSGLSRKMLLAPKDLSFVGYTYKNFDAVKGLRHSLEMARTMSLDRSPAEAMPVELISGEAAEAQMVSSMDDPMII

SEQ ID NO: 35267 - protein, 498 aa, Arabidopsis thaliana
  peptide (1)..(498): Ceres Seq. ID no. 13490928
MEKVAAAKQYIENHYKAQNKNIQERKERRWILERKLASSGVPKEEQINMIKDLERKETEFMRLKRNKISVDDFELLTIIGRGAFGEVRLCRERKSGNIYAMKKLKKSEMVMRGQVEHVRAERNLLAEVESHYIVKLYYSFQDPEYLYLIMEYLPGGDMMTLLMREDTLREDVARFYIAQSVLAIESIHRYNYIHRDIKPDNLLLDKDGHMKLSDFGLCKPLDCRNLPSIQENRATDDETMSEPMDVDRCFPDTDNKRSWRSPQEQLQHWQMNRRKLAFSTVGTPDYIAPEVLLKKGYGMECDWWSLGAIMYEMLVGYPPFYADDPISTCRKIVHWRNHLKFPEDAKFSSEAKDLICRLLCNVDHRLGTGGGAQQIKDHPWFKDVVWEKLYEMEAAYKPEVNDELDTQNFMKFDEVNSPAPERTRSGLSRKMLLAPKDLSFVGYTYKNFDAVKGLRHSLEMARTMSLDRSPAEAMPVELISGEAAEAQMVSSMDDPMII

SEQ ID NO: 35268 - DNA, 1281 bp, Arabidopsis thaliana
  misc_feature (1)..(1281): Ceres Seq. ID no. 12326002
  misc_feature (1)..(1281): Ortholog of  Ceres SEQ ID NO 12609146 as cited in SEQ ID NO 52118
  misc_feature (1)..(1281): Ortholog of  Ceres SEQ ID NO 14303397 as cited in SEQ ID NO 54614
  misc_feature (1)..(1281): Ortholog of  Ceres SEQ ID NO 13594056 as cited in SEQ ID NO 55691
  misc_feature (1)..(1281): Ortholog of  Ceres SEQ ID NO 14314186 as cited in SEQ ID NO 57457
  misc_feature (1)..(1281): Ortholog of  Ceres SEQ ID NO 13638136 as cited in SEQ ID NO 58644
  misc_feature (1)..(1281): Ortholog of  Ceres SEQ ID NO 13596868 as cited in SEQ ID NO 62806
  misc_feature (1)..(1281): Ortholog of  Ceres SEQ ID NO 12587035 as cited in SEQ ID NO 63605
  misc_feature (1)..(1281): Ortholog of  Ceres SEQ ID NO 13595885 as cited in SEQ ID NO 69265
  misc_feature (1)..(1281): Ortholog of  Ceres SEQ ID NO 12566239 as cited in SEQ ID NO 0
  misc_feature (1)..(1281): Ortholog of  Ceres SEQ ID NO 13599119 as cited in SEQ ID NO 0
  misc_feature (1)..(1281): Ortholog of  Ceres SEQ ID NO 14308987 as cited in SEQ ID NO 0
gtgaaagaatgtagcaaataataatagagagaatttgtttagggaatacttttgccttgagaaaaatataaagaagaaaagtcgtcggcggaggaagtcagtagccaataatgataagaatcaccggctgttcacatgtggattgattacctcacattcatatttattacataaactcatctctctgtttttctttcttagaatcattcatatttcagacacaaaggcagagaaacaaattcttgtaacaatggcaggcagagagattctccataagatgaaggttggattatgcggatctgacacaggcagaggtaaaaccaaggtgtggaagaacatcgcacacggttatgactttgtgaaaggcaaagcgggccatccgatggaggactatgttgtgtctgagttcaagaaagtagacggccatgatttgggtttgtttgctatctttgatggtcacttagggcatgatgtagccaagtacttgcaaaccaatctctttgataacatactcaaagagaaggatttttggactgatacgaaaaacgctataaggaatgcatacatatcaaccgatgctgtgatattagagcagtcacttaaacttggcaaaggtggatcaacggctgtaacaggcattctgatagatgggaaaacgctagtgattgctaacgttggagactcacgtgcagtgatgtcaaagaacggtgttgcttctcaactctctgttgatcatgaaccaagcaaggaacaaaaggaaatagaaagccgtggtggctttgtatcaaatattccaggggatgttccaagagttgatggacaactagcggttgctagggcgtttggagataagagcttaaagatacatctgagctcagatccagacataagagacgagaatatcgatcatgagactgagtttatccttttcgcaagtgatggagtttggaaggtgatgtcgaaccaagaagcggtggatttgatcaaaagcataaaagatccacaagcggcagccaaggagttgatagaagaagcagtctctaagcaaagcacagacgacatttcttgtatagttgtaaggttccagtgatagataaacttttgttgtctataaactttaccattccggtgtgtgtgagagggagaaacaaaagacgtataaaacgcctatgctgtgtgatcaaagtcatgtcttgcttaaacaattccattgacaataaatgttctggccacaatgtaaaatccatggttgttgatccaatactctaaatggtttctttt

SEQ ID NO: 35269 - protein, 279 aa, Arabidopsis thaliana
  peptide (1)..(279): Ceres Seq. ID no. 12326003
MAGREILHKMKVGLCGSDTGRGKTKVWKNIAHGYDFVKGKAGHPMEDYVVSEFKKVDGHDLGLFAIFDGHLGHDVAKYLQTNLFDNILKEKDFWTDTKNAIRNAYISTDAVILEQSLKLGKGGSTAVTGILIDGKTLVIANVGDSRAVMSKNGVASQLSVDHEPSKEQKEIESRGGFVSNIPGDVPRVDGQLAVARAFGDKSLKIHLSSDPDIRDENIDHETEFILFASDGVWKVMSNQEAVDLIKSIKDPQAAAKELIEEAVSKQSTDDISCIVVRFQ

SEQ ID NO: 35270 - protein, 270 aa, Arabidopsis thaliana
  peptide (1)..(270): Ceres Seq. ID no. 12326004
MKVGLCGSDTGRGKTKVWKNIAHGYDFVKGKAGHPMEDYVVSEFKKVDGHDLGLFAIFDGHLGHDVAKYLQTNLFDNILKEKDFWTDTKNAIRNAYISTDAVILEQSLKLGKGGSTAVTGILIDGKTLVIANVGDSRAVMSKNGVASQLSVDHEPSKEQKEIESRGGFVSNIPGDVPRVDGQLAVARAFGDKSLKIHLSSDPDIRDENIDHETEFILFASDGVWKVMSNQEAVDLIKSIKDPQAAAKELIEEAVSKQSTDDISCIVVRFQ

SEQ ID NO: 35271 - protein, 235 aa, Arabidopsis thaliana
  peptide (1)..(235): Ceres Seq. ID no. 12326005
MEDYVVSEFKKVDGHDLGLFAIFDGHLGHDVAKYLQTNLFDNILKEKDFWTDTKNAIRNAYISTDAVILEQSLKLGKGGSTAVTGILIDGKTLVIANVGDSRAVMSKNGVASQLSVDHEPSKEQKEIESRGGFVSNIPGDVPRVDGQLAVARAFGDKSLKIHLSSDPDIRDENIDHETEFILFASDGVWKVMSNQEAVDLIKSIKDPQAAAKELIEEAVSKQSTDDISCIVVRFQ

SEQ ID NO: 35272 - DNA, 852 bp, Arabidopsis thaliana
  misc_feature (1)..(852): Ceres Seq. ID no. 12579972
  misc_feature (1)..(852): Ortholog of  Ceres SEQ ID NO 12562293 as cited in SEQ ID NO 20690
acaccatccactctactcaacatggactcctccaaactctcatctctctctctttgcctcttcctcatttgcattatctatctcccccaacattctctcgcatgcggctcttgcaacccacggaagggcggaaagcactcccctaaagcccctaagctaccagttcctccggtgaccgtccctaagctaccagttcctccggtgaccgtccctaagctaccagtccctccggtgaccgtccctaagctacccgttcctcctgtgaccatccctaagctacccgttccaccagtgactgtacctaagctacccgttcctcctgtgaccgtccccaagctacccgttcctccagtgaccgtccccaaggaggaacgggtagcttaggtacagtcactggtggaacgggtagcttaggggtggtcacggagngggaggaggccacggacatggaggacacaacggaggagggggccacggacttgacggatacggaggaggtggaggacactatggaggaggtggaggacactacggaggaggtggaggacactacgaaggaggtgaggacactacggaggaggtggtggaggacacggaggtggaggacactacggaggtggtggaggaggatacggaggtggaggaggacaccacggaggaggaggccacgggctaaacgaacctgttcagactaagccgggtgtttaaaactatataatatcttcactaccatgcatgattgcatatatatatatacgcttatgtattatctatatgcctataaataaaccatggtgagtttgtaacgcagtgccttcagaaatgttcggaataaatttccataatattagt

SEQ ID NO: 35273 - protein, 127 aa, Arabidopsis thaliana
  peptide (1)..(127): Ceres Seq. ID no. 12579973
TPSTLLNMDSSKLSSLSLCLFLICIIYLPQHSLACGSCNPRKGGKHSPKAPKLPVPPVTVPKLPVPPVTVPKLPVPPVTVPKLPVPPVTIPKLPVPPVTVPKLPVPPVTVPKLPVPPVTVPKEERVA

SEQ ID NO: 35274 - protein, 120 aa, Arabidopsis thaliana
  peptide (1)..(120): Ceres Seq. ID no. 12579974
MDSSKLSSLSLCLFLICIIYLPQHSLACGSCNPRKGGKHSPKAPKLPVPPVTVPKLPVPPVTVPKLPVPPVTVPKLPVPPVTIPKLPVPPVTVPKLPVPPVTVPKLPVPPVTVPKEERVA

SEQ ID NO: 35275 - protein, 82 aa, Arabidopsis thaliana
  peptide (1)..(82): Ceres Seq. ID no. 12579975
MEDTTEEGATDLTDTEEVEDTMEEVEDTTEEVEDTTKEVRTLRRRWWRTRRWRTLRRWWRRIRRWRRTPRRRRPRAKRTCSD

SEQ ID NO: 35276 - DNA, 1111 bp, Arabidopsis thaliana
  misc_feature (1)..(1111): Ceres Seq. ID no. 12421784
  misc_feature (1)..(1111): Ortholog of  Ceres SEQ ID NO 14316300 as cited in SEQ ID NO 59995
  misc_feature (1)..(1111): Ortholog of  Ceres SEQ ID NO 13662758 as cited in SEQ ID NO 64912
  misc_feature (1)..(1111): Ortholog of  Ceres SEQ ID NO 13595881 as cited in SEQ ID NO 67709
tcagtaaaaccctcatttctgtttctcttttcacttttaaggaaaaccctagaatcctcagaaatggcgttgagcaccgtgtttcgtcgagcttcgtcaacagtatccaatcttgctttccgtgcgggtagatctccggttagcttccgcagtggcgctgtctccgtcgagaggctgattcgtggtagccaccagatcaggcgtggatcggttagttcattctcagtctcgagcttttcgacggaaagtgcgatctctaaaacaaccgccgacgagaatcttgttagcgttatcgaatctgaaatcgaatgcgccgtcgcagaggaggctcctcatgacactgacttcttggaagataagccagaagggtttccatttgaaatcattgataattcaggggagagaactgtgttgctgacaaggaaatttgaggatgaaaccatccaagtggaagttgactctgttgcttcttatgatgatgaagatgaagaagaggaagcagaaccaaacaatgaagaagacgatgaagatcaagagagctcgggtaaagtccgggttccgatggttgttagtgtgcagaaaggtgatggtgtgtgtcttgagtttggagtcagcgcatacccggatgagattgtgtttgatagtttatcgatcaaacaaccgcaaggatctgataatgaccttgcttacgaaggacctgactttgatgacttggatgagaatttgcagaaggctttccacaggtacttggagatcagaggtattaaaccaagcttcactacctttctggcagattatgtggccaacaaagatagcagagagtatcttcaatggctcaaggatctcaagtcttttgtcgagaagtgaaactgaactttgttcagagaataagagcgagatttctttttgctttaaacttttgagtttatcttagatgaacttgatatcaccatgagcaatcgttgaaagtgaggtcatgtgttatgcttgttaacaatattgctacatgtttttaatgggtttttaggtactttgctagatataagatgcaactctttcgagtttcagttggaaaaaatgatacgacctcaataaagtataattcttttgc

SEQ ID NO: 35277 - protein, 288 aa, Arabidopsis thaliana
  peptide (1)..(288): Ceres Seq. ID no. 12421785
SVKPSFLFLFSLLRKTLESSEMALSTVFRRASSTVSNLAFRAGRSPVSFRSGAVSVERLIRGSHQIRRGSVSSFSVSSFSTESAISKTTADENLVSVIESEIECAVAEEAPHDTDFLEDKPEGFPFEIIDNSGERTVLLTRKFEDETIQVEVDSVASYDDEDEEEEAEPNNEEDDEDQESSGKVRVPMVVSVQKGDGVCLEFGVSAYPDEIVFDSLSIKQPQGSDNDLAYEGPDFDDLDENLQKAFHRYLEIRGIKPSFTTFLADYVANKDSREYLQWLKDLKSFVEK

SEQ ID NO: 35278 - protein, 267 aa, Arabidopsis thaliana
  peptide (1)..(267): Ceres Seq. ID no. 12421786
MALSTVFRRASSTVSNLAFRAGRSPVSFRSGAVSVERLIRGSHQIRRGSVSSFSVSSFSTESAISKTTADENLVSVIESEIECAVAEEAPHDTDFLEDKPEGFPFEIIDNSGERTVLLTRKFEDETIQVEVDSVASYDDEDEEEEAEPNNEEDDEDQESSGKVRVPMVVSVQKGDGVCLEFGVSAYPDEIVFDSLSIKQPQGSDNDLAYEGPDFDDLDENLQKAFHRYLEIRGIKPSFTTFLADYVANKDSREYLQWLKDLKSFVEK

SEQ ID NO: 35279 - protein, 166 aa, Arabidopsis thaliana
  peptide (1)..(166): Ceres Seq. ID no. 12421787
MKPSKWKLTLLLLMMMKMKKRKQNQTMKKTMKIKRARVKSGFRWLLVCRKVMVCVLSLESAHTRMRLCLIVYRSNNRKDLIMTLLTKDLTLMTWMRICRRLSTGTWRSEVLNQASLPFWQIMWPTKIAESIFNGSRISSLLSRSETELCSENKSEISFCFKLLSLS

SEQ ID NO: 35280 - DNA, 878 bp, Arabidopsis thaliana
  misc_feature (1)..(878): Ceres Seq. ID no. 13497175
  misc_feature (1)..(878): Ortholog of  Ceres SEQ ID NO 13662677 as cited in SEQ ID NO 63824
gtctctttgacttcatcgtcgattaagggagaaagagagagagagtgagagctgagaaaatcaccagaaagctacttgagagagagagatagagataagtgagctctgagaaaatccagcaatggcttcgaagcttgtagtgataattgtgtttatcctcgatctcatcgccgttgggttagccattgccgccgagcagagaagaagtgtcggcaaggttgaaacagacagagacaagcaatatgattactgtgtgtatggtactgacattgctacaagttatggagctggtgcatttgttcttctctttgtaagccaagtccttattatggctgctagtcgttgcttctgttgtggaaagtctcttaaccctggcggttcaagagcttgtgccattattctcttcctcatttgctgggtgtttttcttgatcgctgagatgtgtttgcttgcggcatcaatcagaaatgcgtaccacacacagtatagaaagatgtggaaagttgaagatccaccaagctgtgaagttataaggaaaggagtttttgcagctggtgctgcattcacactcttcaccgccattgtctctcagttctactacgtttgctactctcgtgctagagatgcgtaccagaatccctcctactaaaaatgtcaacttccacagcaagcaaacgtttaagcatcaagagttggaatttgtctttttgtgtttgtttagtattgtccagtgtttagttatcctatcaggatgtttaggttttatgttgtctcttaagcaaacactgatatgttatattctaagattcgtatattgttatgttctctgttgtaatgtgtgaatgaatactaaagaatagaaaaccatgatttgttgg

SEQ ID NO: 35281 - protein, 175 aa, Arabidopsis thaliana
  peptide (1)..(175): Ceres Seq. ID no. 13497176
MASKLVVIIVFILDLIAVGLAIAAEQRRSVGKVETDRDKQYDYCVYGTDIATSYGAGAFVLLFVSQVLIMAASRCFCCGKSLNPGGSRACAIILFLICWVFFLIAEMCLLAASIRNAYHTQYRKMWKVEDPPSCEVIRKGVFAAGAAFTLFTAIVSQFYYVCYSRARDAYQNPSY

SEQ ID NO: 35282 - protein, 106 aa, Arabidopsis thaliana
  peptide (1)..(106): Ceres Seq. ID no. 13497177
MAASRCFCCGKSLNPGGSRACAIILFLICWVFFLIAEMCLLAASIRNAYHTQYRKMWKVEDPPSCEVIRKGVFAAGAAFTLFTAIVSQFYYVCYSRARDAYQNPSY

SEQ ID NO: 35283 - DNA, 1210 bp, Arabidopsis thaliana
  misc_feature (1)..(1210): Ceres Seq. ID no. 12333953
  misc_feature (1)..(1210): Ortholog of  Ceres SEQ ID NO 13582109 as cited in SEQ ID NO 51120
  misc_feature (1)..(1210): Ortholog of  Ceres SEQ ID NO 13581804 as cited in SEQ ID NO 51424
  misc_feature (1)..(1210): Ortholog of  Ceres SEQ ID NO 14310890 as cited in SEQ ID NO 54290
  misc_feature (1)..(1210): Ortholog of  Ceres SEQ ID NO 13663874 as cited in SEQ ID NO 67003
gttagatgatctgtccatttttttcttttttcttctgtgtataaatatatttgagcacaaagaaaaactaataaccttctgttttcagcaagtagggtcttataaccttcaaagaaatattccttcaattgaaaacccataaaccaaaatagatattacaaaaggaaagagagatattttcaagaacaacataattagaaaagcagaagcagcagttaagtggtactgagataaatgatatagtttctcttcaagaacagtttctcattacccaccttctcctttttgctgatctatcgtaatcttgagaactcaggatcaatggaggaaggtgggagtagtcacgacgcagagagtagcaagaaactagggagagggaaaatagagataaagaggatagagaacacaacaaatcgtcaagttactttctgcaaacgacgcaatggtcttctcaagaaagcttatgaactctctgtcttgtgtgatgccgaagttgccctcgtcatcttctccactcgtggccgtctctatgagtacgccaacaacagtgtgaggggtacaattgaaaggtacaagaaagcttgttccgatgccgtcaaccctccttccgtcaccgaagctaatactcagtactatcagcaagaagcctctaagcttcggaggcagattcgagatattcagaattcaaataggcatattgttggggaatcacttggttccttgaacttcaaggaactcaaaaacctagaaggacgtcttgaaaaaggaatcagccgtgtccgctccaaaaagaatgagctgttagtggcagagatagagtatatgcagaagagggaaatggagttgcaacacaataacatgtacctgcgagcaaagatagccgaaggcgccagattgaatccggaccagcaggaatcgagtgtgatacaagggacgacagtttacgaatccggtgtatcttctcatgaccagtcgcagcattataatcggaactatattccggtgaaccttcttgaaccgaatcagcaattctccggccaagaccaacctcctcttcaacttgtgtaactcaaaacatgataacttgtttcttcccctcataacgattaagagagagacgagagagttcattttatatttataacgcgactgtgtattcatagtttaggttctaataatgataataacaaaactgttgtttctttgcttc

SEQ ID NO: 35284 - protein, 248 aa, Arabidopsis thaliana
  peptide (1)..(248): Ceres Seq. ID no. 12333954
MEEGGSSHDAESSKKLGRGKIEIKRIENTTNRQVTFCKRRNGLLKKAYELSVLCDAEVALVIFSTRGRLYEYANNSVRGTIERYKKACSDAVNPPSVTEANTQYYQQEASKLRRQIRDIQNSNRHIVGESLGSLNFKELKNLEGRLEKGISRVRSKKNELLVAEIEYMQKREMELQHNNMYLRAKIAEGARLNPDQQESSVIQGTTVYESGVSSHDQSQHYNRNYIPVNLLEPNQQFSGQDQPPLQLV

SEQ ID NO: 35285 - DNA, 1196 bp, Arabidopsis thaliana
  misc_feature (1)..(1196): Ceres Seq. ID no. 12334143
  misc_feature (1)..(1196): Ortholog of  Ceres SEQ ID NO 14311568 as cited in SEQ ID NO 51732
  misc_feature (1)..(1196): Ortholog of  Ceres SEQ ID NO 14303877 as cited in SEQ ID NO 53500
  misc_feature (1)..(1196): Ortholog of  Ceres SEQ ID NO 15169781 as cited in SEQ ID NO 54829
  misc_feature (1)..(1196): Ortholog of  Ceres SEQ ID NO 15173757 as cited in SEQ ID NO 57537
  misc_feature (1)..(1196): Ortholog of  Ceres SEQ ID NO 13597743 as cited in SEQ ID NO 65452
  misc_feature (1)..(1196): Ortholog of  Ceres SEQ ID NO 13654231 as cited in SEQ ID NO 68285
tccccaattcgtctcctccaacagttttcttcttctcttcttctttgggtgttccttccaccaacggcagaaatcgatttggcttaaatctccccctcctttcgatctctctgatcgccgccgggaacattcaatttcccgggagttcaacaaaaaaaaaactctccgtttttatttttccccctttttcaccggtggaagtttccggagatggtgtcacccgaaaacgctaattggatttgtgacttgatcgatgctgattacggaagtttcacaatccaaggtcctggtttctcttggcctgttcagcaacctattggtgtttcttctaactccagtgctggagttgatggctcggctggaaactcagaagctagcaaagaacctggatccaaaaagagggggagatgtgaatcatcctctgccactagctcgaaagcatgtagagagaagcagcgacgggacaggttgaatgacaagtttatggaattgggtgcaattttggagcctggaaatcctcccaaaacagacaaggctgctatcttggttgatgctgtccgcatggtgacacagctacggggcgaggcccagaagctgaaggactccaattcaagtcttcaggacaaaatcaaagagttaaagactgagaaaaacgagctgcgagatgagaaacagaggctgaagacagagaaagaaaagctggagcagcagctgaaagccatgaatgctcctcaaccaagttttttcccagccccacctatgatgcctactgcttttgcttcagcgcaaggccaagctcctggaaacaagatggtgccaatcatcagttacccaggagttgccatgtggcagttcatgcctcctgcttcagtcgatacttctcaggatcatgtccttcgtcctcctgttgcttaatcaagaaaaatcatcaaccggtttgcttcttgcttccgcttaaaagaaaagtctccatttgttttgctctcctctctttctcggctttcttagtcttatccttttgctttgtcgtgttatcatcgtaactgttatctgttgaacaatgatatgacattgtaaactccaattgcttcgcgcaatgttatctattcacatgtaaatttaagtagagtttggcagatcgtctctcactttatgtgttcttacattaatacatagaatgtggttacttcctcgcc

SEQ ID NO: 35286 - protein, 234 aa, Arabidopsis thaliana
  peptide (1)..(234): Ceres Seq. ID no. 12334144
MVSPENANWICDLIDADYGSFTIQGPGFSWPVQQPIGVSSNSSAGVDGSAGNSEASKEPGSKKRGRCESSSATSSKACREKQRRDRLNDKFMELGAILEPGNPPKTDKAAILVDAVRMVTQLRGEAQKLKDSNSSLQDKIKELKTEKNELRDEKQRLKTEKEKLEQQLKAMNAPQPSFFPAPPMMPTAFASAQGQAPGNKMVPIISYPGVAMWQFMPPASVDTSQDHVLRPPVA

SEQ ID NO: 35287 - protein, 143 aa, Arabidopsis thaliana
  peptide (1)..(143): Ceres Seq. ID no. 12334145
MELGAILEPGNPPKTDKAAILVDAVRMVTQLRGEAQKLKDSNSSLQDKIKELKTEKNELRDEKQRLKTEKEKLEQQLKAMNAPQPSFFPAPPMMPTAFASAQGQAPGNKMVPIISYPGVAMWQFMPPASVDTSQDHVLRPPVA

SEQ ID NO: 35288 - protein, 117 aa, Arabidopsis thaliana
  peptide (1)..(117): Ceres Seq. ID no. 12334146
MVTQLRGEAQKLKDSNSSLQDKIKELKTEKNELRDEKQRLKTEKEKLEQQLKAMNAPQPSFFPAPPMMPTAFASAQGQAPGNKMVPIISYPGVAMWQFMPPASVDTSQDHVLRPPVA

SEQ ID NO: 35289 - DNA, 1361 bp, Arabidopsis thaliana
  misc_feature (1)..(1361): Ceres Seq. ID no. 12334139
  misc_feature (1)..(1361): Ortholog of  Ceres SEQ ID NO 13584730 as cited in SEQ ID NO 65565
attcctccattaaaaagcttcttccttcgtttctcgtcggcgttttgagagacatgtgggaatcgatttgcctaacgcttgcggccaccgccggaaacaatatcggcaaggttctccagaagaagggcactattatcctccctcctctctcccttaagcttaaggtgttaagagcatatgctgaaaacaaaccatgggcgttaggttttcttatggacattgttggtgctttgttgatgctgagagcactatcacttgctcctgtgtcagttgttcagccagtctcgggatgtggccttgccattctttccgtcttttcgcatttttatttgaaggaagtcatgaatgtttttgactggattgggattactgttgccggcattgggaccataggagttggggctggtggtgaggagcaagaagcatcattaatatctgtcttccagttgctgtggctagcattggttgttgccatcttatttgtactactaaatgcgtggcttcatatcttcaaacgccagcgcagggagcaggagctgggggaatatgaagtggtggaagaaatcatatatggcttggaatctggcattttattcggaatggcatctgtagtatcaaagatgggttttgtattcgtggagcagggattttctacaatgttcattcccatgtgcatttcgattagtatatgctgtagtggaactggatttttctaccagactcggggactaaaacatgggagagcaatcgtagtatccacttgcgctgctgtggcatcaattgtaacaggtgtggttgcaggaatgtttgctctgggtgagaaattacccacttcaccatctggacggcttttacttctcctgggatggttacttatcatgctaggtgttgtattactagtgacttcatcacggcttatcagacatcttccacggtcattccggcgttcaaggcaaaccagtttagaaagaggtttcaacataaggcggacaacttctcacacaccaaaggatacaaacccaagtgcggttatccaggcagcaacattacaccatctcttatcatccccatcaaaagacaaagactaaatggattcagaaacaccgaagaatatttgcggagtgcatacttatgttacacaagttatttctcgaatttatgactaaaggtgtcagattttcatattccggggtttcatttcattgatattccaattgtgggaacagcttaaaagtcagagcttgggatcaatttatgacgtaacttgatgtctaaaatgtgaaatatgagttcccttggacatgttactctaattgtgcaaacaatctgggatatacgaaccaactttggtttattgtgtt

SEQ ID NO: 35290 - protein, 361 aa, Arabidopsis thaliana
  peptide (1)..(361): Ceres Seq. ID no. 12334140
SSIKKLLPSFLVGVLRDMWESICLTLAATAGNNIGKVLQKKGTIILPPLSLKLKVLRAYAENKPWALGFLMDIVGALLMLRALSLAPVSVVQPVSGCGLAILSVFSHFYLKEVMNVFDWIGITVAGIGTIGVGAGGEEQEASLISVFQLLWLALVVAILFVLLNAWLHIFKRQRREQELGEYEVVEEIIYGLESGILFGMASVVSKMGFVFVEQGFSTMFIPMCISISICCSGTGFFYQTRGLKHGRAIVVSTCAAVASIVTGVVAGMFALGEKLPTSPSGRLLLLLGWLLIMLGVVLLVTSSRLIRHLPRSFRRSRQTSLERGFNIRRTTSHTPKDTNPSAVIQAATLHHLLSSPSKDKD

SEQ ID NO: 35291 - protein, 344 aa, Arabidopsis thaliana
  peptide (1)..(344): Ceres Seq. ID no. 12334141
MWESICLTLAATAGNNIGKVLQKKGTIILPPLSLKLKVLRAYAENKPWALGFLMDIVGALLMLRALSLAPVSVVQPVSGCGLAILSVFSHFYLKEVMNVFDWIGITVAGIGTIGVGAGGEEQEASLISVFQLLWLALVVAILFVLLNAWLHIFKRQRREQELGEYEVVEEIIYGLESGILFGMASVVSKMGFVFVEQGFSTMFIPMCISISICCSGTGFFYQTRGLKHGRAIVVSTCAAVASIVTGVVAGMFALGEKLPTSPSGRLLLLLGWLLIMLGVVLLVTSSRLIRHLPRSFRRSRQTSLERGFNIRRTTSHTPKDTNPSAVIQAATLHHLLSSPSKDKD

SEQ ID NO: 35292 - protein, 291 aa, Arabidopsis thaliana
  peptide (1)..(291): Ceres Seq. ID no. 12334142
MDIVGALLMLRALSLAPVSVVQPVSGCGLAILSVFSHFYLKEVMNVFDWIGITVAGIGTIGVGAGGEEQEASLISVFQLLWLALVVAILFVLLNAWLHIFKRQRREQELGEYEVVEEIIYGLESGILFGMASVVSKMGFVFVEQGFSTMFIPMCISISICCSGTGFFYQTRGLKHGRAIVVSTCAAVASIVTGVVAGMFALGEKLPTSPSGRLLLLLGWLLIMLGVVLLVTSSRLIRHLPRSFRRSRQTSLERGFNIRRTTSHTPKDTNPSAVIQAATLHHLLSSPSKDKD

SEQ ID NO: 35293 - DNA, 1378 bp, Arabidopsis thaliana
  misc_feature (1)..(1378): Ceres Seq. ID no. 12334204
  misc_feature (1)..(1378): Ortholog of  Ceres SEQ ID NO 13581775 as cited in SEQ ID NO 51066
  misc_feature (1)..(1378): Ortholog of  Ceres SEQ ID NO 13595727 as cited in SEQ ID NO 57082
  misc_feature (1)..(1378): Ortholog of  Ceres SEQ ID NO 15171152 as cited in SEQ ID NO 60275
aagcaatccctctctagtaatggcggtcgcaatacctcaagccacttctcttacgaacctcgtcttcctcacgaaattaatcccacgaggaagcttcaccaccatactacctaagcatcatcggaaaccaatcttcgtattctctctccagactcaattttcttctccagtaaccacactcacctccaaaaaccctaaagatgatgagcaacagcaaaaactctccttcaccctcaactaccttatcgactcatgtggactatctccagattccgccaccgtagcctctcgtaagctcttactagattcaccagaacgacccaacacagttctcaaccttcttcgtgaccatggattcaccacagctcaaatctcatctctcgtcaagaaacgtcctgttctcttattagccaatgctgaatctgtcctcctcccgaaactcagcttctttctctcaattggtgtctcaaaatctttacttgctcgaactttagcttctgatccaaccattttgactagatcccttgttaatcagcttatcccttcttacaatttccttaaaagcgttcttgattccgatgagaagattgtggcggcgttgcggaggacgacttgggttttccttgaggatcacactaagaaccttgtcccaaacatcaactatatggcggagactggtgttcctgagaaatgtatcaagctgcttctcacgcattttcctgaagctgtgatgcagaagaaccatgagttccaagcaattgctaagcaagctcaagagatggggttcaatcctcaaaaatcaacatttgtgttggccattcatgctctctctgggaaaggaaacaaatcgatatgggacaaatgttttgaggtttatcagagatggggatggtcggaagatgatatcatgtgtgcgttcaagaagcaccctcattgtatgatgttgtctgagaggaagattaacagaacgatggaatattttgtgaatgagatgaatatggcgcctagatcgatcgcacagtgtccagtggtgctcttcttcagccttgagaagaggattatcccgaggtgttcggttactaaggttttggtatcgaacgggcttgtgaaagaggattggagcttgacgtctttgttggttccagtggagaaagtgttcttggagaagctcgtgatcaagtacgaagaggagttgcctgagttgatgaatctgtatctaggatgcaccaaactctgagcttttgtttttgactgttttcattatcaaatgtcagatgctgagagacatgaatctttgtgaaaagagtctagtgtgtaatccaattttggtagtgaaaggaaagctgattagcaagcccaacgtgtgttttaaagacag

SEQ ID NO: 35294 - protein, 411 aa, Arabidopsis thaliana
  peptide (1)..(411): Ceres Seq. ID no. 12334205
SNPSLVMAVAIPQATSLTNLVFLTKLIPRGSFTTILPKHHRKPIFVFSLQTQFSSPVTTLTSKNPKDDEQQQKLSFTLNYLIDSCGLSPDSATVASRKLLLDSPERPNTVLNLLRDHGFTTAQISSLVKKRPVLLLANAESVLLPKLSFFLSIGVSKSLLARTLASDPTILTRSLVNQLIPSYNFLKSVLDSDEKIVAALRRTTWVFLEDHTKNLVPNINYMAETGVPEKCIKLLLTHFPEAVMQKNHEFQAIAKQAQEMGFNPQKSTFVLAIHALSGKGNKSIWDKCFEVYQRWGWSEDDIMCAFKKHPHCMMLSERKINRTMEYFVNEMNMAPRSIAQCPVVLFFSLEKRIIPRCSVTKVLVSNGLVKEDWSLTSLLVPVEKVFLEKLVIKYEEELPELMNLYLGCTKL

SEQ ID NO: 35295 - protein, 405 aa, Arabidopsis thaliana
  peptide (1)..(405): Ceres Seq. ID no. 12334206
MAVAIPQATSLTNLVFLTKLIPRGSFTTILPKHHRKPIFVFSLQTQFSSPVTTLTSKNPKDDEQQQKLSFTLNYLIDSCGLSPDSATVASRKLLLDSPERPNTVLNLLRDHGFTTAQISSLVKKRPVLLLANAESVLLPKLSFFLSIGVSKSLLARTLASDPTILTRSLVNQLIPSYNFLKSVLDSDEKIVAALRRTTWVFLEDHTKNLVPNINYMAETGVPEKCIKLLLTHFPEAVMQKNHEFQAIAKQAQEMGFNPQKSTFVLAIHALSGKGNKSIWDKCFEVYQRWGWSEDDIMCAFKKHPHCMMLSERKINRTMEYFVNEMNMAPRSIAQCPVVLFFSLEKRIIPRCSVTKVLVSNGLVKEDWSLTSLLVPVEKVFLEKLVIKYEEELPELMNLYLGCTKL

SEQ ID NO: 35296 - DNA, 2008 bp, Arabidopsis thaliana
  misc_feature (1)..(2008): Ceres Seq. ID no. 12488412
  misc_feature (1)..(2008): Ortholog of  Ceres SEQ ID NO 12626078 as cited in SEQ ID NO 69113
ctctccgcctgttctccattgatctaatctaactcgctcatcagaatcatctcttcatcgttaatcctcttccttctcactcaccatgtatcgtttcgcttctaacctcgcctccaaggcaaggattgctcaaaacgctcgccaggtttccagcagaatgagctggagcaggaactatgcagcgaaagagattaagtttggtgttgaagctcgagctttgatgcttaagggtgttgaagatcttgctgatgctgttaaagtcaccatgggtcccaagggacgtaatgttgtgattgagcaaagttggggtgctcctaaagtgacaaaagatggtgttactgttgccaaaagtattgagttcaaagacaaaattaagaacgttggtgctagtcttgtgaagcaggttgcaaatgctactaatgatgttgctggtgatggtactacttgtgctactgtcctcacccgggctatatttgccgaaggatgcaaatcagttgccgcaggaatgaatgcaatggacttgcgaagaggtatttccatggcagttgatgctgtggtgacaaaccttaaaagcaaggctaggatgatcagcacatctgaagagattgctcaggttggaaccatttctgctaatggagagagggaaattggtgaacttattgccaaggctatggagaaggttggcaaagaaggtgttatcacaatccaagatggaaagacattgtttaacgagttggaagttgtagaggggatgaaattggacagaggttatacttcaccatactttatcactaatcaaaaaacccaaaaatgtgaactagacgatcctctcattcttatccacgagaagaagatctcaagcatcaactctatagtgaaagtgttggagttggctctgaagaggcaaagaccactattgattgtttctgaagatgtggaaagtgatgctcttgcaactcttatccttaacaagctccgtgccggaattaaggtctgtgccatcaaggcccctgggtttggagagaataggaaggccaatttgcaagaccttgctgcccttactggtggagaggttatcacagacgagcttggcatgaatctggagaaggtggacctaagcatgctaggaacctgcaaaaaggttacagtctccaaggacgacactgttattcttgatggggctggcgacaagaaaggaattgaggaaagatgtgaacagattaggtcagcaattgaactgagcacctcagattatgacaaggaaaaactgcaagaaaggttggctaagctctctggaggtgttgcagtgttgaagattggaggagcaagtgaagctgaagttggtgagaagaaagacagagtgacagatgctttgaatgccactaaagcagcagttgaagagggtattttaccaggaggaggtgtggctcttctatacgcagcaagagagttggaaaaacttccaacagccaactttgaccagaagattggtgtccagattattcagaacgcattgaagactcctgtttacacaatcgcttcaaatgctggagttgaaggtgctgttattgttggcaagctcttggagcaagataacccagacctcggttatgatgctgctaaaggtgaatatgtggatatggtgaaagctggaatcatagaccctctgaaagtgatcaggacagctttggttgatgctgcgagtgtgtcatctttgttgacgacaacggaagctgtagtggttgatcttccgaaagacgaaagcgagtcaggagcagcaggagcaggcatgggtggaatgggaggcatggactactagatccactaaattctgtcttttgttttcaccaatcaccatcttaacttgagaagagagatacgattcttttaggagttttagtcttcgtctttgccttattgttgctcaataacctcaaaagttttacaataaacagagcacacttggcaatgttacgagacacactattagcatcaacaattaaaaccg

SEQ ID NO: 35297 - protein, 577 aa, Arabidopsis thaliana
  peptide (1)..(577): Ceres Seq. ID no. 12488413
MYRFASNLASKARIAQNARQVSSRMSWSRNYAAKEIKFGVEARALMLKGVEDLADAVKVTMGPKGRNVVIEQSWGAPKVTKDGVTVAKSIEFKDKIKNVGASLVKQVANATNDVAGDGTTCATVLTRAIFAEGCKSVAAGMNAMDLRRGISMAVDAVVTNLKSKARMISTSEEIAQVGTISANGEREIGELIAKAMEKVGKEGVITIQDGKTLFNELEVVEGMKLDRGYTSPYFITNQKTQKCELDDPLILIHEKKISSINSIVKVLELALKRQRPLLIVSEDVESDALATLILNKLRAGIKVCAIKAPGFGENRKANLQDLAALTGGEVITDELGMNLEKVDLSMLGTCKKVTVSKDDTVILDGAGDKKGIEERCEQIRSAIELSTSDYDKEKLQERLAKLSGGVAVLKIGGASEAEVGEKKDRVTDALNATKAAVEEGILPGGGVALLYAARELEKLPTANFDQKIGVQIIQNALKTPVYTIASNAGVEGAVIVGKLLEQDNPDLGYDAAKGEYVDMVKAGIIDPLKVIRTALVDAASVSSLLTTTEAVVVDLPKDESESGAAGAGMGGMGGMDY

SEQ ID NO: 35298 - protein, 553 aa, Arabidopsis thaliana
  peptide (1)..(553): Ceres Seq. ID no. 12488414
MSWSRNYAAKEIKFGVEARALMLKGVEDLADAVKVTMGPKGRNVVIEQSWGAPKVTKDGVTVAKSIEFKDKIKNVGASLVKQVANATNDVAGDGTTCATVLTRAIFAEGCKSVAAGMNAMDLRRGISMAVDAVVTNLKSKARMISTSEEIAQVGTISANGEREIGELIAKAMEKVGKEGVITIQDGKTLFNELEVVEGMKLDRGYTSPYFITNQKTQKCELDDPLILIHEKKISSINSIVKVLELALKRQRPLLIVSEDVESDALATLILNKLRAGIKVCAIKAPGFGENRKANLQDLAALTGGEVITDELGMNLEKVDLSMLGTCKKVTVSKDDTVILDGAGDKKGIEERCEQIRSAIELSTSDYDKEKLQERLAKLSGGVAVLKIGGASEAEVGEKKDRVTDALNATKAAVEEGILPGGGVALLYAARELEKLPTANFDQKIGVQIIQNALKTPVYTIASNAGVEGAVIVGKLLEQDNPDLGYDAAKGEYVDMVKAGIIDPLKVIRTALVDAASVSSLLTTTEAVVVDLPKDESESGAAGAGMGGMGGMDY

SEQ ID NO: 35299 - protein, 532 aa, Arabidopsis thaliana
  peptide (1)..(532): Ceres Seq. ID no. 12488415
MLKGVEDLADAVKVTMGPKGRNVVIEQSWGAPKVTKDGVTVAKSIEFKDKIKNVGASLVKQVANATNDVAGDGTTCATVLTRAIFAEGCKSVAAGMNAMDLRRGISMAVDAVVTNLKSKARMISTSEEIAQVGTISANGEREIGELIAKAMEKVGKEGVITIQDGKTLFNELEVVEGMKLDRGYTSPYFITNQKTQKCELDDPLILIHEKKISSINSIVKVLELALKRQRPLLIVSEDVESDALATLILNKLRAGIKVCAIKAPGFGENRKANLQDLAALTGGEVITDELGMNLEKVDLSMLGTCKKVTVSKDDTVILDGAGDKKGIEERCEQIRSAIELSTSDYDKEKLQERLAKLSGGVAVLKIGGASEAEVGEKKDRVTDALNATKAAVEEGILPGGGVALLYAARELEKLPTANFDQKIGVQIIQNALKTPVYTIASNAGVEGAVIVGKLLEQDNPDLGYDAAKGEYVDMVKAGIIDPLKVIRTALVDAASVSSLLTTTEAVVVDLPKDESESGAAGAGMGGMGGMDY

SEQ ID NO: 35300 - DNA, 1784 bp, Arabidopsis thaliana
  misc_feature (1)..(1784): Ceres Seq. ID no. 12738915
  misc_feature (1)..(1784): Ortholog of  Ceres SEQ ID NO 13594209 as cited in SEQ ID NO 59089
  misc_feature (1)..(1784): Ortholog of  Ceres SEQ ID NO 15176091 as cited in SEQ ID NO 65733
  misc_feature (1)..(1784): Ortholog of  Ceres SEQ ID NO 15169599 as cited in SEQ ID NO 66096
  misc_feature (1)..(1784): Ortholog of  Ceres SEQ ID NO 15170167 as cited in SEQ ID NO 66224
  misc_feature (1)..(1784): Ortholog of  Ceres SEQ ID NO 13502874 as cited in SEQ ID NO 66298
  misc_feature (1)..(1784): Ortholog of  Ceres SEQ ID NO 14307944 as cited in SEQ ID NO 66503
  misc_feature (1)..(1784): Ortholog of  Ceres SEQ ID NO 12614124 as cited in SEQ ID NO 68392
  misc_feature (1)..(1784): Ortholog of  Ceres SEQ ID NO 14308011 as cited in SEQ ID NO 69234
accacacaacacaaaacctccaaaccaataatcagaacacagtgagatatttctctctgaagccaaagatggaaacggcgtcttctaatttctctctctcgcagatcctcaatattgaggaaccctacagctccgtgatgctcggtgtcgccgctctcttggccgttgtttgctatttctggatacaggggaagtccaaatccaagaacggaccaccgttgcctccgggaccttggccacttccgatcgtcggcaacctcccgttcctaaactctgacgtcctccacacgcaattccaagccctaaccctaaaacatggccctctcatgaagatccacctcggttccaaacttgcgatcgtcgtctcttcccctgacatggctcgcgaggttctcaagactcatgacatcactttcgccaaccacgatctacccgaagttggaaagatcaacacttacggtggagaagacatcctctggtctccttacggtactcattggaggagacttcgtaagctctgcgtcatgaagatgttcactaccccaactctcgaagcttcctactccactcgccgggaagaaacccgacaaaccatcgtccacatgtcggaaatggctcatgaaggatcaccagtcaacctcggagagcaaatctttctttccattttcaacgtcgtgacaagaatgatgtggggtgcgactgttgaaggagacgagagaacaagcttaggaaacgagctcaaaaccctaatctctgatatctccgacatataagggattcaaaactattcagatttctttccattgttctcaagattcgatttccaaggattggttaagcagatgaaaggccatgtgaagaagctcgatctcttgttcgatagagttatggagagtcatgtcaaaatggtgggaaagaagagcgaagaagaagaagatttcttacaatacttgcttagagttaaggacgatgatgagaaagctcctctgtccatgactcatgtcaagtctctcctcatggatatggttcttggtggtgtcgacacatcggttaacgcatccgaattcgctatggcagagattgtgagcagaccggaagtgttaaacaagatccgacaagaacttgaccaagttgttggcaaagacaacatcgttgaggaatcacatttacctaagcttccttacctacaagcggttatgaaagagactcttaggcttcaccctacgcttcctcttcttgttcctcacagaaacagcgaaacctcggtggttgcgggatacactgtgcctaaagactccaagattttcatcaacgtttgggcgattcatagagatcctaaaaattgggatgaaccaaacgaattcaaacctgagaggtttttggagaactcgcttgatttcaatggaggtgattttaagtacttgccttttgggtcaggaaggaggatttgtgcggcgataaacatggctgagagacttgttctgttcaacattgcttcacttcttcactcttttgattggaaagctcctcaaggacagaagtttgaggttgaagagaagtttggtcttgttcttaagttgaagtctccacttgtggctattcctgttccaaggttgtccgatccaaaactctatacagcttaagtaagtaagaaggaaatttggtttgagcttatgagaggaagttgaattgagttttcttgtttaaagtttatttttctttattcgtgtttggattttgatgctttgtaaaaaaagatgtgtaagttaaatttaattttgatt

SEQ ID NO: 35301 - protein, 266 aa, Arabidopsis thaliana
  peptide (1)..(266): Ceres Seq. ID no. 12738916
MKGHVKKLDLLFDRVMESHVKMVGKKSEEEEDFLQYLLRVKDDDEKAPLSMTHVKSLLMDMVLGGVDTSVNASEFAMAEIVSRPEVLNKIRQELDQVVGKDNIVEESHLPKLPYLQAVMKETLRLHPTLPLLVPHRNSETSVVAGYTVPKDSKIFINVWAIHRDPKNWDEPNEFKPERFLENSLDFNGGDFKYLPFGSGRRICAAINMAERLVLFNIASLLHSFDWKAPQGQKFEVEEKFGLVLKLKSPLVAIPVPRLSDPKLYTA

SEQ ID NO: 35302 - protein, 256 aa, Arabidopsis thaliana
  peptide (1)..(256): Ceres Seq. ID no. 12738917
HTTQNLQTNNQNTVRYFSLKPKMETASSNFSLSQILNIEEPYSSVMLGVAALLAVVCYFWIQGKSKSKNGPPLPPGPWPLPIVGNLPFLNSDVLHTQFQALTLKHGPLMKIHLGSKLAIVVSSPDMAREVLKTHDITFANHDLPEVGKINTYGGEDILWSPYGTHWRRLRKLCVMKMFTTPTLEASYSTRREETRQTIVHMSEMAHEGSPVNLGEQIFLSIFNVVTRMMWGATVEGDERTSLGNELKTLISDISDI

SEQ ID NO: 35303 - protein, 251 aa, Arabidopsis thaliana
  peptide (1)..(251): Ceres Seq. ID no. 12738918
MESHVKMVGKKSEEEEDFLQYLLRVKDDDEKAPLSMTHVKSLLMDMVLGGVDTSVNASEFAMAEIVSRPEVLNKIRQELDQVVGKDNIVEESHLPKLPYLQAVMKETLRLHPTLPLLVPHRNSETSVVAGYTVPKDSKIFINVWAIHRDPKNWDEPNEFKPERFLENSLDFNGGDFKYLPFGSGRRICAAINMAERLVLFNIASLLHSFDWKAPQGQKFEVEEKFGLVLKLKSPLVAIPVPRLSDPKLYTA

SEQ ID NO: 35304 - DNA, 2663 bp, Arabidopsis thaliana
  misc_feature (1)..(2663): Ceres Seq. ID no. 13591835
  misc_feature (1)..(2663): Ortholog of  Ceres SEQ ID NO 14313284 as cited in SEQ ID NO 67146
  misc_feature (1)..(2663): Ortholog of  Ceres SEQ ID NO 14308925 as cited in SEQ ID NO 0
acctctcttacctcactctccttaaacctttaatagggtttttaggttactctttgttcaactactacaaactcttttctctttagagattgagagattgtaaaaaaatctcaaatcttttccttcacaactttcaaatctaatggctcctgctttgagtagaagtctctacacatctcctttgacttcagttccaatcactcctgtctcttctcgtctctctcatctgagaagctcgtttctcccacacggcggcgctttaagaaccggcgtttcgtgtagctggaatctcgaaaagagatgtaaccgattcgccgtgaagtgtgacgccgccgtggcggagaaagagaccactgaagaagggtcaggtgagaagtttgagtaccaagctgaggttagtagattgttggatttgattgttcatagcttatacagtcacaaggaggtgtttctcagggagcttgtaagtaatgcaagtgatgctttggataagctgaggttcttgagtgtaacagagccttctttgcttggagatggtggagatcttgagattaggattaagcctgatcctgataacggcaccatcaccataactgatactggtattggaatgacaaaggaagaacttattgattgccttggaactattgctcaaagtggtacttcgaaattcttgaaggctctaaaggaaaacaaggaccttggtgctgacaacggtttgatcggacagtttggtgttgggttttactctgctttcttagttgctgagaaggttgttgtgtccaccaaaagccccaaatctgacaagcaatatgtttgggaatcggttgccgatagtagctcgtatctgatcagagaagaaacagaccctgataacattctacgtcgtggaacacaaatcaccttgtatctgagggaggatgataaatacgaatttgcggagtctacaaggatcaagaacctcgtgaagaattactctcagttcgttgggtttcctatctatacatggcaggagaaatcaaggactatagaggtcgaagaggacgaaccagttaaggaaggagaagagggtgagccaaagaaaaagaagaccactaaaactgagaagtattgggattgggaactagccaacgagaccaaaccgctatggatgcgcaattcgaaggaagtggaaaaaggagagtacaatgagttctacaaaaaggctttcaatgagttcttggatccacttgctcacacacacttcacaactgagggtgaggttgagttcaggagcattttgtacatccctgggatgggtcctcttaacaatgaagatgttacaaacccgaaaacaaagaacattcgtctctacgtgaagcgtgtgtttatctctgacgattttgatggagagcttttcccgagatatctgagctttgtgaagggagttgtggactctgatgatcttcctcttaatgtttctcgtgaaattctccaagaaagcagaattgtaagaatcatgagaaagaggctcattagaaaaacctttgacatgatacaagaaatctctgagagtgaaaacaaagaggattacaagaaattctgggagaactttggtagattccttaaattgggttgtattgaagacaccggtaaccacaagcgtatcacaccgctacttagattcttcagttccaagaatgaagaggaattgacaagcttggatgattatatcgagaacatgggagagaaccaaaaggcgatctactacctcgcaactgatagtcttaaaagtgccaagtctgcccctttcttggagaaactaatccaaaaagatatcgaggttctatatttggttgaaccaatcgatgaagttgctattcagaatttgcaaacctacaaagaaaagaaattcgttgatatcagtaaagaagatttggaactcggagatgaagatgaagtaaaggacagggaagcgaaacaagagtttaaccttctctgtgactggataaaacagcagctcggtgacaaagttgcaaaagtccaagtctcaaaccgtttgagctcttctccttgtgtgcttgtctctggcaaattcgggtggtcagctaatatggaaaggctaatgaaggcacaggctcttggagacacttcaagcctggagttcatgagaggtaggagaatactagagatcaatccagatcatcccatcatcaaagacttgaacgctgcttgtaagaatgcaccagagagcactgaagcaacaagagtggtcgatctcttgtatgacactgctataatatcaagtggattcactcctgatagcccggccgagctcgggaacaagatatatgagatgatggcaatggcggttggaggaagatggggcagagttgaagaagaagaagaaagctcgactgtgaatgaaggagatgacaaaagcggagaaacagaggtagttgaaccatctgaagtgagggcagagagtgatccttggcaagattgatccttttttaccttcttttgtttgcagtgatttttttttgacagaacgctttatctttccattagcagtatcatgggcctaatgaaagcccataattaaatcacgcgtgaacgagatttatccaatacagtatttgtagtttttttttgataattaaaataattttagagaatttaca

SEQ ID NO: 35305 - protein, 780 aa, Arabidopsis thaliana
  peptide (1)..(780): Ceres Seq. ID no. 13591836
MAPALSRSLYTSPLTSVPITPVSSRLSHLRSSFLPHGGALRTGVSCSWNLEKRCNRFAVKCDAAVAEKETTEEGSGEKFEYQAEVSRLLDLIVHSLYSHKEVFLRELVSNASDALDKLRFLSVTEPSLLGDGGDLEIRIKPDPDNGTITITDTGIGMTKEELIDCLGTIAQSGTSKFLKALKENKDLGADNGLIGQFGVGFYSAFLVAEKVVVSTKSPKSDKQYVWESVADSSSYLIREETDPDNILRRGTQITLYLREDDKYEFAESTRIKNLVKNYSQFVGFPIYTWQEKSRTIEVEEDEPVKEGEEGEPKKKKTTKTEKYWDWELANETKPLWMRNSKEVEKGEYNEFYKKAFNEFLDPLAHTHFTTEGEVEFRSILYIPGMGPLNNEDVTNPKTKNIRLYVKRVFISDDFDGELFPRYLSFVKGVVDSDDLPLNVSREILQESRIVRIMRKRLIRKTFDMIQEISESENKEDYKKFWENFGRFLKLGCIEDTGNHKRITPLLRFFSSKNEEELTSLDDYIENMGENQKAIYYLATDSLKSAKSAPFLEKLIQKDIEVLYLVEPIDEVAIQNLQTYKEKKFVDISKEDLELGDEDEVKDREAKQEFNLLCDWIKQQLGDKVAKVQVSNRLSSSPCVLVSGKFGWSANMERLMKAQALGDTSSLEFMRGRRILEINPDHPIIKDLNAACKNAPESTEATRVVDLLYDTAIISSGFTPDSPAELGNKIYEMMAMAVGGRWGRVEEEEESSTVNEGDDKSGETEVVEPSEVRAESDPWQD

SEQ ID NO: 35306 - protein, 624 aa, Arabidopsis thaliana
  peptide (1)..(624): Ceres Seq. ID no. 13591837
MTKEELIDCLGTIAQSGTSKFLKALKENKDLGADNGLIGQFGVGFYSAFLVAEKVVVSTKSPKSDKQYVWESVADSSSYLIREETDPDNILRRGTQITLYLREDDKYEFAESTRIKNLVKNYSQFVGFPIYTWQEKSRTIEVEEDEPVKEGEEGEPKKKKTTKTEKYWDWELANETKPLWMRNSKEVEKGEYNEFYKKAFNEFLDPLAHTHFTTEGEVEFRSILYIPGMGPLNNEDVTNPKTKNIRLYVKRVFISDDFDGELFPRYLSFVKGVVDSDDLPLNVSREILQESRIVRIMRKRLIRKTFDMIQEISESENKEDYKKFWENFGRFLKLGCIEDTGNHKRITPLLRFFSSKNEEELTSLDDYIENMGENQKAIYYLATDSLKSAKSAPFLEKLIQKDIEVLYLVEPIDEVAIQNLQTYKEKKFVDISKEDLELGDEDEVKDREAKQEFNLLCDWIKQQLGDKVAKVQVSNRLSSSPCVLVSGKFGWSANMERLMKAQALGDTSSLEFMRGRRILEINPDHPIIKDLNAACKNAPESTEATRVVDLLYDTAIISSGFTPDSPAELGNKIYEMMAMAVGGRWGRVEEEEESSTVNEGDDKSGETEVVEPSEVRAESDPWQD

SEQ ID NO: 35307 - protein, 444 aa, Arabidopsis thaliana
  peptide (1)..(444): Ceres Seq. ID no. 13591838
MRNSKEVEKGEYNEFYKKAFNEFLDPLAHTHFTTEGEVEFRSILYIPGMGPLNNEDVTNPKTKNIRLYVKRVFISDDFDGELFPRYLSFVKGVVDSDDLPLNVSREILQESRIVRIMRKRLIRKTFDMIQEISESENKEDYKKFWENFGRFLKLGCIEDTGNHKRITPLLRFFSSKNEEELTSLDDYIENMGENQKAIYYLATDSLKSAKSAPFLEKLIQKDIEVLYLVEPIDEVAIQNLQTYKEKKFVDISKEDLELGDEDEVKDREAKQEFNLLCDWIKQQLGDKVAKVQVSNRLSSSPCVLVSGKFGWSANMERLMKAQALGDTSSLEFMRGRRILEINPDHPIIKDLNAACKNAPESTEATRVVDLLYDTAIISSGFTPDSPAELGNKIYEMMAMAVGGRWGRVEEEEESSTVNEGDDKSGETEVVEPSEVRAESDPWQD

SEQ ID NO: 35308 - DNA, 549 bp, Arabidopsis thaliana
  misc_feature (1)..(549): Ceres Seq. ID no. 12397083
  misc_feature (1)..(549): Ortholog of  Ceres SEQ ID NO 12635836 as cited in SEQ ID NO 0
  misc_feature (1)..(549): Ortholog of  Ceres SEQ ID NO 13599004 as cited in SEQ ID NO 0
atatcctgatttccccactcgacgctgatttcttctctgcttctgtaatttctccaattcattgatcagatcagccatggaagacgagattgaattgaaaactgctcctgctgatttccggtttcctacaacaaatcaaactaggcactgcttcactcggtacatcgagtttcacaggtgtacaactgcaaagggagaggagtctaatgactgtgaaaggtttgccaagtattaccgtgccctctgtcctggagaatgggttgacaagtggaacgagcagagggagagtggaacttttccaggtcctctttgaaccaagccttcaatcttgatgaagaggcaatcaagtccgtaataatacatggtttcaaagttaatttcttgcttgcgtgtgtatgttttggccttattatttcctctctagtgtaagtgttttattgggatgtctaagaaaggccaatcaaattataatatgaaaacattccgcttattttggttggaacttataataccaaatgcataactagactaatggtggatggaatttcc

SEQ ID NO: 35309 - protein, 78 aa, Arabidopsis thaliana
  peptide (1)..(78): Ceres Seq. ID no. 12397084
MEDEIELKTAPADFRFPTTNQTRHCFTRYIEFHRCTTAKGEESNDCERFAKYYRALCPGEWVDKWNEQRESGTFPGPL

SEQ ID NO: 35310 - protein, 41 aa, Arabidopsis thaliana
  peptide (1)..(41): Ceres Seq. ID no. 12397085
MTVKGLPSITVPSVLENGLTSGTSRGRVELFQVLFEPSLQS

SEQ ID NO: 35311 - DNA, 1708 bp, Arabidopsis thaliana
  misc_feature (1)..(1708): Ceres Seq. ID no. 13580438
  misc_feature (1)..(1708): Ortholog of  Ceres SEQ ID NO 12779893 as cited in SEQ ID NO 66238
aaccgattcatatctttcttcttcttcctctacagcttcttcataaatctctctctcttctcctctcttctcaaagatcgaacctttcgatttcagtctcttcagagttctttcgttttcatcgaaacaatggcgaagaacgttgggatttaggctatgaatatctatttccctcccacctgtgttcaacaggaagctttggaagcacatgatggagcaagcaaagggaaatacactattggacttggccaagattgcttagctttttgcactgagcttgaagatgttatctctatgagtttcaatgcggtgacatcactttttgagaagtataagattgaccctaaccaaatcgggcgtcttgaagtaggaagtgagactgttattgacaaaagcaagtccatcaagaccttcttgatgcagctctttgagaaatgtggaaacactgatgtcgaaggtgttgactcgaccaatgcttgctatggtggaactgcagcttgttaaactgtgtcaattgggttgagagtaactcttgggatggacgttatggcctcgtcatttgtactgacagcgcggtttatgcagaaggacccgcaaggcccactggaggagctgcagcgattgctatgttgataggacctgatgctcctatcgttttcgaaagcaaattgagagcaagccacatggctcatgtctatgacttttacaagcccaatcttgctagcgagtacccggttgttgatggtaagctttcacagacttgctacctcatggctcttgactcctgctataaacatttatgcaacaagttcgagaagatcgagggcaaagagttctccataaatgatgctgattacattgttttccattctccatacaataaacttgtacagaaaagctttgccctctcttgtacaacgacttcttgagaaacgcaagctccattgacgaggctgccaaagaaaagttcaccccttattcatctttgacccttgacgagagttaccaaagccgtgatcttgaaaaggtgtcacaacaaatttcgaaaccgttttatgatgctaaagtgcaaccaacgactttaataccaaaggaagtcggtaacatgtacactgcttctctctacgctgcatttgcttccctcatccacaataaacacaatgatttggcgggaaagcgggtggttatgttctcttatggaagtggctccaccgcaacaatgttctcattacgcctcaacgacaataagcctcctttcagcatttcaaacattgcatctgtaatggatgttggcggtaaattgaaagctagacatgagtatgcacctgagaagtttgtggagacaatgaagctaatggaacataggtatggagcaaaggactttgtgacaaccaaggagggtattatagatcttttggcaccgggaacttattatctgaaagaggttgattccttgtaccggagattctatggcaagaaaggtgaagatggatctgtagccaatggacactgattcttgaaaaggaacaaatcataaaaagtcacctgaaaatgttatgttttacttgcaccattttaatcgttttataagtttgttattactttgatttagggacaaagaaggaatgtattctctgtttttatttactgtttgatttactctctcatgcaaatgataatttggaacttattggaatctctattttgc

SEQ ID NO: 35312 - protein, 135 aa, Arabidopsis thaliana
  peptide (1)..(135): Ceres Seq. ID no. 13580439
MYTASLYAAFASLIHNKHNDLAGKRVVMFSYGSGSTATMFSLRLNDNKPPFSISNIASVMDVGGKLKARHEYAPEKFVETMKLMEHRYGAKDFVTTKEGIIDLLAPGTYYLKEVDSLYRRFYGKKGEDGSVANGH

SEQ ID NO: 35313 - protein, 115 aa, Arabidopsis thaliana
  peptide (1)..(115): Ceres Seq. ID no. 13580440
MNIYFPPTCVQQEALEAHDGASKGKYTIGLGQDCLAFCTELEDVISMSFNAVTSLFEKYKIDPNQIGRLEVGSETVIDKSKSIKTFLMQLFEKCGNTDVEGVDSTNACYGGTAAC

SEQ ID NO: 35314 - protein, 108 aa, Arabidopsis thaliana
  peptide (1)..(108): Ceres Seq. ID no. 13580441
MFSYGSGSTATMFSLRLNDNKPPFSISNIASVMDVGGKLKARHEYAPEKFVETMKLMEHRYGAKDFVTTKEGIIDLLAPGTYYLKEVDSLYRRFYGKKGEDGSVANGH

SEQ ID NO: 35315 - DNA, 1184 bp, Arabidopsis thaliana
  misc_feature (1)..(1184): Ceres Seq. ID no. 13488582
  misc_feature (1)..(1184): Ortholog of  Ceres SEQ ID NO 14314371 as cited in SEQ ID NO 52260
acacactttaacgcatttctcaaaattacgttgccaaagtctggtcagagctacaaatcaaatttgacagactgcaatttccaatccaacgactgcgaatgaagtttaatggcgactagatcgccttataagagacaaacgaagcgatccatgattcagtctcttccagcttcttcttctgcatcatctcgccgccgattcatttctcggaagaggttcgcgatgatgattcctcttgctctcctctccggcgccgttttcctattctttatgccattcaatagctggggccaatcatctggttcttctctggatctctcccataggatcaatgaaattgaaagtagttgctgagtttcctcatgatccggacgcctttactcagggtcttctttatgcgggaaacgatacactgttcgaatccactggtctatacgggaagtcttcagtgaggaaagtggatctacgaacaggaaaggttgaaattcttgaaaaaatggacaatacatattttggagagggtttaacactccttggagaaaggctctttcaagtcgcatggttgacgaacacgggtttcacatatgaccttcgcaacttaagtaaagtaaaaccatttaaacatcatatgaaagatggatggggactggctaccgatggaaaagcgttatttggaagtgatggcacttctacattatatcggatggaccctcaaacaatgaaagttactgataagcatatagtcagatataatggccgtgaggtacgttaccttaatgagctcgagtacataaacaacgaagtttgggcaaatgtgtggcagtctgattgtattgctagaatttcacccaaggacggatctctgcttggatggatactgctttcaaaattaagtcggggattgctgaaatctggacataggggtattgatgttttgaatggcatagcatgggacagtgacaagcaacgcctctttgtaacggggaaactgtggccaaagctgtaccaaatcaagctaaaacaagcatcagcaaagagccgaaattatatcgagcaacaatgcttggtatgaaaatattgtgcatggtaatggttataatgtatactggctataatttaccataatttctgaacattagcatttagcaaacttcaatgattgaagatgagaatcaaaacctcgc

SEQ ID NO: 35316 - protein, 246 aa, Arabidopsis thaliana
  peptide (1)..(246): Ceres Seq. ID no. 13488583
MKLKVVAEFPHDPDAFTQGLLYAGNDTLFESTGLYGKSSVRKVDLRTGKVEILEKMDNTYFGEGLTLLGERLFQVAWLTNTGFTYDLRNLSKVKPFKHHMKDGWGLATDGKALFGSDGTSTLYRMDPQTMKVTDKHIVRYNGREVRYLNELEYINNEVWANVWQSDCIARISPKDGSLLGWILLSKLSRGLLKSGHRGIDVLNGIAWDSDKQRLFVTGKLWPKLYQIKLKQASAKSRNYIEQQCLV

SEQ ID NO: 35317 - protein, 191 aa, Arabidopsis thaliana
  peptide (1)..(191): Ceres Seq. ID no. 13488584
MDNTYFGEGLTLLGERLFQVAWLTNTGFTYDLRNLSKVKPFKHHMKDGWGLATDGKALFGSDGTSTLYRMDPQTMKVTDKHIVRYNGREVRYLNELEYINNEVWANVWQSDCIARISPKDGSLLGWILLSKLSRGLLKSGHRGIDVLNGIAWDSDKQRLFVTGKLWPKLYQIKLKQASAKSRNYIEQQCLV

SEQ ID NO: 35318 - protein, 147 aa, Arabidopsis thaliana
  peptide (1)..(147): Ceres Seq. ID no. 13488585
MKDGWGLATDGKALFGSDGTSTLYRMDPQTMKVTDKHIVRYNGREVRYLNELEYINNEVWANVWQSDCIARISPKDGSLLGWILLSKLSRGLLKSGHRGIDVLNGIAWDSDKQRLFVTGKLWPKLYQIKLKQASAKSRNYIEQQCLV

SEQ ID NO: 35319 - DNA, 1334 bp, Arabidopsis thaliana
  misc_feature (1)..(1334): Ceres Seq. ID no. 13608536
  misc_feature (1)..(1334): Ortholog of  Ceres SEQ ID NO 12782785 as cited in SEQ ID NO 0
acaaaggaaaacgttaatggtggatctgagcactgtcaatgtcatcaccaccgaagtagagttgactccactcaacagaaactgaaactggaaagtttgagacttttaagatgtcagaaacagaatttaaagtgttgcttgagacattcacatttcctgctgattctgctcccttcaagagttgtcatgcctctaccatagttgaggttgttaaagatcatttcttggctgcgtatttcggaggcaccagggaaggagcacctgatgtcaaaatctggttgcagcatttcaaggatggtcaatgggattcaccggttattgttgatgaagagccaggagttccaatgtataaccctgtcttgttcaaacttccatctcatgagctcttattgttctacaaaatcggccaggaggttcaaaaatggagtggttgcatgaaacgatcatatgataaaggtataacttggactgaaagagaacagcttcctcctgggattctcggtcctatcaaaaacaagcccattttgcttgaagacggtactctcctttgcggatcatctgttgagagttggaattcttggggagcatggatggaggtcacttcagatgcgggtagaacatggagaaagaaagggccaatatacattcaaggcaagagtcttagcgtgatccaaccagttccataccaaaccgcagctgggaacttacggattttactcagatcctttactggcattgacagaatctgtatctcagagtctttggatggcggtgagaactggagttttgcagtaccaacggttctcccaaacccaaattcaggtattgatggagtcaagcttaaggatggtaggctagtgcttgcttacaacacagactcaagaggtgtgctcaaattaggagtttctttagacgacggtgattcatggaccgatattttaacgttggaggaatctccgggaatggagtattcgtacccggctgttatacaagccggagacggcaatgtccacgtcacctatacatataacaggacacaaattaagcatgtggtgctcaagactgcgacagatatcgattcgaagccataccgacatggtgaagcaggaggaggacacgtgaacttggatttgtacgaaccaaacattaattaattagctatttgtctcttgaaccatcgatgtggagtgtgacttccttcttacggaagaacaaagaatgttctctttcttgtcttgtaagttattgattgatcgattcttgagtttgtaaaagttgccactagttgatgaatattattgagattgtttataatatatttattgtaatcatac

SEQ ID NO: 35320 - protein, 347 aa, Arabidopsis thaliana
  peptide (1)..(347): Ceres Seq. ID no. 13608537
MSETEFKVLLETFTFPADSAPFKSCHASTIVEVVKDHFLAAYFGGTREGAPDVKIWLQHFKDGQWDSPVIVDEEPGVPMYNPVLFKLPSHELLLFYKIGQEVQKWSGCMKRSYDKGITWTEREQLPPGILGPIKNKPILLEDGTLLCGSSVESWNSWGAWMEVTSDAGRTWRKKGPIYIQGKSLSVIQPVPYQTAAGNLRILLRSFTGIDRICISESLDGGENWSFAVPTVLPNPNSGIDGVKLKDGRLVLAYNTDSRGVLKLGVSLDDGDSWTDILTLEESPGMEYSYPAVIQAGDGNVHVTYTYNRTQIKHVVLKTATDIDSKPYRHGEAGGGHVNLDLYEPNIN

SEQ ID NO: 35321 - protein, 269 aa, Arabidopsis thaliana
  peptide (1)..(269): Ceres Seq. ID no. 13608538
MYNPVLFKLPSHELLLFYKIGQEVQKWSGCMKRSYDKGITWTEREQLPPGILGPIKNKPILLEDGTLLCGSSVESWNSWGAWMEVTSDAGRTWRKKGPIYIQGKSLSVIQPVPYQTAAGNLRILLRSFTGIDRICISESLDGGENWSFAVPTVLPNPNSGIDGVKLKDGRLVLAYNTDSRGVLKLGVSLDDGDSWTDILTLEESPGMEYSYPAVIQAGDGNVHVTYTYNRTQIKHVVLKTATDIDSKPYRHGEAGGGHVNLDLYEPNIN

SEQ ID NO: 35322 - protein, 239 aa, Arabidopsis thaliana
  peptide (1)..(239): Ceres Seq. ID no. 13608539
MKRSYDKGITWTEREQLPPGILGPIKNKPILLEDGTLLCGSSVESWNSWGAWMEVTSDAGRTWRKKGPIYIQGKSLSVIQPVPYQTAAGNLRILLRSFTGIDRICISESLDGGENWSFAVPTVLPNPNSGIDGVKLKDGRLVLAYNTDSRGVLKLGVSLDDGDSWTDILTLEESPGMEYSYPAVIQAGDGNVHVTYTYNRTQIKHVVLKTATDIDSKPYRHGEAGGGHVNLDLYEPNIN

SEQ ID NO: 35323 - DNA, 1343 bp, Arabidopsis thaliana
  misc_feature (1)..(1343): Ceres Seq. ID no. 12333607
  misc_feature (1)..(1343): Ortholog of  Ceres SEQ ID NO 14301676 as cited in SEQ ID NO 67423
atcttcaccatcttcaatccatccgcccttgcagaccagagtcaaatccgcagcacaacaagccaatggctccatttctcggaggacctcagccaatcaactattgaagtctccatccccaccataatcgccgcctttctctcgttcttcgccgcctctatctccagcgccggaggaatcggcggcggtggactcttcctctcgataatgacaatcatcgccggtctcgaaatgaaaacagcttcaagcttctcagcgttcatggtaaccggcgtctctttcgctaacgtgggatgcaatcttttcctgagaaaccctaaatcaagagacaaaaccctaatcgacttcgatttagctcttactattcagccatgtctacttctcggagtaagtattggtgtgatctgtaaccgtatgttcccaaattggcttgtgttgtttctcttcgctgtgttcctcgcctggtcaacgatgaagacttgtaaaaagggagtttcttactggaatttggagtcggaaagagcgaagattaagagtccaagagacgttgatggcatcgaggtagcgagatcgccgcttctgagtgaagaaagagaagatgtgagacagagagggatgattaggtttccatggatgaagcttggagttttagtgatcatttggttattgttcttctctattaatcttttccgcggaaacaaatacggtcagggaatcatatcgatcaagccatgtggagctctctactggttcctctcctcgcttcaaatacctctcactatcttctttactctctgcatttacttcagtgacaatgttcaaagcaaccacacatcgcatagtaaccaaaactctgaacaggagactggagttggaggaagacaaaacaagttgatgctccctgtaatggctctcttggctggagttttgggtggcctctttggtattggtggtggaatgctcattagtcctcttcttctccaaatcggtattgctccagaggtaactgcagctacatgttcgttcatggttttgttttcttcatcaatgtctgcaatccagtacctactactaggcatggaacatgctggaaccgctgcgatatttgctctggtctgtttcgtggcatcactggttggactaatggtggttaagaaggttatagccaagtatgggagggcttcgatcattgtgtttgcagttggtatcgtcatggcacttagcactgtactgatgacaacccatggagcttttaatgtttggaatgattttgtctctggtcgctacatgggtttcaaattaccctgttaagaaccaaaattaaataaatccagttcttgttt

SEQ ID NO: 35324 - protein, 436 aa, Arabidopsis thaliana
  peptide (1)..(436): Ceres Seq. ID no. 12333608
IFTIFNPSALADQSQIRSTTSQWLHFSEDLSQSTIEVSIPTIIAAFLSFFAASISSAGGIGGGGLFLSIMTIIAGLEMKTASSFSAFMVTGVSFANVGCNLFLRNPKSRDKTLIDFDLALTIQPCLLLGVSIGVICNRMFPNWLVLFLFAVFLAWSTMKTCKKGVSYWNLESERAKIKSPRDVDGIEVARSPLLSEEREDVRQRGMIRFPWMKLGVLVIIWLLFFSINLFRGNKYGQGIISIKPCGALYWFLSSLQIPLTIFFTLCIYFSDNVQSNHTSHSNQNSEQETGVGGRQNKLMLPVMALLAGVLGGLFGIGGGMLISPLLLQIGIAPEVTAATCSFMVLFSSSMSAIQYLLLGMEHAGTAAIFALVCFVASLVGLMVVKKVIAKYGRASIIVFAVGIVMALSTVLMTTHGAFNVWNDFVSGRYMGFKLPC

SEQ ID NO: 35325 - protein, 367 aa, Arabidopsis thaliana
  peptide (1)..(367): Ceres Seq. ID no. 12333609
MTIIAGLEMKTASSFSAFMVTGVSFANVGCNLFLRNPKSRDKTLIDFDLALTIQPCLLLGVSIGVICNRMFPNWLVLFLFAVFLAWSTMKTCKKGVSYWNLESERAKIKSPRDVDGIEVARSPLLSEEREDVRQRGMIRFPWMKLGVLVIIWLLFFSINLFRGNKYGQGIISIKPCGALYWFLSSLQIPLTIFFTLCIYFSDNVQSNHTSHSNQNSEQETGVGGRQNKLMLPVMALLAGVLGGLFGIGGGMLISPLLLQIGIAPEVTAATCSFMVLFSSSMSAIQYLLLGMEHAGTAAIFALVCFVASLVGLMVVKKVIAKYGRASIIVFAVGIVMALSTVLMTTHGAFNVWNDFVSGRYMGFKLPC

SEQ ID NO: 35326 - protein, 359 aa, Arabidopsis thaliana
  peptide (1)..(359): Ceres Seq. ID no. 12333610
MKTASSFSAFMVTGVSFANVGCNLFLRNPKSRDKTLIDFDLALTIQPCLLLGVSIGVICNRMFPNWLVLFLFAVFLAWSTMKTCKKGVSYWNLESERAKIKSPRDVDGIEVARSPLLSEEREDVRQRGMIRFPWMKLGVLVIIWLLFFSINLFRGNKYGQGIISIKPCGALYWFLSSLQIPLTIFFTLCIYFSDNVQSNHTSHSNQNSEQETGVGGRQNKLMLPVMALLAGVLGGLFGIGGGMLISPLLLQIGIAPEVTAATCSFMVLFSSSMSAIQYLLLGMEHAGTAAIFALVCFVASLVGLMVVKKVIAKYGRASIIVFAVGIVMALSTVLMTTHGAFNVWNDFVSGRYMGFKLPC

SEQ ID NO: 35327 - DNA, 1624 bp, Arabidopsis thaliana
  misc_feature (1)..(1624): Ceres Seq. ID no. 12738384
  misc_feature (1)..(1624): Ortholog of  Ceres SEQ ID NO 14311857 as cited in SEQ ID NO 51473
  misc_feature (1)..(1624): Ortholog of  Ceres SEQ ID NO 14303094 as cited in SEQ ID NO 66388
gtcgatttagccctaacctatacggctgctacatccagatttcctcatcctctattagggaagaagaaccaaaaccctaatcctatcttctcctcttataaatcgcttcaacaacagtttctttctcttctgatttgatccatgatttctcatctggaaccctagtttatacatccatcgggtgttactgttctttatctgggcaatcagtggttagtcaaaagtataggattttcatttaaagatttgattttgcgttgaaatcgaacgaacccagatttcatattttgtctctgttttggcttttttatctttttaggtgtttttgttccttttgtatatctgtcgagacttctaggtgtgaaatcaaagcttgtttggtttatatcgatcttggttttagctgaatcgttgttaagatggctggaggtggaaacaggagagatgaaggatcgatcacgatccagagcactaatttgtttgcagcattggacactcgtaagaagaagaagaagtctgacaaggcagggaagagcaaagggtcttctaagtcacgagagccagagaaggagcctgagcctcaggtctattgggctcctacgcctttgaaagttaagtcttgggctgatattgatgatgaagacgacgatgatgactattatgcaaccactgctcctcctcagtctggttggagtacttctctgccttcccatactgattccaaagacgttcatgttgaggaaagtgaaagtgaggaagatattcttgatgaaggtgatgatgatgtggaggaagagcaggaacaggaaacagaggtacaggttcatccagagcctgaggtgaagaaagctcctgaagttcctgcacctcctaaagaggcagagaggcaactttccaagaaagagaggaaaaagaaggaacttgctgagcttgaagctttgttggctgattttggagttgcccccaaggagaacaatggcctagaggaatctcaagaggctggacaagaaaagaaagaagatgtcaatggagagggagagaagaaggagaatgcagcaggtggggagtcaaaggcatcaaaaaagaagaaaaagaaggataagcagaaggaggtaaaagaatctcaagagcaacaagcaaacaacaatgccgatgctgtagatgaagctgctgggtctgaaccaactgaggaagaatctccaattgacgtcaaggaaaggataaagaagcttgcatccatgaagaagaagaagtcaggcaaagaggtggatgctgcagctaaagctgctgcggaggaggcagctgcaagacgtaagaagctggccgcggcaaagaagaaggagaagaatcactataaccaacagcctgtgcggtaaaatcctgaatcaccaccattttgatcttgatggaaatgcaaatatgaacatgtatttcgccgtatattgttcatatgagtctctgtcctaataaatcttttgaagggtctggttcttagagttaaagacattgaatcctttttctagtcttattacaatgaacaggctaaagacaaaactactctctggagattttcatttctttttgaacacctttgttttcttaatatcagaccttttttaggttc

SEQ ID NO: 35328 - protein, 318 aa, Arabidopsis thaliana; identical to SEQ ID NO: 28893
  peptide (1)..(318): Ceres Seq. ID no. 12738385

SEQ ID NO: 35329 - DNA, 919 bp, Arabidopsis thaliana
  misc_feature (1)..(919): Ceres Seq. ID no. 13497757
  misc_feature (1)..(919): Ortholog of  Ceres SEQ ID NO 13597213 as cited in SEQ ID NO 64578
aacattcatttggaggaggagacctgaatctttgcaatctcgcaacagaaacggcgatgggaagatcagctctgattcacttgcttcgctcccaatcccgacgtctctcttcctccaccttcacttcaggatatcatcaccggtcaatagcaggatcatggtcatcatcagtgaacccgaaggtcagattccaggttccatcccttagccagagaagctgggcatcatttggagcaaagactagagaggacgatgatgagcacaagatcagcatcggaccccaagagaagaaagaagagaaggatggaggtgtggtttactatggaccaatctcatcaaccataaagaaagtgaaactcctctcactctccacttgctgtctatcagtctctcttggcccggtcatcactttcatgacttccccgggactgaatgtgatcatgaaaggtgctgttgcctctactgtgatcttccttagcgcatccacaaccgctgctctccactggtttgttagtccctacgtgcacaagctgaggtggcagcctggttcagacacttttgaggtcgagatgatgacttggctcggcacatttagcgcaaagacactgaaattctcagacatacgttatccagacacgcaaagaccgtatgtgagcttcaaggctgatgggaatttctactttgtggatgcagatcattgccctaacaaggcattgttggctaggctcactcctccaaaggatgctcatgactctgctttcaagaacttgtaatccaaattcgtttcttttgttatactctttttttgggtgtggatttttgttgggtttgtaagctctttaagatacttggatacctcctccccttctcatcactaatacccaaaaaaaatgcaaataagaaaagaccggtttgatcc

SEQ ID NO: 35330 - protein, 256 aa, Arabidopsis thaliana
  peptide (1)..(256): Ceres Seq. ID no. 13497758
HSFGGGDLNLCNLATETAMGRSALIHLLRSQSRRLSSSTFTSGYHHRSIAGSWSSSVNPKVRFQVPSLSQRSWASFGAKTREDDDEHKISIGPQEKKEEKDGGVVYYGPISSTIKKVKLLSLSTCCLSVSLGPVITFMTSPGLNVIMKGAVASTVIFLSASTTAALHWFVSPYVHKLRWQPGSDTFEVEMMTWLGTFSAKTLKFSDIRYPDTQRPYVSFKADGNFYFVDADHCPNKALLARLTPPKDAHDSAFKNL

SEQ ID NO: 35331 - protein, 238 aa, Arabidopsis thaliana
  peptide (1)..(238): Ceres Seq. ID no. 13497759
MGRSALIHLLRSQSRRLSSSTFTSGYHHRSIAGSWSSSVNPKVRFQVPSLSQRSWASFGAKTREDDDEHKISIGPQEKKEEKDGGVVYYGPISSTIKKVKLLSLSTCCLSVSLGPVITFMTSPGLNVIMKGAVASTVIFLSASTTAALHWFVSPYVHKLRWQPGSDTFEVEMMTWLGTFSAKTLKFSDIRYPDTQRPYVSFKADGNFYFVDADHCPNKALLARLTPPKDAHDSAFKNL

SEQ ID NO: 35332 - DNA, 893 bp, Arabidopsis thaliana
  misc_feature (1)..(893): Ceres Seq. ID no. 13491749
  misc_feature (1)..(893): Ortholog of  Ceres SEQ ID NO 12627129 as cited in SEQ ID NO 68657
  misc_feature (1)..(893): Ortholog of  Ceres SEQ ID NO 15179538 as cited in SEQ ID NO 0
tggccgacagtttgaagtaaagccagcaaatcgtgaaagccatttacttttagatctctctctgcactctctgactttgtccgcaaagtagatctgctgcaatggcttctcctcttctcccaacttcgactactcctgatcaacttcccggcggcgatccacagttgctgagctctctacgcgtcctcttgtcccgcgttctagccaccgtccgtcacgcttctgcagatgccagaccctgggcagagctcgttgaccggtcagcgttttcccggccaccatcgctctcggaggcaacgtcacgagtaaggaagaacttttcctatttccgagccaattacataaccttagtggcaatcttactcgccgcgtctctgctcacgcaccctttcgctctcttcctcctcgcatcgctggccgcttcttggcttttcctctactttttccgtccggcggatcagccgttggtcattggaggacgcacgttctccgatcttgagacgctagggatactctgcctgtccactgtggtggtgatgttcatgaccagcgttggatcgctcttgatgtccactctagcagttgggatcatgggcgtggccatccacggagcgtttcgtgctcccgaagacctgtttcttgaagaacaagaagccattggatctggacttttcgcattcttcaacaacaatgcctctaatgcagctgccgctgccatagccacctcagcaatgtcacgcgttcgagtctgagattgttgaagagactacattcctacaccgcatttccaaagtgtgatatttattcatattgaattgttgtaacttgtaaccattcttttgtcatttctgttttgtttactttgttgctggaattttgaaacacaattcatc

SEQ ID NO: 35333 - protein, 216 aa, Arabidopsis thaliana
  peptide (1)..(216): Ceres Seq. ID no. 13491750
MASPLLPTSTTPDQLPGGDPQLLSSLRVLLSRVLATVRHASADARPWAELVDRSAFSRPPSLSEATSRVRKNFSYFRANYITLVAILLAASLLTHPFALFLLASLAASWLFLYFFRPADQPLVIGGRTFSDLETLGILCLSTVVVMFMTSVGSLLMSTLAVGIMGVAIHGAFRAPEDLFLEEQEAIGSGLFAFFNNNASNAAAAAIATSAMSRVRV

SEQ ID NO: 35334 - DNA, 1980 bp, Arabidopsis thaliana
  misc_feature (1)..(1980): Ceres Seq. ID no. 13489005
  misc_feature (1)..(1980): Ortholog of  Ceres SEQ ID NO 14311305 as cited in SEQ ID NO 53731
  misc_feature (1)..(1980): Ortholog of  Ceres SEQ ID NO 13501807 as cited in SEQ ID NO 67558
ctacgtcagggaaaaaacaatggcatcatcatcatcatcacatttgttttgacgctccaagaaaatttgcatggcgacacattctatgatcattccttctccttcttcttcttcctcgtctctcgctactgctgcgtctccgtttaaagagactctaccactctttagtagatctctcacattcccgagaaaatccttgttttctcaggttcgcttgagattcttcgccgagaaacattctcagcttgatacttcaaatgggtgtgccactaatttcgcttctttacaagattctggagatcaacttacagaggaacatgttacaaaaggagagtctactcttagtattacagttgttggagcgtcaggggacttagccaagaagaagatatttcctgcattgtttgctctcttttatgagggttgtcttcctcaggacttttctgtttttggttatgctcggactaaactcactcatgaagagcttcgtgacatgattagtagtactttaacttgccggattgatcagagggaaaaatgtggggataagatggagcagttcttgaaaagatgcttttaccattcgggtcagtataactcggaagaggattttgcggaactaaacaagaagctcaaagagaaagaggcaggaaagatatcaaacaggctgtactatttgtcgatacccccaaacatattcgttgatgtggttaggtgtgcaagtcttagagcctcctcagagaatggctggacaagggtcattgtggaaaagccatttggtcgtgactctgaatcatccggagagttaactagatgtctgaaacagtatcttacagaggagcaaatcttcaggattgatcactatttgggaaaggagcttgttgagaacctttcagtgctccgattctcaaatcttgttttcgagcctctgtggtcaagaaattacatacgcaacgttcagctgattttttctgaggatttcggaacagaagggcgtggaggttactttgatcaatatggaatcatacgagacatcatgcaaaaccatctcttgcaaatacttgcactttttgcaatggagacgccagtgagcttagatgctgaggacataagaagtgaaaaggtgaaagttttgagatcaatgaaaccgttgcggcttgaagatgtggttgttggtcaatacaaaggccataacaagggaggaaaaacttatccaggttatacagacgatccaacggttccaaatcacagtctcactcctacatttgctgcagcagccatgttcatcaacaatgcgagatgggacggtgttccttttcttatgaaagctggaaaagctctccataccagaggagcagagatcagagttcagttcagacatgtcccaggaaacttgtacaagaaaagttttgctactaatttagacaatgcaacaaatgaactagtgattagagttcagcctgatgaagggatatacctgaggatcaacaacaaagttcctggtcttggaatgagactagatcgcagcgaccttaaccttctatatcgatccaggtatccaagagagataccagatgcatatgaaagactgcttctcgatgcaatcgaaggagagaggaggttgtttatcagaagtgatgagctagatgcagcatgggatctattcacaccggctttgaaggaactagaggagaagaaaatcattcctgagctctatccatatggaagcagaggtcctgttggtgcacattaccttgcatctaagtacaatgtgagatggggagatcttggagaagcttaagctttcgacagaaacaatatgatttggtgttaatatgagtaaactaacttgtcgatattatcaatgcgtagataaatccttgttaccaaaacttgctttttctctgacattttttgattgtttttggttctaaatcgagcatttcggaggaatgtaccaaaactcttgcaggaatagac

SEQ ID NO: 35335 - protein, 576 aa, Arabidopsis thaliana
  peptide (1)..(576): Ceres Seq. ID no. 13489006
MATHSMIIPSPSSSSSSLATAASPFKETLPLFSRSLTFPRKSLFSQVRLRFFAEKHSQLDTSNGCATNFASLQDSGDQLTEEHVTKGESTLSITVVGASGDLAKKKIFPALFALFYEGCLPQDFSVFGYARTKLTHEELRDMISSTLTCRIDQREKCGDKMEQFLKRCFYHSGQYNSEEDFAELNKKLKEKEAGKISNRLYYLSIPPNIFVDVVRCASLRASSENGWTRVIVEKPFGRDSESSGELTRCLKQYLTEEQIFRIDHYLGKELVENLSVLRFSNLVFEPLWSRNYIRNVQLIFSEDFGTEGRGGYFDQYGIIRDIMQNHLLQILALFAMETPVSLDAEDIRSEKVKVLRSMKPLRLEDVVVGQYKGHNKGGKTYPGYTDDPTVPNHSLTPTFAAAAMFINNARWDGVPFLMKAGKALHTRGAEIRVQFRHVPGNLYKKSFATNLDNATNELVIRVQPDEGIYLRINNKVPGLGMRLDRSDLNLLYRSRYPREIPDAYERLLLDAIEGERRLFIRSDELDAAWDLFTPALKELEEKKIIPELYPYGSRGPVGAHYLASKYNVRWGDLGEA

SEQ ID NO: 35336 - protein, 571 aa, Arabidopsis thaliana
  peptide (1)..(571): Ceres Seq. ID no. 13489007
MIIPSPSSSSSSLATAASPFKETLPLFSRSLTFPRKSLFSQVRLRFFAEKHSQLDTSNGCATNFASLQDSGDQLTEEHVTKGESTLSITVVGASGDLAKKKIFPALFALFYEGCLPQDFSVFGYARTKLTHEELRDMISSTLTCRIDQREKCGDKMEQFLKRCFYHSGQYNSEEDFAELNKKLKEKEAGKISNRLYYLSIPPNIFVDVVRCASLRASSENGWTRVIVEKPFGRDSESSGELTRCLKQYLTEEQIFRIDHYLGKELVENLSVLRFSNLVFEPLWSRNYIRNVQLIFSEDFGTEGRGGYFDQYGIIRDIMQNHLLQILALFAMETPVSLDAEDIRSEKVKVLRSMKPLRLEDVVVGQYKGHNKGGKTYPGYTDDPTVPNHSLTPTFAAAAMFINNARWDGVPFLMKAGKALHTRGAEIRVQFRHVPGNLYKKSFATNLDNATNELVIRVQPDEGIYLRINNKVPGLGMRLDRSDLNLLYRSRYPREIPDAYERLLLDAIEGERRLFIRSDELDAAWDLFTPALKELEEKKIIPELYPYGSRGPVGAHYLASKYNVRWGDLGEA

SEQ ID NO: 35337 - protein, 435 aa, Arabidopsis thaliana
  peptide (1)..(435): Ceres Seq. ID no. 13489008
MISSTLTCRIDQREKCGDKMEQFLKRCFYHSGQYNSEEDFAELNKKLKEKEAGKISNRLYYLSIPPNIFVDVVRCASLRASSENGWTRVIVEKPFGRDSESSGELTRCLKQYLTEEQIFRIDHYLGKELVENLSVLRFSNLVFEPLWSRNYIRNVQLIFSEDFGTEGRGGYFDQYGIIRDIMQNHLLQILALFAMETPVSLDAEDIRSEKVKVLRSMKPLRLEDVVVGQYKGHNKGGKTYPGYTDDPTVPNHSLTPTFAAAAMFINNARWDGVPFLMKAGKALHTRGAEIRVQFRHVPGNLYKKSFATNLDNATNELVIRVQPDEGIYLRINNKVPGLGMRLDRSDLNLLYRSRYPREIPDAYERLLLDAIEGERRLFIRSDELDAAWDLFTPALKELEEKKIIPELYPYGSRGPVGAHYLASKYNVRWGDLGEA

SEQ ID NO: 35338 - DNA, 637 bp, Arabidopsis thaliana
  misc_feature (1)..(637): Ceres Seq. ID no. 12322668
  misc_feature (1)..(637): Ortholog of  Ceres SEQ ID NO 13598936 as cited in SEQ ID NO 0
attattgttgagtgttgagtttttttcgctccgcctctctgaaactcgccgctagtaagcttcttcttcacttgtgctcttcttcgacgagatgaaccgtattggattgataaggggatcatcatccaaggatgtagtccggagaacgtttgcagcagcagctagtaaagccaagaaaggtggcaaaggaggtggagccagcgatgctcctaaaggttccagcttgaccaaagagatcaaatccaccactgttgttggtgccaatactctcaaagacggatctgatcccaagatcttgcctgattctgattaccctgattggctctggcatctcctcgataagcgaccagctctcagtgagcttaggaggaagaacgtcgagactcttccctacgatgatctcaaacgttttgtcaagctcgacacacggggtaaaatcaaggagaacaactccatcaaggccaaaaactgagagatgtaagatgttttcaactctctcactgttgctgttttctttgtatgtgggaactatgcttgctaataagtagattcttccagttagattacatttccaaggcgttattatgctcttgtatgttctcagacactcttagtatatccaagaaattgctgcttc

SEQ ID NO: 35339 - protein, 126 aa, Arabidopsis thaliana
  peptide (1)..(126): Ceres Seq. ID no. 12322669
MNRIGLIRGSSSKDVVRRTFAAAASKAKKGGKGGGASDAPKGSSLTKEIKSTTVVGANTLKDGSDPKILPDSDYPDWLWHLLDKRPALSELRRKNVETLPYDDLKRFVKLDTRGKIKENNSIKAKN

SEQ ID NO: 35340 - DNA, 788 bp, Arabidopsis thaliana
  misc_feature (1)..(788): Ceres Seq. ID no. 12738636
  misc_feature (1)..(788): Ortholog of  Ceres SEQ ID NO 13587227 as cited in SEQ ID NO 513
  misc_feature (1)..(788): Ortholog of  Ceres SEQ ID NO 13594494 as cited in SEQ ID NO 51293
  misc_feature (1)..(788): Ortholog of  Ceres SEQ ID NO 13595538 as cited in SEQ ID NO 59858
  misc_feature (1)..(788): Ortholog of  Ceres SEQ ID NO 12598249 as cited in SEQ ID NO 61073
  misc_feature (1)..(788): Ortholog of  Ceres SEQ ID NO 13582815 as cited in SEQ ID NO 68106
ctcttccaatttcgtttcgacatatttcgcgattcgtctaaggttttgttactgattgagaaaacatgggaggtgacaatgataatgacaaagacaaagggtttcatgggtatcctcccgctggatacccaccccctggggcttatccacccgctggatacccacaacaaggttaccctccaccacccggtgcttacccgcctgcaggttatcctccgggtgcctacccacctgcacctggtggttatcctccagcccctggttatggtggttatcctccagctcctggttatggaggttatcctcctgcacctggtcatggtggttaccctcctgctggctatcctgctcatcactcaggacacgcaggaggaattgggggtatgattgcaggtggctgcagctgcctatggagctcaccacgtagctcatagctctcacggtccttacggacatgctgcatatggtcacggttttggccatggtcatggctatggctatggtcatggtcatggtaagttcaagcatgggaagcacgggaagttcaagcatgggaagcatggaatgtttggaggaggcaagttcaagaagtggaagtgatctagttaataccttttgtgaatctgtctggactgaccaatgtttcaaataagccctaaacattatataagttgactttcgtcggttagattgctggttcgagttggaataattgaaacttaattagtatcaaatcttattgtatactttaaagctatcgttggctttataatgatagattctggttt

SEQ ID NO: 35341 - protein, 128 aa, Arabidopsis thaliana
  peptide (1)..(128): Ceres Seq. ID no. 12738637
LFQFRFDIFRDSSKVLLLIEKTWEVTMIMTKTKGFMGILPLDTHPLGLIHPLDTHNKVTLHHPVLTRLQVILRVPTHLHLVVILQPLVMVVILQLLVMEVILLHLVMVVTLLLAILLITQDTQEELGV

SEQ ID NO: 35342 - protein, 122 aa, Arabidopsis thaliana
  peptide (1)..(122): Ceres Seq. ID no. 12738638
MGGDNDNDKDKGFHGYPPAGYPPPGAYPPAGYPQQGYPPPPGAYPPAGYPPGAYPPAPGGYPPAPGYGGYPPAPGYGGYPPAPGHGGYPPAGYPAHHSGHAGGIGGMIAGGCSCLWSSPRSS

SEQ ID NO: 35343 - protein, 102 aa, Arabidopsis thaliana
  peptide (1)..(102): Ceres Seq. ID no. 12738639
MIMTKTKGFMGILPLDTHPLGLIHPLDTHNKVTLHHPVLTRLQVILRVPTHLHLVVILQPLVMVVILQLLVMEVILLHLVMVVTLLLAILLITQDTQEELGV

SEQ ID NO: 35344 - DNA, 756 bp, Arabidopsis thaliana
  misc_feature (1)..(756): Ceres Seq. ID no. 12332182
  misc_feature (1)..(756): Ortholog of  Ceres SEQ ID NO 15178852 as cited in SEQ ID NO 0
aaaaaatttctcaaaatcgcaaaatctttgcctctttcttctctaatcgaactaaatcttaaaactttgctgattgattgattttcgattccgggagaagaaaaatggtatctgggttgattaatgagaaccctatcatttacccaaagaaagagaggcgtcttcgtactgatacaagcattactgatgagcttacaccagaaccaattgatcaacttgagatttttgatcatataagagatatcaaagatccagagcatcctaatactctggaagatctcagagtagttacagaagactcagttgaagtggatgatgagaacagttatgttagggttacgttcactccaactgtcgaacattgtagcatggcaaccgttatcggtctttgtgtccgtgtgaaacttctacgaagccttccttctcgatacaagattgatataagggtagcacctggttctcatgcaacagaagatgcattgaataaacaactaaacgataaagaacgtgtggcggctgcactagagaatccaaacctcgtggagatggttgatgaatgcctgccatcagaagagtgaattgcttttattttcttgtgagcaagtaatttacacaagcctggtggtctcagtttacactatcaatacatgtctctgttttatttgcaaagattttgatccatcacatcgactaggacttgcattgtaatacttactctgatttcaagttttttctcaatcatttcaataaagtccc

SEQ ID NO: 35345 - protein, 157 aa, Arabidopsis thaliana
  peptide (1)..(157): Ceres Seq. ID no. 12332183
MVSGLINENPIIYPKKERRLRTDTSITDELTPEPIDQLEIFDHIRDIKDPEHPNTLEDLRVVTEDSVEVDDENSYVRVTFTPTVEHCSMATVIGLCVRVKLLRSLPSRYKIDIRVAPGSHATEDALNKQLNDKERVAAALENPNLVEMVDECLPSEE

SEQ ID NO: 35346 - DNA, 1265 bp, Arabidopsis thaliana
  misc_feature (1)..(1265): Ceres Seq. ID no. 13494325
  misc_feature (1)..(1265): Ortholog of  Ceres SEQ ID NO 14302154 as cited in SEQ ID NO 0
tggtttcagaaaagctttaacctaatttcacttcgtctctctctcgcgctcccaatttctccgccggcgggaaaaccatgtcgcacttcggaaggtcaggtccaccggatatcagcgacacctactcacttctcgtccttaacatcaccttccgtacgactgctgatgatctctatcctctattcgcaaagtatggaaaggtcgttgatgtgtttattcccagagatcgaaggactggtgattcgcgtggttttgcgtttgttcggtataagtataaagacgaagctcacaaagcagtggaaaggcttgatggaagagttgttgatggcagagaaataactgttcagtttgcgaaatatgggccaaatgctgaaaaaatttccaaaggaagagttgtggaaccaccgccgaagtcacgaagatctagaagccgtagtcctaggcggagtcgtagtcctaggaggagccgtagcccgcctagacgtcgtagtcccagaagaagccgcagtcctcgtaggaggtcccgagatgactatagggaaaaagactaccggaagcggagcaggagcagaagctatgacaggcgtgaaaggcatgaggagaaggatagagatcatcgtcgtcgcactaggtctcgtagtgccagcccagatgaaaaacgcagagtcagaggccgttatgataatgagagccgcagtcacagtcgttccttgagtgcatctcctgctcgccgcagccctagaagttcctccccacagaaaacctctcctgctagagaagtttctcctgataagcgtagcaatgagaggtctccatctcctcgtcgcagcctcagcccaagaagccctgctttgcaaaaggcctctccttctaaggagatgtctcctgaaaggcgtagcaatgagaggtccccatctcctggtagccctgctcctctgcgcaaagttgatgctgcttctcgaagtcaatctccttatgctgcggaatgactgcagccacttgtgaaagtgatacggtgtatgatgaaaaacacgtttgcttgtactgatgatgtttcatcattaagcactggaacgtctaccctctgtagtattacttgctttccgtaggtgccctcaaactactgagtactgactgtatctttgtttcctgttatcgttctggtttagtgttcatgtgcaagaattattactgtttgaacagcctttttagtctctgttttatttgaatcttctctggtttggaattcatagcattctaactct

SEQ ID NO: 35347 - protein, 303 aa, Arabidopsis thaliana
  peptide (1)..(303): Ceres Seq. ID no. 13494326
MSHFGRSGPPDISDTYSLLVLNITFRTTADDLYPLFAKYGKVVDVFIPRDRRTGDSRGFAFVRYKYKDEAHKAVERLDGRVVDGREITVQFAKYGPNAEKISKGRVVEPPPKSRRSRSRSPRRSRSPRRSRSPPRRRSPRRSRSPRRRSRDDYREKDYRKRSRSRSYDRRERHEEKDRDHRRRTRSRSASPDEKRRVRGRYDNESRSHSRSLSASPARRSPRSSSPQKTSPAREVSPDKRSNERSPSPRRSLSPRSPALQKASPSKEMSPERRSNERSPSPGSPAPLRKVDAASRSQSPYAAE

SEQ ID NO: 35348 - DNA, 867 bp, Arabidopsis thaliana
  misc_feature (1)..(867): Ceres Seq. ID no. 12397096
  misc_feature (1)..(867): Ortholog of  Ceres SEQ ID NO 13622227 as cited in SEQ ID NO 413
ataaaacaaaaaacatcctccgaagcagctactcctcctcagttgttgttccgccgtcccgccatcagatcccaatcaaagatttaggtaataatttaccatagaagaaatggcagagtctactcagatggaagttgagacagcaacagaaggaactgtgccattgccgcctaaaccaaccttcaagcctttgaaagctcatgaaatgtctgatggtaaagtccagttcaggaaaatagctgtaccaccaaaccgatactcgcctctcaagaaagcatggttggatatctacacacccatttacgatcagatgaaggttgacataaggatgaatctcaaagcccgcaaagtcgagcttaaaacccgagctgacactcccgacatcagtaatcttcagactctgcggattttgtacacgctttcatgcttggttttgatatccctgatgctatctctcttttgagaatggacgagctttatgttgagtcttttgagatcaaggatgtgaagactcttaaaggtgagcatttgtctagagccattggtaggttgtctggtaaaggagggaagacaaagtttgctattgagaactcgaccaagacgaggattgtgattgcagacactaggattcatattttgggagctttctctaatattaaagtcgcaaggagttcactttgcagtcttattatgggatctcctgctgggaaagtttactctaagctcagatctgtctctgctagattgaacgaatagttttgaatggcgaaattttgaaacattaacttgcttttgttcggagtgatctttgtaatgaaattttgaagaaacaaatgttatggtgttctttataaaatttgttatggg

SEQ ID NO: 35349 - protein, 117 aa, Arabidopsis thaliana
  peptide (1)..(117): Ceres Seq. ID no. 12397097
MAESTQMEVETATEGTVPLPPKPTFKPLKAHEMSDGKVQFRKIAVPPNRYSPLKKAWLDIYTPIYDQMKVDIRMNLKARKVELKTRADTPDISNLQTLRILYTLSCLVLISLMLSLF

SEQ ID NO: 35350 - protein, 111 aa, Arabidopsis thaliana
  peptide (1)..(111): Ceres Seq. ID no. 12397098
MEVETATEGTVPLPPKPTFKPLKAHEMSDGKVQFRKIAVPPNRYSPLKKAWLDIYTPIYDQMKVDIRMNLKARKVELKTRADTPDISNLQTLRILYTLSCLVLISLMLSLF

SEQ ID NO: 35351 - protein, 110 aa, Arabidopsis thaliana
  peptide (1)..(110): Ceres Seq. ID no. 12397099
MLGFDIPDAISLLRMDELYVESFEIKDVKTLKGEHLSRAIGRLSGKGGKTKFAIENSTKTRIVIADTRIHILGAFSNIKVARSSLCSLIMGSPAGKVYSKLRSVSARLNE

SEQ ID NO: 35352 - DNA, 1121 bp, Arabidopsis thaliana
  misc_feature (1)..(1121): Ceres Seq. ID no. 13501438
  misc_feature (1)..(1121): Ortholog of  Ceres SEQ ID NO 14309294 as cited in SEQ ID NO 0
accaatccttcacttcctttcacgatccaaaacaaaacacaagaaaatgcaacaaaatcttctccatctctgaactcaaaaactcattcactgagaaaaatggagacccttctctcccctcgtgcgctctctcctcctctcaatcccaaacctttgtcccttcaccagaccaaacccacttcacattcattgtctctctcaaaacccaccaccttctccggtcctaaacacctctccacccggttcactaaaccggaatcaagaaactggttaatagatgcaaagcaaggactagctgctttagctttatctctaactctcactttctcacctgttggcactgctttagcctctgagttcaatatcctcaacgatggtccacctaaagaaacttacgtagtcgatgacgctggtgttcttagtcgagtgacgaagtcagatcttaagaagcttttgtctgatcttgaatacagaaagaaactgagactcaatttcatcactgtccgaaagctcaccagtaaagcagatgcgtttgagtatgcagaccaggttttggaaaaatggtatccttctattgaagaaggtaacaataagggtattgttgttttgataacaagtcagaaggaaggagctattactggtggtcctgcttttattgaagctgttggtgaaaacattcttgatgctaccgtctccgaaaatcttcccgtactagcaacggacgaaaaatacaacgaggcggtatatagcagtgcgaaaaggttggttgcagctatagacggtcaaccagatcccgggggtccaaccgtaaaggatagcaagagagaatcaaatttcaagacgaaagaagaaaccgatgagaagcgaggacagttcagtcttgtcgttggaggattacttgtaattgcctttgtagttcccatggcacaatactttgcttatgtctccaggaagtaagtaagtaaactcggttcactctcgtaaaccaaaccgatcaggtcagaactttgatttacctcggttatttggttatggtttcttggtaaattggtttatttgaacaatataagtaaataataacagaaaactaaagaatgaatgaaaccatccgattgtaacgg

SEQ ID NO: 35353 - protein, 318 aa, Arabidopsis thaliana; identical to SEQ ID NO: 26771
  peptide (1)..(318): Ceres Seq. ID no. 13501439

SEQ ID NO: 35354 - protein, 285 aa, Arabidopsis thaliana; identical to SEQ ID NO: 26772
  peptide (1)..(285): Ceres Seq. ID no. 13501440

SEQ ID NO: 35355 - DNA, 1069 bp, Arabidopsis thaliana
  misc_feature (1)..(1069): Ceres Seq. ID no. 13593680
  misc_feature (1)..(1069): Ortholog of  Ceres SEQ ID NO 13595271 as cited in SEQ ID NO 56058
  misc_feature (1)..(1069): Ortholog of  Ceres SEQ ID NO 14315170 as cited in SEQ ID NO 60009
  misc_feature (1)..(1069): Ortholog of  Ceres SEQ ID NO 13656105 as cited in SEQ ID NO 65310
ggtgaagccaaaggcatcgtgagcaaaatccgcagttttctacattaatggattgtttctgttctagagcttctcttccgtctctgtgatttctgggtagattctaggatttctatttgcatctctaacctgagagctgctaatagtccacacaactttttagtttgtgagttttcctaatttagggttaggacaaatttctgtatttttcatccaaggggataaagatgtatgctgataaattggaggctgagtctggaagcaggaaggtcgttaaggatcgtatcaatggcggttctggagacatctctactcgcgtgcgacaagtgactgggaagaggcaaaggcaggacgacaaatgggagcatgatcttttcagtagtgacaaacctcaactttcaaatcgcagggttgatcctagagatcttcgtttgaagctccaaaagagacatcatgggtctcaaagtgggcgagaagctggttcaggcgtgcgggatttacgggatcagctctctgggacaatgaatcagcaaccaaaaaacagtgacccaccaaaatccaaagcggaggctgctaggccaagtatgaagagcgtagcgactgaaacagagactagaaaaacttccagtcaagctaccaggaagaaatcacagcaggctgattcatcggttgatagctttcttgaatcattgggtctcgagaaatattcaacagcgtttcaagtggaagaagttgatatggatgctctcatgcatatgacagatgatgacctcaaggctatgctcataccgatgggtccgaggaagaagatacttcttgctttgggatctaaaccctaagagcttagtgccatctacctgatggttggaagctcaggtgaatggtctctggagttgttacattaagaattgtcagaaatgaattggctctttttctcttgattgtattttgcccattttaagagcttagaatttggttagacatctgtaatcgtaaacatggtgaaacatacactgtttgattgcaccacttttgatgtgagagaagccttaagataaacacaacaacg

SEQ ID NO: 35356 - protein, 203 aa, Arabidopsis thaliana
  peptide (1)..(203): Ceres Seq. ID no. 13593681
MYADKLEAESGSRKVVKDRINGGSGDISTRVRQVTGKRQRQDDKWEHDLFSSDKPQLSNRRVDPRDLRLKLQKRHHGSQSGREAGSGVRDLRDQLSGTMNQQPKNSDPPKSKAEAARPSMKSVATETETRKTSSQATRKKSQQADSSVDSFLESLGLEKYSTAFQVEEVDMDALMHMTDDDLKAMLIPMGPRKKILLALGSKP

SEQ ID NO: 35357 - protein, 105 aa, Arabidopsis thaliana
  peptide (1)..(105): Ceres Seq. ID no. 13593682
MNQQPKNSDPPKSKAEAARPSMKSVATETETRKTSSQATRKKSQQADSSVDSFLESLGLEKYSTAFQVEEVDMDALMHMTDDDLKAMLIPMGPRKKILLALGSKP

SEQ ID NO: 35358 - DNA, 722 bp, Arabidopsis thaliana
  misc_feature (1)..(722): Ceres Seq. ID no. 13497755
  misc_feature (1)..(722): Ortholog of  Ceres SEQ ID NO 12612244 as cited in SEQ ID NO 60140
gaatttattctcatgtttgtttgtttctcactttaccaatctcacttacagatcttccttcttcttcctcttcctcttcttcttccttaaaccctacaagcttctactctattgacaatttgattccgagtttacatcgataatggcggaccaaacctccgattcaacatctcccgtggctcctctctccgtatcttctcctactgctactaagaaagataataccaatcctgttgattcgaagctcacggaattgaatgaatcaagggctgagttactaaacaggatccagaatctgaaacaggacttgcaaagttggagaggtaaattggacactcaagttaaagtctaccgtgaggagctctctgggctaaagaagactctgaatcttgaagttgagcagcttcgtgaggaattcaaagatctgaaaactaccttgaatcaacagcaagatgatgtttccgctagcctgaaaagcttaggcctacaagattcaaaagagcaaattgataagagaagtgaggtgacagaagagaaagtggaagctctatcgactgatgataatgccaaagaagcagaacattagataatatgaaattgtttgttcttatgatattctcgccactactgttaccactaccttgagattgtactagtatgcttaatatgtagttccgcggtttagttgattctaatgatgcaccatgacacaatggtttgct

SEQ ID NO: 35359 - protein, 147 aa, Arabidopsis thaliana
  peptide (1)..(147): Ceres Seq. ID no. 13497756
MADQTSDSTSPVAPLSVSSPTATKKDNTNPVDSKLTELNESRAELLNRIQNLKQDLQSWRGKLDTQVKVYREELSGLKKTLNLEVEQLREEFKDLKTTLNQQQDDVSASLKSLGLQDSKEQIDKRSEVTEEKVEALSTDDNAKEAEH

SEQ ID NO: 35360 - DNA, 967 bp, Arabidopsis thaliana
  misc_feature (1)..(967): Ceres Seq. ID no. 13497723
  misc_feature (1)..(967): Ortholog of  Ceres SEQ ID NO 13599581 as cited in SEQ ID NO 0
atttacaactgtggataagccttttagtctgactcagctttctcaagatccgaaaacacactgacccaacccggttcgattttgcttaaccggacaagatacattaatctgcctaatcttcaattatttaaaagctaactaaacgttatacgtactaatcacttcttcccctataaataaacctttctaatttctcatctcaaatcacactgcatcacaaaacccaaatcggaacttaaaccaaaagacaaacaaaaacgccgtcgtttcacgatgctttcttcttccccaaccttcttcgctactccatttctctcttcttcttcttcttcttctccgtcgttctcttctacttcaccaccgtcacgcatttcccggatctcgccgtcgctttctacaaccaccgcgtcctacacctgcgccgaagatctaccgagattacgccaaatcccgcagcgattttcagcaaccgcgtctctctacgagatccttgaaattcccgtcggctcgacgagtcaagagatcaaatcagcttaccggcgactagccaggatctgtcatcccgatgtagcgagaaatagtcgggataactcgtcggcggacgatttcatgaagatccacgcagcgtattgcacgctttcggatcccgagaaacgcgccgtttatgatcggaggactcttcttcggagccggccgttaacggctggatacggcagttacggtggacggaattgggaaaccgatcagtgctggtagcgagttgactcgatgtgtcgagttggtccaaaaccattgaattggttgtaattagagcaaacccagagattctgggtggttgtgccacgtaggatcaacacggtttatcgtgccacgtaggatctgtcgcgttgttagcctttgtatccataattagtaagtagtctgtatttagtatttaccatctaataaagaaaataaaaatttatgt

SEQ ID NO: 35361 - protein, 160 aa, Arabidopsis thaliana
  peptide (1)..(160): Ceres Seq. ID no. 13497724
MLSSSPTFFATPFLSSSSSSSPSFSSTSPPSRISRISPSLSTTTASYTCAEDLPRLRQIPQRFSATASLYEILEIPVGSTSQEIKSAYRRLARICHPDVARNSRDNSSADDFMKIHAAYCTLSDPEKRAVYDRRTLLRSRPLTAGYGSYGGRNWETDQCW

SEQ ID NO: 35362 - DNA, 988 bp, Arabidopsis thaliana
  misc_feature (1)..(988): Ceres Seq. ID no. 12396938
  misc_feature (1)..(988): Ortholog of  Ceres SEQ ID NO 12608620 as cited in SEQ ID NO 60192
  misc_feature (1)..(988): Ortholog of  Ceres SEQ ID NO 15173077 as cited in SEQ ID NO 64566
  misc_feature (1)..(988): Ortholog of  Ceres SEQ ID NO 13662898 as cited in SEQ ID NO 66199
  misc_feature (1)..(988): Ortholog of  Ceres SEQ ID NO 13654314 as cited in SEQ ID NO 67914
aaacataccgaattacatatatatctcgctcgctctcttctttgttcttgctccttgttctagttcggatttttcttttgaagtgaaatggttaacgctacagttgcgagaaacattgccggcatttgtggaaatgtcatctccttgttcttgttcttatctcccatacctacgttcataaccatatacaagaagaaaaaggtggaggagtacaaagctgacccatacttagccacggttctaaattgcgcactatgggtcttttatggcttaccaatggttcaaccagatagtctccttgtgatcaccataaatggtaccggtttagccattgagctggtgtatctcgctatcttcttcttcttttctccaactagtcgcaaggtgaaagtggggctatggttaataggagagatggtgtttgtaggaatagtagccacatgcacattgctattgttccacacacataaccagagatcttcttttgttggaatcttttgtgtcatttttgttagtctcatgtatattgctcctctcaccatcatgagtaaggtgatcaagaccaaaagtgtgaagtacatgccattctctctctcacttgccaatttcctcaatggtgtcgtttgggttatttatgcacttattaagttcgaccttttcattttgattggaaatggacttggaacggtatcaggagcagtacaacttatactctatgcttgctattacaagacaacaccaaaagatgatgaagatgaagaagatgaggagaatctttctaaggttaactctcagttacaacttagtggcaacagtggacaagctaaacgagtttcagcttgattatatgtttggattcatgagatatgaatttagttttatgtttttttttaagcttttggctgatttaactttaagtaactctattattttcgcgtttcctttttgtaaaatgcaaactctttttcttctatgaaagatattaacc

SEQ ID NO: 35363 - protein, 251 aa, Arabidopsis thaliana
  peptide (1)..(251): Ceres Seq. ID no. 12396939
MVNATVARNIAGICGNVISLFLFLSPIPTFITIYKKKKVEEYKADPYLATVLNCALWVFYGLPMVQPDSLLVITINGTGLAIELVYLAIFFFFSPTSRKVKVGLWLIGEMVFVGIVATCTLLLFHTHNQRSSFVGIFCVIFVSLMYIAPLTIMSKVIKTKSVKYMPFSLSLANFLNGVVWVIYALIKFDLFILIGNGLGTVSGAVQLILYACYYKTTPKDDEDEEDEENLSKVNSQLQLSGNSGQAKRVSA

SEQ ID NO: 35364 - protein, 188 aa, Arabidopsis thaliana
  peptide (1)..(188): Ceres Seq. ID no. 12396940
MVQPDSLLVITINGTGLAIELVYLAIFFFFSPTSRKVKVGLWLIGEMVFVGIVATCTLLLFHTHNQRSSFVGIFCVIFVSLMYIAPLTIMSKVIKTKSVKYMPFSLSLANFLNGVVWVIYALIKFDLFILIGNGLGTVSGAVQLILYACYYKTTPKDDEDEEDEENLSKVNSQLQLSGNSGQAKRVSA

SEQ ID NO: 35365 - protein, 142 aa, Arabidopsis thaliana
  peptide (1)..(142): Ceres Seq. ID no. 12396941
MVFVGIVATCTLLLFHTHNQRSSFVGIFCVIFVSLMYIAPLTIMSKVIKTKSVKYMPFSLSLANFLNGVVWVIYALIKFDLFILIGNGLGTVSGAVQLILYACYYKTTPKDDEDEEDEENLSKVNSQLQLSGNSGQAKRVSA

SEQ ID NO: 35366 - DNA, 1243 bp, Arabidopsis thaliana; identical to SEQ ID NO: 22030
  misc_feature (1)..(1243): Ceres Seq. ID no. 12562371
  misc_feature (1)..(1243): Ortholog of  Ceres SEQ ID NO 13581848 as cited in SEQ ID NO 51340
  misc_feature (1)..(1243): Ortholog of  Ceres SEQ ID NO 13595392 as cited in SEQ ID NO 56164
  misc_feature (1)..(1243): Ortholog of  Ceres SEQ ID NO 14316412 as cited in SEQ ID NO 59209
  misc_feature (1)..(1243): Ortholog of  Ceres SEQ ID NO 12618341 as cited in SEQ ID NO 64256

SEQ ID NO: 35367 - protein, 244 aa, Arabidopsis thaliana; identical to SEQ ID NO: 20888
  peptide (1)..(244): Ceres Seq. ID no. 12562372

SEQ ID NO: 35368 - protein, 238 aa, Arabidopsis thaliana; identical to SEQ ID NO: 20889
  peptide (1)..(238): Ceres Seq. ID no. 12562373

SEQ ID NO: 35369 - protein, 233 aa, Arabidopsis thaliana; identical to SEQ ID NO: 22033
  peptide (1)..(233): Ceres Seq. ID no. 12562374

SEQ ID NO: 35370 - DNA, 1796 bp, Arabidopsis thaliana
  misc_feature (1)..(1796): Ceres Seq. ID no. 13487042
  misc_feature (1)..(1796): Ortholog of  Ceres SEQ ID NO 14313943 as cited in SEQ ID NO 54725
  misc_feature (1)..(1796): Ortholog of  Ceres SEQ ID NO 14309674 as cited in SEQ ID NO 55707
  misc_feature (1)..(1796): Ortholog of  Ceres SEQ ID NO 13658728 as cited in SEQ ID NO 66270
  misc_feature (1)..(1796): Ortholog of  Ceres SEQ ID NO 12465428 as cited in SEQ ID NO 68898
gacagtgaattagggttttactcaaaaaaccttctcgttgtcgttgtttactgctccgacgagaaaatggcgatgcgacatttgagccgatcgagagacgttacaaagagatcgacaaagaagtacatcgaagaacctctgtacaatcgcctcttcaaagatggtggtacagaggtcaaagttcgacagcagcttaatcagttcctcaaaggcactaaacacgtcttcaaatgggaggtcggcgatacgatcaagaaactccgaaatcgcggcctctattacccagctctcaagctatctgaagttatggaagagagaggtatgaacaagacagtgagtgatcaagcaatccatcttgatcttgttgctaaagctcgtgaaattactgctggggagaattattttgttgatcttccggaaacatctaagacggaactcacgtatgggtctcttttgaactgttactgcaaggagttgttgacagagaaagcggaaggtttgctgaataagatgaaagagctcaacattactcctagttccatgtcttataacagcctcatgactctttacaccaagacaggtgagactgagaaagttccggcgatgattcaagaattgaaggcggagaatgtgatgccggattcgtacacttataatgtctggatgagggctttggctgctactaatgatatttctggtgttgagagagtcattgaagagatgaatagagatggtagagttgctccggattggactacgtatagcaatatggcatcgatatatgttgatgctggactgtctcagaaagctgagaaggctcttcaggaactggagatgaaaaacacgcaacgggattttacggcatatcagtttcttattactttgtatggacgtctggggaagctgactgaagtttacagaatttggcgttcgttgaggctggctattccgaaaacctcaaatgtagcttatctaaacatgatacaagtgctggtcaagttgaatgatttacctggtgcagagacattgttcaaggaatggcaagctaactgttctacttatgacatcaggattgtgaatgtgttgattggagcttatgctcaagagggtctaatccagaaagcaaatgagctcaaggagaaagctcccagaagaggtggaaagctcaatgctaaaacatgggagatcttcatggattactatgtaaagagcggtgatatggctcgagcactcgaatgcatgtcaaaggcagtctccatcggcaaaggagatggtggcaagtggctaccgtcacctgaaacagtcagagctttgatgagctatttcgagcaaaagaaagatgttaatggagctgagaatttgttggagattttaaagaatggaacagacaacataggcgcagaaatatttgaaccattgataagaacatatgcagcagcgggaaagagtcaccctgctatgcgacggcgcctgaagatggaaaacgtggaggttaatgaagcgacaaagaagctactcgatgaagtatctcaggatgtgtgaggtctgttccatctctttctccttcattattcacttcagacaaagacatcattagtcgtgatagggtcacttgcattctcacagctctgtctcttattggtaataaaaaaataggctctgaatcggcaaaatcaattgtatgggtctgttttactttcaccgtagactgtttgttcatgtttttgtgaattgtttttggtttagcttggatttacagttgagacagctctcacaatgtaatcccttttttggag

SEQ ID NO: 35371 - protein, 513 aa, Arabidopsis thaliana
  peptide (1)..(513): Ceres Seq. ID no. 13487043
DSELGFYSKNLLVVVVYCSDEKMAMRHLSRSRDVTKRSTKKYIEEPLYNRLFKDGGTEVKVRQQLNQFLKGTKHVFKWEVGDTIKKLRNRGLYYPALKLSEVMEERGMNKTVSDQAIHLDLVAKAREITAGENYFVDLPETSKTELTYGSLLNCYCKELLTEKAEGLLNKMKELNITPSSMSYNSLMTLYTKTGETEKVPAMIQELKAENVMPDSYTYNVWMRALAATNDISGVERVIEEMNRDGRVAPDWTTYSNMASIYVDAGLSQKAEKALQELEMKNTQRDFTAYQFLITLYGRLGKLTEVYRIWRSLRLAIPKTSNVAYLNMIQVLVKLNDLPGAETLFKEWQANCSTYDIRIVNVLIGAYAQEGLIQKANELKEKAPRRGGKLNAKTWEIFMDYYVKSGDMARALECMSKAVSIGKGDGGKWLPSPETVRALMSYFEQKKDVNGAENLLEILKNGTDNIGAEIFEPLIRTYAAAGKSHPAMRRRLKMENVEVNEATKKLLDEVSQDV

SEQ ID NO: 35372 - protein, 491 aa, Arabidopsis thaliana
  peptide (1)..(491): Ceres Seq. ID no. 13487044
MAMRHLSRSRDVTKRSTKKYIEEPLYNRLFKDGGTEVKVRQQLNQFLKGTKHVFKWEVGDTIKKLRNRGLYYPALKLSEVMEERGMNKTVSDQAIHLDLVAKAREITAGENYFVDLPETSKTELTYGSLLNCYCKELLTEKAEGLLNKMKELNITPSSMSYNSLMTLYTKTGETEKVPAMIQELKAENVMPDSYTYNVWMRALAATNDISGVERVIEEMNRDGRVAPDWTTYSNMASIYVDAGLSQKAEKALQELEMKNTQRDFTAYQFLITLYGRLGKLTEVYRIWRSLRLAIPKTSNVAYLNMIQVLVKLNDLPGAETLFKEWQANCSTYDIRIVNVLIGAYAQEGLIQKANELKEKAPRRGGKLNAKTWEIFMDYYVKSGDMARALECMSKAVSIGKGDGGKWLPSPETVRALMSYFEQKKDVNGAENLLEILKNGTDNIGAEIFEPLIRTYAAAGKSHPAMRRRLKMENVEVNEATKKLLDEVSQDV

SEQ ID NO: 35373 - protein, 489 aa, Arabidopsis thaliana
  peptide (1)..(489): Ceres Seq. ID no. 13487045
MRHLSRSRDVTKRSTKKYIEEPLYNRLFKDGGTEVKVRQQLNQFLKGTKHVFKWEVGDTIKKLRNRGLYYPALKLSEVMEERGMNKTVSDQAIHLDLVAKAREITAGENYFVDLPETSKTELTYGSLLNCYCKELLTEKAEGLLNKMKELNITPSSMSYNSLMTLYTKTGETEKVPAMIQELKAENVMPDSYTYNVWMRALAATNDISGVERVIEEMNRDGRVAPDWTTYSNMASIYVDAGLSQKAEKALQELEMKNTQRDFTAYQFLITLYGRLGKLTEVYRIWRSLRLAIPKTSNVAYLNMIQVLVKLNDLPGAETLFKEWQANCSTYDIRIVNVLIGAYAQEGLIQKANELKEKAPRRGGKLNAKTWEIFMDYYVKSGDMARALECMSKAVSIGKGDGGKWLPSPETVRALMSYFEQKKDVNGAENLLEILKNGTDNIGAEIFEPLIRTYAAAGKSHPAMRRRLKMENVEVNEATKKLLDEVSQDV

SEQ ID NO: 35374 - DNA, 1058 bp, Arabidopsis thaliana
  misc_feature (1)..(1058): Ceres Seq. ID no. 13592274
  misc_feature (1)..(1058): Ortholog of  Ceres SEQ ID NO 12608863 as cited in SEQ ID NO 51470
  misc_feature (1)..(1058): Ortholog of  Ceres SEQ ID NO 13639221 as cited in SEQ ID NO 56429
  misc_feature (1)..(1058): Ortholog of  Ceres SEQ ID NO 14302493 as cited in SEQ ID NO 67957
  misc_feature (1)..(1058): Ortholog of  Ceres SEQ ID NO 13624608 as cited in SEQ ID NO 0
gaattatctatcacaccaccactctctctctaatctatctatccgagaatggccaagatgggcttgaaacccgacccggctactactaaccagacccacaataatgccaaggagattcgttacagaggcgttaggaagcgtccttggggccgttatgccgccgagatccgagatccgggcaagaaaacccgcgtctggcttggcactttcgatacggctgaagaggcggcgcgtgcttacgatacggcggcgcgtgattttcgtggtgctaaggctaagaccaatttcccaacttttctcgagctgagtgaccagaaggtccctaccggtttcgcgcgtagccctagccagagcagcacgctcgactgtgcttctcctccgacgttagttgtgccttcagcgacggctgggaatgttcccccgcagctcgagcttagtctcggcggaggaggcggcggctcgtgttatcagatcccgatgtcgcgtcctgtctactttttggacctgatggggatcggtaacgtaggtcgtggtcagcctcctcctgtgacatcggcgtttagatcgccggtggtgcatgttgcgacgaagatggcttgtggtgcccaaagcgactctgattcgtcatcggtcgttgatttcgaaggtgggatggagaagagatctcagctgttagatctagatcttaatttgcctcctccatcggaacaggcctgagcttttaacggtgtcgtttcaattcgaagcgcatgcgtttcttcttctttttgagctgtgaaaattcgttttctcatagtttttcctctctctctctctcagtctaaatttattaccagtttttagaaagaaaaaacagattaaatctgagagagaaaaatataattttagctgacatggatcgttatgtacatattattacataaccggagatctgaacttttgttgtgtgcttttaattttttgcgacttggtttcaccccatgttgtttctctattttttttactactttttttttttttgttcttccaaattttcaatcaataatttggtaatcttc

SEQ ID NO: 35375 - protein, 222 aa, Arabidopsis thaliana
  peptide (1)..(222): Ceres Seq. ID no. 13592275
MAKMGLKPDPATTNQTHNNAKEIRYRGVRKRPWGRYAAEIRDPGKKTRVWLGTFDTAEEAARAYDTAARDFRGAKAKTNFPTFLELSDQKVPTGFARSPSQSSTLDCASPPTLVVPSATAGNVPPQLELSLGGGGGGSCYQIPMSRPVYFLDLMGIGNVGRGQPPPVTSAFRSPVVHVATKMACGAQSDSDSSSVVDFEGGMEKRSQLLDLDLNLPPPSEQA

SEQ ID NO: 35376 - protein, 219 aa, Arabidopsis thaliana
  peptide (1)..(219): Ceres Seq. ID no. 13592276
MGLKPDPATTNQTHNNAKEIRYRGVRKRPWGRYAAEIRDPGKKTRVWLGTFDTAEEAARAYDTAARDFRGAKAKTNFPTFLELSDQKVPTGFARSPSQSSTLDCASPPTLVVPSATAGNVPPQLELSLGGGGGGSCYQIPMSRPVYFLDLMGIGNVGRGQPPPVTSAFRSPVVHVATKMACGAQSDSDSSSVVDFEGGMEKRSQLLDLDLNLPPPSEQA

SEQ ID NO: 35377 - DNA, 950 bp, Arabidopsis thaliana
  misc_feature (1)..(950): Ceres Seq. ID no. 12396694
  misc_feature (1)..(950): Ortholog of  Ceres SEQ ID NO 12610908 as cited in SEQ ID NO 55869
  misc_feature (1)..(950): Ortholog of  Ceres SEQ ID NO 14302449 as cited in SEQ ID NO 62344
ttttcactttgttctctctctctctcgtaacacgcctgagagttctcgtcgtccttatctcgatcttggttgattcgctctccgatcggaaattagggcttttgttttctgaagatgacgactgcagcacgaccaacctgggctccagctaagggaggtaacgagcaaggtggtgctcggatctttggtccatctcagaagtattcgtcccgtgatgtcgccgctcacacaactttaaagccaaggagggaagggcaacacactcaagaggaactccagaagataaatcttcgtgatgagcttgaagagcgtgagaggagacatttctcatcaaaagacaaatcatacaatgatgatagagatcgcagaagaggaagtcagcttttactggaagactcgaaaagggatcctgaagagcggattattcctcgcagtgtagatgctgatgattctgatgttgatatcaaaagtgacgatgatagtgatgacgaaagtgacgatgatgatgaggacgacactgaagctcttatggcggaactcgaccagataaagaaagaaagagtggaagagaggctcaggaaggaaaaagagcagcagatggaagagctaaacgctaaggaagaggaacttctcaaaggaaacccattgcttaatactccagcgtcttttagcgtcaaaaggaggtgggatgatgatgttgtattcaaaaaccaggcacgtggtgaaatgaaagctcctaagcgcttcatcaatgatacaatcaggaatgacttccacagaaaattcctgcatagatacatgaagtgattgtttgtcaagagtgttattgctacttctttgtatgatgattatgactaaaagcttttattctgtctggaattacgatgtctctgtactcaaacaacaaatgtttttaagctttatatcaaaaacttatgcatttgattttg

SEQ ID NO: 35378 - protein, 230 aa, Arabidopsis thaliana
  peptide (1)..(230): Ceres Seq. ID no. 12396695
MTTAARPTWAPAKGGNEQGGARIFGPSQKYSSRDVAAHTTLKPRREGQHTQEELQKINLRDELEERERRHFSSKDKSYNDDRDRRRGSQLLLEDSKRDPEERIIPRSVDADDSDVDIKSDDDSDDESDDDDEDDTEALMAELDQIKKERVEERLRKEKEQQMEELNAKEEELLKGNPLLNTPASFSVKRRWDDDVVFKNQARGEMKAPKRFINDTIRNDFHRKFLHRYMK

SEQ ID NO: 35379 - DNA, 1817 bp, Arabidopsis thaliana
  misc_feature (1)..(1817): Ceres Seq. ID no. 13500174
  misc_feature (1)..(1817): Ortholog of  Ceres SEQ ID NO 13532807 as cited in SEQ ID NO 53012
  misc_feature (1)..(1817): Ortholog of  Ceres SEQ ID NO 13663060 as cited in SEQ ID NO 60964
  misc_feature (1)..(1817): Ortholog of  Ceres SEQ ID NO 13598532 as cited in SEQ ID NO 65204
  misc_feature (1)..(1817): Ortholog of  Ceres SEQ ID NO 13656849 as cited in SEQ ID NO 65764
  misc_feature (1)..(1817): Ortholog of  Ceres SEQ ID NO 13655298 as cited in SEQ ID NO 68914
  misc_feature (1)..(1817): Ortholog of  Ceres SEQ ID NO 13656501 as cited in SEQ ID NO 69206
accggaattttctcgcttttgtctactctcctccatctccgaggttctccaagctcagctcctcttcccatcattcatccgaccgccttatccggagaactacaaagaggaaaccaagattgttttgttttgttagactctaccccttttccgattcacatggtaaggacattgaggtagagaataatactaaaaagcaatgggagatgggagttccagtagatccaacagctcaaacagcactagtgagaaaccagagtggctgcaacagtacaatctcgttggtaagattggtgaaggcacttatggtcttgttttcttggctagaaccaagactccgcctaaaagacctattgctatcaagaagtttaagcagtccaaagatggagatggagtttccccgactgctatccgcgagatcatgttgcttagagagatttcccatgagaacgtcgtgaagcttgtgaatgtccacatcaattttgcagacatgtctctgtatcttgcctttgattatgccgagtacgatctctatgaaatcatcaggcaccacagagacaaagtcggccattcgttaaacacatacacagttaagtctttgctctggcagcttctcaacggattgaactatcttcacagtaattggattatacacagagatttgaaaccgtcgaatatcttggttatgggtgatgcagaagagcacggaatagtgaaaatagctgatttcgggctcgcaaggatatatcaagctccgttgaaaccactatcggataacggagttgtggtcacaatctggtaccgagcaccagagctgcttcttggttcgaagcactacacgagcgctgttgatatgtgggcagttgggtgtatattcgcggagttactaactcttaaaccgttgtttcaaggagcagaagcgaaatcgtctcaaaaccctttccagttagatcaacttgacaagatattcaagatcttaggccacccgacgatggataaatggccaacactagttaaccttccacactggcaaaatgatgttcaacacattcaagctcacaaatacgacagtgtgggtctccacaacgtggttcacctgaatcagaaaagtcctgcgtatgatctgttatccaaaatgctggaatatgatcctctaaagcggatcacggcttcacaagcactagaacacgagtatttccgaatggatcctctcccaggacggaacgcatttgtagccagccaaccgatggagaagaatgtgaattacccaactcgtccagtagatacaaacaccgatttcgaaggcacgacaagcatcaatccgcctcaagcagtagcagcaggaaacgtagcagggaacatggcaggagctcatggaatgggcagtagatcgatgccaagaccaatggttgcacataacatgcagaggatgcagcaatctcaaggcatgatggcttataatttcccggcacaggcagggcttaacccgagtgttccgctgcagcagcagcgcgggatggctcaaccgcaccagcagcaacagctaagaagggaagatcccggaatgggtatgtcaggttacgcacctcctaacaaatccagacgcctctaaaggtaaaatcgagatcatcagtctcgggttagaatctgtgtgtttgccgcagaagaaagcgttgcgatttgctttatagagtagagttagattgtaatgcagcatgtggaatgttgctattcatatggatggattggattctctgtagtttttgtataaacatcctctcaagtatttgttaattatattagatcatcatttctcc

SEQ ID NO: 35380 - protein, 470 aa, Arabidopsis thaliana
  peptide (1)..(470): Ceres Seq. ID no. 13500175
MGDGSSSRSNSSNSTSEKPEWLQQYNLVGKIGEGTYGLVFLARTKTPPKRPIAIKKFKQSKDGDGVSPTAIREIMLLREISHENVVKLVNVHINFADMSLYLAFDYAEYDLYEIIRHHRDKVGHSLNTYTVKSLLWQLLNGLNYLHSNWIIHRDLKPSNILVMGDAEEHGIVKIADFGLARIYQAPLKPLSDNGVVVTIWYRAPELLLGSKHYTSAVDMWAVGCIFAELLTLKPLFQGAEAKSSQNPFQLDQLDKIFKILGHPTMDKWPTLVNLPHWQNDVQHIQAHKYDSVGLHNVVHLNQKSPAYDLLSKMLEYDPLKRITASQALEHEYFRMDPLPGRNAFVASQPMEKNVNYPTRPVDTNTDFEGTTSINPPQAVAAGNVAGNMAGAHGMGSRSMPRPMVAHNMQRMQQSQGMMAYNFPAQAGLNPSVPLQQQRGMAQPHQQQQLRREDPGMGMSGYAPPNKSRRL

SEQ ID NO: 35381 - protein, 396 aa, Arabidopsis thaliana
  peptide (1)..(396): Ceres Seq. ID no. 13500176
MLLREISHENVVKLVNVHINFADMSLYLAFDYAEYDLYEIIRHHRDKVGHSLNTYTVKSLLWQLLNGLNYLHSNWIIHRDLKPSNILVMGDAEEHGIVKIADFGLARIYQAPLKPLSDNGVVVTIWYRAPELLLGSKHYTSAVDMWAVGCIFAELLTLKPLFQGAEAKSSQNPFQLDQLDKIFKILGHPTMDKWPTLVNLPHWQNDVQHIQAHKYDSVGLHNVVHLNQKSPAYDLLSKMLEYDPLKRITASQALEHEYFRMDPLPGRNAFVASQPMEKNVNYPTRPVDTNTDFEGTTSINPPQAVAAGNVAGNMAGAHGMGSRSMPRPMVAHNMQRMQQSQGMMAYNFPAQAGLNPSVPLQQQRGMAQPHQQQQLRREDPGMGMSGYAPPNKSRRL

SEQ ID NO: 35382 - protein, 373 aa, Arabidopsis thaliana
  peptide (1)..(373): Ceres Seq. ID no. 13500177
MSLYLAFDYAEYDLYEIIRHHRDKVGHSLNTYTVKSLLWQLLNGLNYLHSNWIIHRDLKPSNILVMGDAEEHGIVKIADFGLARIYQAPLKPLSDNGVVVTIWYRAPELLLGSKHYTSAVDMWAVGCIFAELLTLKPLFQGAEAKSSQNPFQLDQLDKIFKILGHPTMDKWPTLVNLPHWQNDVQHIQAHKYDSVGLHNVVHLNQKSPAYDLLSKMLEYDPLKRITASQALEHEYFRMDPLPGRNAFVASQPMEKNVNYPTRPVDTNTDFEGTTSINPPQAVAAGNVAGNMAGAHGMGSRSMPRPMVAHNMQRMQQSQGMMAYNFPAQAGLNPSVPLQQQRGMAQPHQQQQLRREDPGMGMSGYAPPNKSRRL

SEQ ID NO: 35383 - DNA, 715 bp, Arabidopsis thaliana
  misc_feature (1)..(715): Ceres Seq. ID no. 12322680
  misc_feature (1)..(715): Ortholog of  Ceres SEQ ID NO 14305657 as cited in SEQ ID NO 52544
tcctcatccccttaaaaaaccctaagagtagagactctctcaatcccggcggcgaagatgaagtacaacccaagagtgacctcttctcgcagaaagaacaggaaggctcatttcacagcttcctccagcgagaggcgtgtgataatgagctctcctctctccaccgatcttcgtcagaagtacaatgtcagatccatgccgatccgtaaagacgacgaggttcagatcgttcgtggtacttacaagggacgtgaaggcaaagttgttcaggtttaccgtcgcaaatgggtgattcacatcgagagaatcacgagggagaaggtgaatggaacaaccgtgaacgttgggattcagccgtcgaaagttgtgataacgaagcttcgtcttgataaagataggaaatcgcttttggagaggaaggctaagggacgtgctgctgctgataaggagaagggtactaagtttacgtctgaggatgttatgcagaacgttgattaagtaagaaggaagaagaaatcttcttgaaaggttttatcttttagagttatcttcaatcgctttttaattttcaagttttggatattttggaatgttgtcagtggatctttatggtgctagacatgagaacttatgttttgattttgagtatttgaagtttggttatggaagtttatctctttgtctcattctttataatgatgtgtttgtttggttg

SEQ ID NO: 35384 - protein, 146 aa, Arabidopsis thaliana
  peptide (1)..(146): Ceres Seq. ID no. 12322681
MKYNPRVTSSRRKNRKAHFTASSSERRVIMSSPLSTDLRQKYNVRSMPIRKDDEVQIVRGTYKGREGKVVQVYRRKWVIHIERITREKVNGTTVNVGIQPSKVVITKLRLDKDRKSLLERKAKGRAAADKEKGTKFTSEDVMQNVD

SEQ ID NO: 35385 - protein, 117 aa, Arabidopsis thaliana
  peptide (1)..(117): Ceres Seq. ID no. 12322682
MSSPLSTDLRQKYNVRSMPIRKDDEVQIVRGTYKGREGKVVQVYRRKWVIHIERITREKVNGTTVNVGIQPSKVVITKLRLDKDRKSLLERKAKGRAAADKEKGTKFTSEDVMQNVD

SEQ ID NO: 35386 - protein, 100 aa, Arabidopsis thaliana
  peptide (1)..(100): Ceres Seq. ID no. 12322683
MPIRKDDEVQIVRGTYKGREGKVVQVYRRKWVIHIERITREKVNGTTVNVGIQPSKVVITKLRLDKDRKSLLERKAKGRAAADKEKGTKFTSEDVMQNVD

SEQ ID NO: 35387 - DNA, 757 bp, Arabidopsis thaliana
  misc_feature (1)..(757): Ceres Seq. ID no. 13496766
  misc_feature (1)..(757): Ortholog of  Ceres SEQ ID NO 13582188 as cited in SEQ ID NO 55950
  misc_feature (1)..(757): Ortholog of  Ceres SEQ ID NO 12611286 as cited in SEQ ID NO 56182
  misc_feature (1)..(757): Ortholog of  Ceres SEQ ID NO 15173288 as cited in SEQ ID NO 58150
  misc_feature (1)..(757): Ortholog of  Ceres SEQ ID NO 13663461 as cited in SEQ ID NO 66601
gttgaggatcatcgattatcagtttctggatttcgctactacagatttgtcccgtcttgagttacgaaatcatgatacattttgtgcttctagttagccggcaaggaaaggtaaggctcaccaaatggtattctccttatgcacagaaggaaagatctaaggttatacgtgaactcagtggagtgattctgaatcgaggtccaaagctctgcaattttgttgaatggagaggatacaaagttgtttacaaaagatatgcaagtctctacttctgcatgtgcattgatcaggaggataacgagttagaggtccttgagatcattcatcactatgttgagattctcgatcgctattttggaagtgtgtgtgaactcgatttgatttttaacttccacaaggcatattacatattggatgagctcttgattgctggggagcttcaagagtcaagcaagaaaacagtagccaggattatatccgctcaggatcaactggtggaggttgcaaaagaggaggccagttcgataagtaatataatcgctcaggctactaatcgataagtagtcttattcatcatctatgcattcttatgcagttaaagtatgttccctgtctctggctacagtaattgttttgagaaatctttatccatttgatttttcttgcggagggattttcgtcttaaagcgtaacttggagagaagaaatatgttatgatttggttcataaacaagtaaagattatatcgtttgtaatc

SEQ ID NO: 35388 - protein, 162 aa, Arabidopsis thaliana
  peptide (1)..(162): Ceres Seq. ID no. 13496767
MIHFVLLVSRQGKVRLTKWYSPYAQKERSKVIRELSGVILNRGPKLCNFVEWRGYKVVYKRYASLYFCMCIDQEDNELEVLEIIHHYVEILDRYFGSVCELDLIFNFHKAYYILDELLIAGELQESSKKTVARIISAQDQLVEVAKEEASSISNIIAQATNR

SEQ ID NO: 35389 - protein, 94 aa, Arabidopsis thaliana
  peptide (1)..(94): Ceres Seq. ID no. 13496768
MCIDQEDNELEVLEIIHHYVEILDRYFGSVCELDLIFNFHKAYYILDELLIAGELQESSKKTVARIISAQDQLVEVAKEEASSISNIIAQATNR

SEQ ID NO: 35390 - DNA, 977 bp, Arabidopsis thaliana
  misc_feature (1)..(977): Ceres Seq. ID no. 12372086
  misc_feature (1)..(977): Ortholog of  Ceres SEQ ID NO 14315076 as cited in SEQ ID NO 57157
accaacaatcacattcttctcccataagaaaaaaaaaataatcaaatcctcctcctctgcttcaccaccaaaaagcatattcttctctcgtcttctccggttaatcaaaatctctccgtgtgaatcgtttgtgaatggtggaaactaatccgatcggtggtaagtttacgctctccctttccatcaaaagggcgagcttttctcttcctctctcgacatcctctgttttcgctttcggatcttgcaaagaaggctggtactttcgctgccttggcctcgacccgtgaacgattcgcccctaaaattcacaacccggaaccctaatttcctaaaaagtggttctttttttattgattctgttacttgtgagatttgctctgttttttgttctctcgatttcgaagatgttgctctacaacaagcagaagaagaaccaaaacgctaaagggaataggattctcattagcgttacggttttgggtagtgccggtccgatccggtttgttgcttatgaggatgatcttgttgcctctgttatcgatactgctcttaaaggttacgctcgtgaaggtcgtcttcctcttcttggatctgatttcaatgattttcttctctattgtcctatggttggacctgaagctttaagcacatgggatgcaattggatctcttggagcgaggaactttatgctctgtaggaaaccagaggagaagaaggttgaggaaagtaatggaagatctgactctaccattaatggtgcaagaaaaggtggaagcttgaaggcttggatcaacaaatccttcaatctcaaagtctcaagccattaagattaattttcttctcttttttatgaaataataagaccaatctttgttttatcatcattatgttctttgtttttggttttgattccaaagtttgttattttcatctttcattcatgaataaaagtgtcaaattcttctggattttgcact

SEQ ID NO: 35391 - protein, 140 aa, Arabidopsis thaliana
  peptide (1)..(140): Ceres Seq. ID no. 12372087
MLLYNKQKKNQNAKGNRILISVTVLGSAGPIRFVAYEDDLVASVIDTALKGYAREGRLPLLGSDFNDFLLYCPMVGPEALSTWDAIGSLGARNFMLCRKPEEKKVEESNGRSDSTINGARKGGSLKAWINKSFNLKVSSH

SEQ ID NO: 35392 - DNA, 973 bp, Arabidopsis thaliana
  misc_feature (1)..(973): Ceres Seq. ID no. 12385644
  misc_feature (1)..(973): Ortholog of  Ceres SEQ ID NO 15226954 as cited in SEQ ID NO 53050
aacaacgaacgccgagagctctcacttcacactttatccacttggagcttcgacaatggcgtctccttcgcttctgcagtcttccgcttcttcgtttcacggacgtttctcaccattagcggctccatcctccgcacgaatgctctctccgccgctcagaaacgtggtgaaagtctcggcgtctggaactgtactggtcgagaaatctgaagccgagaaaactcaacgcctcaaaaccgcttacctcgagaggattatccctgcgctcaaagaagagttcaagtacgttaatattcaccaggttccaaaggtacagaagattgtagtgaattgtggtattggagatgcggcgcagaacgacaagggtttggaggctgcgatgaaggatatcgcgcttatcacagggcagaaacctattaagacacgagctagagcttccattgctactttcaagatcagggaagatcaacctcttgggattgctgtcactctcagaggagatgtaatgtactccttcttggatcgtcttatcaacttagcccttccgagaactcgagatttccaaggtgtgagtcccagtagctttgatgggaacggaaactacagtattggtgtgaaagaccaaggtgtattccctgaaatcaggtttgatgccgttggaaaaacgagaggaatggatgtatgcatcagcacaacggctaaaagcgatcaagaaggacagaaactattggctctaatgggaatgcctttcagggaaggaggtggtggcagcacaggcgcgatagtgcggaagaagaaactaaagtctcatcactttgatgctaaaggaaaaggaaagagatgatgaacatagctgcctattgtatgtatcgtcttctgtaaccaaccatttcatgtttcagaaaaaccatctccttttgtaatgctttatgagtcaatttgaaaataatatcagggatcttgttgttatggt

SEQ ID NO: 35393 - protein, 280 aa, Arabidopsis thaliana
  peptide (1)..(280): Ceres Seq. ID no. 12385645
TTNAESSHFTLYPLGASTMASPSLLQSSASSFHGRFSPLAAPSSARMLSPPLRNVVKVSASGTVLVEKSEAEKTQRLKTAYLERIIPALKEEFKYVNIHQVPKVQKIVVNCGIGDAAQNDKGLEAAMKDIALITGQKPIKTRARASIATFKIREDQPLGIAVTLRGDVMYSFLDRLINLALPRTRDFQGVSPSSFDGNGNYSIGVKDQGVFPEIRFDAVGKTRGMDVCISTTAKSDQEGQKLLALMGMPFREGGGGSTGAIVRKKKLKSHHFDAKGKGKR

SEQ ID NO: 35394 - protein, 262 aa, Arabidopsis thaliana
  peptide (1)..(262): Ceres Seq. ID no. 12385646
MASPSLLQSSASSFHGRFSPLAAPSSARMLSPPLRNVVKVSASGTVLVEKSEAEKTQRLKTAYLERIIPALKEEFKYVNIHQVPKVQKIVVNCGIGDAAQNDKGLEAAMKDIALITGQKPIKTRARASIATFKIREDQPLGIAVTLRGDVMYSFLDRLINLALPRTRDFQGVSPSSFDGNGNYSIGVKDQGVFPEIRFDAVGKTRGMDVCISTTAKSDQEGQKLLALMGMPFREGGGGSTGAIVRKKKLKSHHFDAKGKGKR

SEQ ID NO: 35395 - protein, 234 aa, Arabidopsis thaliana
  peptide (1)..(234): Ceres Seq. ID no. 12385647
MLSPPLRNVVKVSASGTVLVEKSEAEKTQRLKTAYLERIIPALKEEFKYVNIHQVPKVQKIVVNCGIGDAAQNDKGLEAAMKDIALITGQKPIKTRARASIATFKIREDQPLGIAVTLRGDVMYSFLDRLINLALPRTRDFQGVSPSSFDGNGNYSIGVKDQGVFPEIRFDAVGKTRGMDVCISTTAKSDQEGQKLLALMGMPFREGGGGSTGAIVRKKKLKSHHFDAKGKGKR

SEQ ID NO: 35396 - DNA, 1944 bp, Arabidopsis thaliana; identical to SEQ ID NO: 24461
  misc_feature (1)..(1944): Ceres Seq. ID no. 12336460
  misc_feature (1)..(1944): Ortholog of  Ceres SEQ ID NO 13660443 as cited in SEQ ID NO 67438

SEQ ID NO: 35397 - protein, 556 aa, Arabidopsis thaliana; identical to SEQ ID NO: 24462
  peptide (1)..(556): Ceres Seq. ID no. 12336461

SEQ ID NO: 35398 - protein, 284 aa, Arabidopsis thaliana; identical to SEQ ID NO: 24463
  peptide (1)..(284): Ceres Seq. ID no. 12336462

SEQ ID NO: 35399 - DNA, 2127 bp, Arabidopsis thaliana
  misc_feature (1)..(2127): Ceres Seq. ID no. 13576329
  misc_feature (1)..(2127): Ortholog of  Ceres SEQ ID NO 12625251 as cited in SEQ ID NO 62125
  misc_feature (1)..(2127): Ortholog of  Ceres SEQ ID NO 15179096 as cited in SEQ ID NO 0
attattaagacctttaaaaaaaaatgatgggaagcatattattgttactattattcttttctctggtccaatcacgttcagacacgtcatattcaaaaattcaacttcccggcgattctctgaccctctccgttaccgatttcggtgctaccggcgatggtatcaactacgatacttctgcgattcagtcaaccattgacgcctgcaatcgtcactacacatctttttcttccatctgccgcgtcgttttcccttccggcaactatttgaccgctaagctccatctccgatctggcgtcattctcgatgtgacggagaacgccgtgcttctcggtggaccgagaatcgaggattattatccggcggagacttcgtcggattggtacgtggtggtggcgaataacgctacggatgttggaatcactggcggaggagcgattgatggccaaggatcgaagttcgtggtcagattcgacgagaagaagaacgtgatggtgagctggaaccaaaccggagcttgcttgggtgatgagtgtagacccaggcttgttggattcgttgattctataaacgttgagatctggaacatcacactacgagagcctgcgtattggtgtttgcacattgtgagatgtgagaacacatcagtccatgatgtatcgatccttggggacttcaatactccaaataacgatggaatcgacattgaagattccaacaacactgttataactcggtgtcatatcgatactggagatgatgcaatctgtcccaagacttacactggtccactttacaacttaaccgctacagactgttggatccggaccaaatcctcagccattaaactcggtagtgcgagctggtttgatttcaaaggtcttgtctttgataacatcactatttttgaatctcacagaggacttggcatgcaaatacgcgatggaggaaatgtgagtgacgttacattttcaaacataaacattagtacaagatactacgatccttcttggtggggaagagcagaaccaatctatataacaacttgccctcgtgactcatctgcaaaggaaggctcaatctcgaatctcctattcgtaaacataacaatcgattccgaaaacggagtctttttatcaggttcaccaaacggactactctcagatataaagttcaagaacatgaaccttactttcagaagatggagtaattacagtgcagggcttgtggactatagacctggatgtcaaggtctagtgaaccatagagccacgtctggaatcattatggagcatgtgaacgggtttcgcgttgagaatgttgacctgaaatggtcagatgatgatgatgtgaatgctgcttggaatgttcctctcgaatttagaccttccactgtgaataatgtctcgtttgttggtttcacttctggtctttacacgaaattgtttgagtctgattacgttatgagtttatttacgtctaatcatcaatatatcactgagagtgaaatcggaatcacaaaaatggcgtcgacgaagccattgattgtcgcagcgaagacgctccgaaaccggatccacttccgatctggatccacatctactggtccaagccggtgggcgacaccgggtcacgaagaacgacccaaaggatatttcatgaaccggactccgccgcctccaggacagtcgcgcaagtgggaagattgggagcttccatgttacatcacaagcttcctcacgattgtaatcctcggagtgggtctcaatgccaaacctgatctttcaatcgagacctgggctcaccagaaagctcttgagcgcctcgagatggagaagcttgcatctgccggagattcatctggttaatcccaaaacttgggagatatgattcaatggttgatctggtatgtatgtgttttgtttgtttttccggggatttgaggagattttcccatttatgatgatgatcacgaatactagtgacctagggtttcgttttgttcctcctctcctcttcgttagtgtcgataaatatgttcatgaaataagcgatctttaactcttgacgatggttttatgtaactcaccttaatttttgatcatgtttcaaagctctcttgcctcc

SEQ ID NO: 35400 - protein, 614 aa, Arabidopsis thaliana
  peptide (1)..(614): Ceres Seq. ID no. 13576330
MMGSILLLLLFFSLVQSRSDTSYSKIQLPGDSLTLSVTDFGATGDGINYDTSAIQSTIDACNRHYTSFSSICRVVFPSGNYLTAKLHLRSGVILDVTENAVLLGGPRIEDYYPAETSSDWYVVVANNATDVGITGGGAIDGQGSKFVVRFDEKKNVMVSWNQTGACLGDECRPRLVGFVDSINVEIWNITLREPAYWCLHIVRCENTSVHDVSILGDFNTPNNDGIDIEDSNNTVITRCHIDTGDDAICPKTYTGPLYNLTATDCWIRTKSSAIKLGSASWFDFKGLVFDNITIFESHRGLGMQIRDGGNVSDVTFSNINISTRYYDPSWWGRAEPIYITTCPRDSSAKEGSISNLLFVNITIDSENGVFLSGSPNGLLSDIKFKNMNLTFRRWSNYSAGLVDYRPGCQGLVNHRATSGIIMEHVNGFRVENVDLKWSDDDDVNAAWNVPLEFRPSTVNNVSFVGFTSGLYTKLFESDYVMSLFTSNHQYITESEIGITKMASTKPLIVAAKTLRNRIHFRSGSTSTGPSRWATPGHEERPKGYFMNRTPPPPGQSRKWEDWELPCYITSFLTIVILGVGLNAKPDLSIETWAHQKALERLEMEKLASAGDSSG

SEQ ID NO: 35401 - protein, 613 aa, Arabidopsis thaliana
  peptide (1)..(613): Ceres Seq. ID no. 13576331
MGSILLLLLFFSLVQSRSDTSYSKIQLPGDSLTLSVTDFGATGDGINYDTSAIQSTIDACNRHYTSFSSICRVVFPSGNYLTAKLHLRSGVILDVTENAVLLGGPRIEDYYPAETSSDWYVVVANNATDVGITGGGAIDGQGSKFVVRFDEKKNVMVSWNQTGACLGDECRPRLVGFVDSINVEIWNITLREPAYWCLHIVRCENTSVHDVSILGDFNTPNNDGIDIEDSNNTVITRCHIDTGDDAICPKTYTGPLYNLTATDCWIRTKSSAIKLGSASWFDFKGLVFDNITIFESHRGLGMQIRDGGNVSDVTFSNINISTRYYDPSWWGRAEPIYITTCPRDSSAKEGSISNLLFVNITIDSENGVFLSGSPNGLLSDIKFKNMNLTFRRWSNYSAGLVDYRPGCQGLVNHRATSGIIMEHVNGFRVENVDLKWSDDDDVNAAWNVPLEFRPSTVNNVSFVGFTSGLYTKLFESDYVMSLFTSNHQYITESEIGITKMASTKPLIVAAKTLRNRIHFRSGSTSTGPSRWATPGHEERPKGYFMNRTPPPPGQSRKWEDWELPCYITSFLTIVILGVGLNAKPDLSIETWAHQKALERLEMEKLASAGDSSG

SEQ ID NO: 35402 - protein, 458 aa, Arabidopsis thaliana
  peptide (1)..(458): Ceres Seq. ID no. 13576332
MVSWNQTGACLGDECRPRLVGFVDSINVEIWNITLREPAYWCLHIVRCENTSVHDVSILGDFNTPNNDGIDIEDSNNTVITRCHIDTGDDAICPKTYTGPLYNLTATDCWIRTKSSAIKLGSASWFDFKGLVFDNITIFESHRGLGMQIRDGGNVSDVTFSNINISTRYYDPSWWGRAEPIYITTCPRDSSAKEGSISNLLFVNITIDSENGVFLSGSPNGLLSDIKFKNMNLTFRRWSNYSAGLVDYRPGCQGLVNHRATSGIIMEHVNGFRVENVDLKWSDDDDVNAAWNVPLEFRPSTVNNVSFVGFTSGLYTKLFESDYVMSLFTSNHQYITESEIGITKMASTKPLIVAAKTLRNRIHFRSGSTSTGPSRWATPGHEERPKGYFMNRTPPPPGQSRKWEDWELPCYITSFLTIVILGVGLNAKPDLSIETWAHQKALERLEMEKLASAGDSSG

SEQ ID NO: 35403 - DNA, 1752 bp, Arabidopsis thaliana
  misc_feature (1)..(1752): Ceres Seq. ID no. 12322647
  misc_feature (1)..(1752): Ortholog of  Ceres SEQ ID NO 13659033 as cited in SEQ ID NO 66372
  misc_feature (1)..(1752): Ortholog of  Ceres SEQ ID NO 13655724 as cited in SEQ ID NO 68973
  misc_feature (1)..(1752): Ortholog of  Ceres SEQ ID NO 12625899 as cited in SEQ ID NO 69079
  misc_feature (1)..(1752): Ortholog of  Ceres SEQ ID NO 15180366 as cited in SEQ ID NO 0
caacacatataatttgaccaaagtcactcgcatctcacggtgagatgagttcttcgtagctccaatggtggtggcttcacaatgtcgacttcttcttctttccctcgaaccatcgtctcctacactgtgacaacttcgctcttcatcgttatcttcctatgcagcgtcttcttcttgactagacgcactctcgaaccttctctctctccttaccacaccgccgacatccctctctccgccgtcgatctaccacctcctacgcctctcctccctcaaatcgaacctcacgatggtgacgtcaccgtggaaacgaatcaaaaggaggtagaagattcgcgccgcggaggcgatgacgtcgcggtagagactgagctgaaactgaaagatgtggaagattcgcacacggagaaaaccgaggaggaggaagaaggtagaggagaatcgcccggtgaagtttccgtagaatctgtggaacatgcggtgattgagaagatgagaggctgtgatttgtacaggggatcgtgggttaaggacgatgatgagtatccattgtatcagcctggatcgtgtccttatgtggacgatgcttttgattgccagaggaatgggaggcgtgattctgactatcttaattggagatggaagcctgacggttgtgatcttccacggtttaatgctacagacttcttggtgaagctacgaggtaaaagtttgatgttggttggagattcaatgaatcgtaaccagtttgaatcaatgctttgcgttctacgagaaggtttatcggataagagtagaatgtatgaggttcatggccataatataacaaaagggagaggctactttgtattcaagtttgaagattataattgcacagtagagtttgtgaggtctcattttcttgtgagggaaggagttagagcaaatgctcaaggaaatactaatccgaccctttccattgatcgcattgacaagtcacatgctaaatggaagcgagctgacattcttgtctttaacactggacattggtgggttcatggaaagaccgccagagggaaaaactactacaaagaaggtgactacatctacccgaaatttgatgctactgaagcatacagaaggtcgttgaagacttgggcaaaatggatcgatcagaatgtaaatcccaaaaagcagcttgtattttatcgcggatactcctctgcccattttcggggaggtgagtgggactcgggagggtcatgcaacggggaggtagaacctgtgaagaagggttcaatcatcgattcctatcctttgaaaatgaagatagtccaggaagccataaaggagatgcaagttcctgtgattcttctaaacgtgacaaagctgactaatttccgcaaagacggacatccatcaatctacggtaagaccaacacggatggtaagaaagtgtcgacaaggcgacaggattgcagccactggtgcctgccgggagttcccgatgtttggaaccatcttatctacgcatctttgctccttcaaccacattcttaaagttgagctcatacatcaacaaaattagatagaaagagaagagcagaaacaaatgaccagtccagtcttcactgttgtagtagtgatgtcaaattttgtgtaatttattgcccttggagctgataagtagttttttgttactttcatgtagaggtgtgaacaaacggaatcaggatgaaattttcagggttttttaatggcatacaatttttc

SEQ ID NO: 35404 - protein, 485 aa, Arabidopsis thaliana
  peptide (1)..(485): Ceres Seq. ID no. 12322648
MSTSSSFPRTIVSYTVTTSLFIVIFLCSVFFLTRRTLEPSLSPYHTADIPLSAVDLPPPTPLLPQIEPHDGDVTVETNQKEVEDSRRGGDDVAVETELKLKDVEDSHTEKTEEEEEGRGESPGEVSVESVEHAVIEKMRGCDLYRGSWVKDDDEYPLYQPGSCPYVDDAFDCQRNGRRDSDYLNWRWKPDGCDLPRFNATDFLVKLRGKSLMLVGDSMNRNQFESMLCVLREGLSDKSRMYEVHGHNITKGRGYFVFKFEDYNCTVEFVRSHFLVREGVRANAQGNTNPTLSIDRIDKSHAKWKRADILVFNTGHWWVHGKTARGKNYYKEGDYIYPKFDATEAYRRSLKTWAKWIDQNVNPKKQLVFYRGYSSAHFRGGEWDSGGSCNGEVEPVKKGSIIDSYPLKMKIVQEAIKEMQVPVILLNVTKLTNFRKDGHPSIYGKTNTDGKKVSTRRQDCSHWCLPGVPDVWNHLIYASLLLQPHS

SEQ ID NO: 35405 - protein, 348 aa, Arabidopsis thaliana
  peptide (1)..(348): Ceres Seq. ID no. 12322649
MRGCDLYRGSWVKDDDEYPLYQPGSCPYVDDAFDCQRNGRRDSDYLNWRWKPDGCDLPRFNATDFLVKLRGKSLMLVGDSMNRNQFESMLCVLREGLSDKSRMYEVHGHNITKGRGYFVFKFEDYNCTVEFVRSHFLVREGVRANAQGNTNPTLSIDRIDKSHAKWKRADILVFNTGHWWVHGKTARGKNYYKEGDYIYPKFDATEAYRRSLKTWAKWIDQNVNPKKQLVFYRGYSSAHFRGGEWDSGGSCNGEVEPVKKGSIIDSYPLKMKIVQEAIKEMQVPVILLNVTKLTNFRKDGHPSIYGKTNTDGKKVSTRRQDCSHWCLPGVPDVWNHLIYASLLLQPHS

SEQ ID NO: 35406 - protein, 274 aa, Arabidopsis thaliana
  peptide (1)..(274): Ceres Seq. ID no. 12322650
MLVGDSMNRNQFESMLCVLREGLSDKSRMYEVHGHNITKGRGYFVFKFEDYNCTVEFVRSHFLVREGVRANAQGNTNPTLSIDRIDKSHAKWKRADILVFNTGHWWVHGKTARGKNYYKEGDYIYPKFDATEAYRRSLKTWAKWIDQNVNPKKQLVFYRGYSSAHFRGGEWDSGGSCNGEVEPVKKGSIIDSYPLKMKIVQEAIKEMQVPVILLNVTKLTNFRKDGHPSIYGKTNTDGKKVSTRRQDCSHWCLPGVPDVWNHLIYASLLLQPHS

SEQ ID NO: 35407 - DNA, 1446 bp, Arabidopsis thaliana
  misc_feature (1)..(1446): Ceres Seq. ID no. 12324353
  misc_feature (1)..(1446): Ortholog of  Ceres SEQ ID NO 14303263 as cited in SEQ ID NO 1224
  misc_feature (1)..(1446): Ortholog of  Ceres SEQ ID NO 13593955 as cited in SEQ ID NO 54278
  misc_feature (1)..(1446): Ortholog of  Ceres SEQ ID NO 13597380 as cited in SEQ ID NO 64054
  misc_feature (1)..(1446): Ortholog of  Ceres SEQ ID NO 12625474 as cited in SEQ ID NO 64169
  misc_feature (1)..(1446): Ortholog of  Ceres SEQ ID NO 13597502 as cited in SEQ ID NO 64681
actttttttctttctttctgagtgaaaaacactttagtctcccactctttatattttgtagcttcacagcaaaaattctctttaacttatcagacagataagatcatatagcaaatatgttgcaagatagagtttcttgttctttgtctagttcgaaaatatctcgatgtgttttgtttctctcactcttttgtttcttcctcttgacgatgcatgcttcagcaaaccgcttacagcgagttccaaatccagggccttccccggcaccagagcctaagccatgtccgagtccagggccaaaccccgcaccagcgacaactaagaggacacataacactacgtttccggcgatcttcgcctttggggattcgatcttagacacaggaaataacgattatattttgaccttgatcaaagctaattttcttccatatggcatgaattttccagataaagttcccaccggcagattttgcaacggcaaaatcccttcggactttatcgcggattatataggagtaaaaccagttgtaccggcatatttgagaccgggactgacccaggaagatttgctcactggtgtatcctttgcttcgggtggttctggctatgatcctttgacaccaatcgtagtaagtgcgataccgatgtcaaaacaattgacatactttcaagaatacatagagaaagtgaaaggctttgtgggaaaagagaaagccgagcacataatatccaaaggcctagccattgtggtagcgggcagcgacgatctggccaatacctactatggtgaacacttagaggaattcttgtatgacatagatacatatacctcttttatggctagctctgctgcaagttttgctatgcaactatatgaatcaggagcaaaaaaaataggatttattggtgtttctccgatcgggtgtataccgatacagagaaccacaagaggaggacttaaaagaaaatgtgctgatgaactcaactttgcagctcagctttttaattccagactctccacaagtttgaacgaattggctaaaaccatgaaaaataccacattggtgtatattgacatctactcttctttcaatgatatgattcaaaaccccaaaaaatatggatttgatgagattgatagaggatgttgcgggacggggctactcgaattaggtccgctttgcaacaaatatacatcactgctttgcaagaatgtgtcttcttttatgttttgggactcttaccatccaacggaaagagcttataaaatcttaagccaaaagtttgtagagaatgacatgggccctttctatgacaattcaatgtaaaatttaagatgacacatttgagatgaaatttggctaaataaaagctgtatctcatttggattagtgtcttcaaaaacatgtttattgtattatacatataaattgacatggagcg

SEQ ID NO: 35408 - protein, 404 aa, Arabidopsis thaliana
  peptide (1)..(404): Ceres Seq. ID no. 12324354
MLQDRVSCSLSSSKISRCVLFLSLFCFFLLTMHASANRLQRVPNPGPSPAPEPKPCPSPGPNPAPATTKRTHNTTFPAIFAFGDSILDTGNNDYILTLIKANFLPYGMNFPDKVPTGRFCNGKIPSDFIADYIGVKPVVPAYLRPGLTQEDLLTGVSFASGGSGYDPLTPIVVSAIPMSKQLTYFQEYIEKVKGFVGKEKAEHIISKGLAIVVAGSDDLANTYYGEHLEEFLYDIDTYTSFMASSAASFAMQLYESGAKKIGFIGVSPIGCIPIQRTTRGGLKRKCADELNFAAQLFNSRLSTSLNELAKTMKNTTLVYIDIYSSFNDMIQNPKKYGFDEIDRGCCGTGLLELGPLCNKYTSLLCKNVSSFMFWDSYHPTERAYKILSQKFVENDMGPFYDNSM

SEQ ID NO: 35409 - protein, 373 aa, Arabidopsis thaliana
  peptide (1)..(373): Ceres Seq. ID no. 12324355
MHASANRLQRVPNPGPSPAPEPKPCPSPGPNPAPATTKRTHNTTFPAIFAFGDSILDTGNNDYILTLIKANFLPYGMNFPDKVPTGRFCNGKIPSDFIADYIGVKPVVPAYLRPGLTQEDLLTGVSFASGGSGYDPLTPIVVSAIPMSKQLTYFQEYIEKVKGFVGKEKAEHIISKGLAIVVAGSDDLANTYYGEHLEEFLYDIDTYTSFMASSAASFAMQLYESGAKKIGFIGVSPIGCIPIQRTTRGGLKRKCADELNFAAQLFNSRLSTSLNELAKTMKNTTLVYIDIYSSFNDMIQNPKKYGFDEIDRGCCGTGLLELGPLCNKYTSLLCKNVSSFMFWDSYHPTERAYKILSQKFVENDMGPFYDNSM

SEQ ID NO: 35410 - protein, 297 aa, Arabidopsis thaliana
  peptide (1)..(297): Ceres Seq. ID no. 12324356
MNFPDKVPTGRFCNGKIPSDFIADYIGVKPVVPAYLRPGLTQEDLLTGVSFASGGSGYDPLTPIVVSAIPMSKQLTYFQEYIEKVKGFVGKEKAEHIISKGLAIVVAGSDDLANTYYGEHLEEFLYDIDTYTSFMASSAASFAMQLYESGAKKIGFIGVSPIGCIPIQRTTRGGLKRKCADELNFAAQLFNSRLSTSLNELAKTMKNTTLVYIDIYSSFNDMIQNPKKYGFDEIDRGCCGTGLLELGPLCNKYTSLLCKNVSSFMFWDSYHPTERAYKILSQKFVENDMGPFYDNSM

SEQ ID NO: 35411 - DNA, 1191 bp, Arabidopsis thaliana
  misc_feature (1)..(1191): Ceres Seq. ID no. 13487174
  misc_feature (1)..(1191): Ortholog of  Ceres SEQ ID NO 15179139 as cited in SEQ ID NO 1093
  misc_feature (1)..(1191): Ortholog of  Ceres SEQ ID NO 15226793 as cited in SEQ ID NO 58689
aacatgcctcctcatcattcatcatcacgatcaaaaatgccatagtacataaagtatccattaaaacgtagatctagtctcttcacaacacttcaactaataacgcaaaaatcagtttctctttgagtaagtgtttattacaattaaactaactcaggcaagtctatgatcatggcttcttctgctgctgcatcgatctctatgataactctaaggaacctctctcgcaatcatcaatctcaccaaagcacttttctcggtttctctagatccttccataaccaaaggatctcatctaacagtccaggtctctccacacgagcaagatccaccacttcctccactggaggtttcttcagaaccatttgcagcagcagtagcaatgactactccagaccaactaagatccaagagcttaacgtctacgagttcaacgaaggtgatcgaaacagtccagcggttttaaaactagggaaaaaaccagatcagctttgtctcggagatcttgtccccttcacaaacaaactctacacaggagatctcacaaaacgcataggaatcaccgcaggtctctgcgttttgatccaacatgttccagagaagaaaggtgatcgctttgaagcttcttacagtttctacttcggagattatggtcacatatcagttcaaggaccttatctcacttacgaggacacgtttcttgctatcaccggtggctccggtgtgtttgaaggagcttatggacaggtcaagcttcgtcagcttgtgtatcctacgaagctgttttacactttctacttgaaaggtgttgctgctgatttacctgtggagcttaccggaaaacatgttgagccgtcgaaggaagtgaaaccggcggctgaagctcaggcgactcagcccggcgctacgatcgctaactttactaattgaaatctaaatctttgtgggtgtctttgtcatggatcttattgggctgttgttcattgtgtttacattttaataatgggcctaaataatgagcctttgtattgggccgttctcgtaagcgtaatgtgtcccgtccctataagctggatttaagcgcgtgaactccaccttccgatatttttttttgatagattatatcaaatccatggatactttctatatttggaaagtttggcttagtaggctcgtggccatgtttgagct

SEQ ID NO: 35412 - protein, 254 aa, Arabidopsis thaliana
  peptide (1)..(254): Ceres Seq. ID no. 13487175
MIMASSAAASISMITLRNLSRNHQSHQSTFLGFSRSFHNQRISSNSPGLSTRARSTTSSTGGFFRTICSSSSNDYSRPTKIQELNVYEFNEGDRNSPAVLKLGKKPDQLCLGDLVPFTNKLYTGDLTKRIGITAGLCVLIQHVPEKKGDRFEASYSFYFGDYGHISVQGPYLTYEDTFLAITGGSGVFEGAYGQVKLRQLVYPTKLFYTFYLKGVAADLPVELTGKHVEPSKEVKPAAEAQATQPGATIANFTN

SEQ ID NO: 35413 - protein, 252 aa, Arabidopsis thaliana
  peptide (1)..(252): Ceres Seq. ID no. 13487176
MASSAAASISMITLRNLSRNHQSHQSTFLGFSRSFHNQRISSNSPGLSTRARSTTSSTGGFFRTICSSSSNDYSRPTKIQELNVYEFNEGDRNSPAVLKLGKKPDQLCLGDLVPFTNKLYTGDLTKRIGITAGLCVLIQHVPEKKGDRFEASYSFYFGDYGHISVQGPYLTYEDTFLAITGGSGVFEGAYGQVKLRQLVYPTKLFYTFYLKGVAADLPVELTGKHVEPSKEVKPAAEAQATQPGATIANFTN

SEQ ID NO: 35414 - protein, 242 aa, Arabidopsis thaliana
  peptide (1)..(242): Ceres Seq. ID no. 13487177
MITLRNLSRNHQSHQSTFLGFSRSFHNQRISSNSPGLSTRARSTTSSTGGFFRTICSSSSNDYSRPTKIQELNVYEFNEGDRNSPAVLKLGKKPDQLCLGDLVPFTNKLYTGDLTKRIGITAGLCVLIQHVPEKKGDRFEASYSFYFGDYGHISVQGPYLTYEDTFLAITGGSGVFEGAYGQVKLRQLVYPTKLFYTFYLKGVAADLPVELTGKHVEPSKEVKPAAEAQATQPGATIANFTN

SEQ ID NO: 35415 - DNA, 1082 bp, Arabidopsis thaliana
  misc_feature (1)..(1082): Ceres Seq. ID no. 12396690
  misc_feature (1)..(1082): Ortholog of  Ceres SEQ ID NO 14308077 as cited in SEQ ID NO 58566
  misc_feature (1)..(1082): Ortholog of  Ceres SEQ ID NO 15226608 as cited in SEQ ID NO 64190
aagtttcaattcatcttcattccgggagaaaaagtctctagtcgcgatacttgagctactcagctttagggtttaacatgttaaggtctctgatttggaaacgatcacaggcatattcttcagtcgtcacgatgtcttcaatcagtcagagaggaaatgaaaggcttttgtctgaagtcgctggttcacattcaagagataataagatattggttttgggaggaaatggttatgtaggttcacacatatgtaaggaggcactgagacaaggtttctctgtatctagtcttagcaggtctggaagatcttctcttcacgattcgtgggtcgatgatgtaacctggcatcaaggtgatttgctttcacccgattctctgaagcctgcactagaaggaattacatctgtgatttcatgtgttggtggttttggttccaactcacaaatggtcagaattaacggtactgcaaacatcaatgctgttaaagctgcagcagaacaaggtgtgaagagatttgtgtatatatcagctgcggattttggtgtcataaataacttgattcgaggatatttcgaagggaagagagcaaccgaagctgagattttggataaatttggaaacagaggttcggttttaaggccaggattcatacatgggactcgtcaggtcggtagcataaagctgccacttagtctcattggagctcctctcgaaatggttttgaagctgttgccaaaagaggtgacgaaaattcctgtgatcgggccacttttaatacctccggtcaatgtcaaatccgttgcagcaacagcggtaaaagctgcagttgatcccgagtttgcttctggagtcatcgatgtgtaccggattcttcaacatggtcactgaaaacaacacctgtcttaacaaagttctcctcaatacggttttaaatgtcaaattcaaatgtaaccaataaccatcgtctctggtcttctgctaccaaataaactatgactttcgcatattacacaataggagaacaaataatgaaatctttttgaaactggaaccaataaccatcgtcattagagattcaacttc

SEQ ID NO: 35416 - protein, 269 aa, Arabidopsis thaliana
  peptide (1)..(269): Ceres Seq. ID no. 12396691
MLRSLIWKRSQAYSSVVTMSSISQRGNERLLSEVAGSHSRDNKILVLGGNGYVGSHICKEALRQGFSVSSLSRSGRSSLHDSWVDDVTWHQGDLLSPDSLKPALEGITSVISCVGGFGSNSQMVRINGTANINAVKAAAEQGVKRFVYISAADFGVINNLIRGYFEGKRATEAEILDKFGNRGSVLRPGFIHGTRQVGSIKLPLSLIGAPLEMVLKLLPKEVTKIPVIGPLLIPPVNVKSVAATAVKAAVDPEFASGVIDVYRILQHGH

SEQ ID NO: 35417 - protein, 251 aa, Arabidopsis thaliana
  peptide (1)..(251): Ceres Seq. ID no. 12396692
MSSISQRGNERLLSEVAGSHSRDNKILVLGGNGYVGSHICKEALRQGFSVSSLSRSGRSSLHDSWVDDVTWHQGDLLSPDSLKPALEGITSVISCVGGFGSNSQMVRINGTANINAVKAAAEQGVKRFVYISAADFGVINNLIRGYFEGKRATEAEILDKFGNRGSVLRPGFIHGTRQVGSIKLPLSLIGAPLEMVLKLLPKEVTKIPVIGPLLIPPVNVKSVAATAVKAAVDPEFASGVIDVYRILQHGH

SEQ ID NO: 35418 - protein, 147 aa, Arabidopsis thaliana
  peptide (1)..(147): Ceres Seq. ID no. 12396693
MVRINGTANINAVKAAAEQGVKRFVYISAADFGVINNLIRGYFEGKRATEAEILDKFGNRGSVLRPGFIHGTRQVGSIKLPLSLIGAPLEMVLKLLPKEVTKIPVIGPLLIPPVNVKSVAATAVKAAVDPEFASGVIDVYRILQHGH

SEQ ID NO: 35419 - DNA, 1199 bp, Arabidopsis thaliana
  misc_feature (1)..(1199): Ceres Seq. ID no. 12371573
  misc_feature (1)..(1199): Ortholog of  Ceres SEQ ID NO 14306297 as cited in SEQ ID NO 56907
aaaggaaaaagaaaaatacataattgatctcaaccgtccgatcatccatcttgccatcaccgttcaccaatcttcttcgtctcctctctctttctctctttttgctgtttctagctcctctctctctggatctcgccggcgaaccgtttctcttgggtgtaaacagtagcaatcaagctatagaatctcagatatcgctgaattagctgttggattttatccgccttttcttcgttatccggggctcgggtataaggtttcatcgtcttatttcatctgtaaatgggctgcttccactcaaaggcagcaaaagaatttcgaggacacgaagaccctgttaagcttgcctctgagacagcttctagtgtgagtgaggttgaagcattatttgagctattcaagagcataagcagttcggttgttgattatggtctgattaacaaggaggagtttcaacttgctttgttcaaaagccggaagagggagaatatatttgctaatagggtaaaatcttaattcttcaggcttttacaagattcgtcttctggaagagtgatctaaaccaagataatatgtccattatcctaaacaatattgcttttccgcagatatttgatatgtttgatgttaaacgaaaaggagtcatcgatttcggggactttgtaagatcactcaatgttttccaccccaatgcttctctagaagacaaaatagattttacgtttaggctttacgacatggactgcacgggttacattgaacgacaagaggtcaagcaaatgttgatcgcgcttctctgcgaatctgaaatgaaactggctgatgaaaccatagagataatactcgataagacatttgaagatgcagacgtgaatcaagatggaaaaattgataaattagagtggagtgatttcgtaaacaaaaatccatcattgcttaagatcatgactcttccatatctcagggatattacgacaacgtttccgagttttgtcttccattcggaggtcgatgagattgccacatgaagaaacaaactggtttaagaccgagtagattgccacgagttggaagaacaagtctgagctaatcggtgtaatcaacatctgtttgtaaacagtagtagagcatattctcttgaaattgtttgggttacttttttcttctcacaacagtttaaaattttgggtttttagctt

SEQ ID NO: 35420 - protein, 151 aa, Arabidopsis thaliana
  peptide (1)..(151): Ceres Seq. ID no. 12371574
MSIILNNIAFPQIFDMFDVKRKGVIDFGDFVRSLNVFHPNASLEDKIDFTFRLYDMDCTGYIERQEVKQMLIALLCESEMKLADETIEIILDKTFEDADVNQDGKIDKLEWSDFVNKNPSLLKIMTLPYLRDITTTFPSFVFHSEVDEIAT

SEQ ID NO: 35421 - protein, 136 aa, Arabidopsis thaliana
  peptide (1)..(136): Ceres Seq. ID no. 12371575
MFDVKRKGVIDFGDFVRSLNVFHPNASLEDKIDFTFRLYDMDCTGYIERQEVKQMLIALLCESEMKLADETIEIILDKTFEDADVNQDGKIDKLEWSDFVNKNPSLLKIMTLPYLRDITTTFPSFVFHSEVDEIAT

SEQ ID NO: 35422 - protein, 96 aa, Arabidopsis thaliana
  peptide (1)..(96): Ceres Seq. ID no. 12371576
MDCTGYIERQEVKQMLIALLCESEMKLADETIEIILDKTFEDADVNQDGKIDKLEWSDFVNKNPSLLKIMTLPYLRDITTTFPSFVFHSEVDEIAT

SEQ ID NO: 35423 - DNA, 946 bp, Arabidopsis thaliana
  misc_feature (1)..(946): Ceres Seq. ID no. 13592449
  misc_feature (1)..(946): Ortholog of  Ceres SEQ ID NO 14301707 as cited in SEQ ID NO 67211
aaaaagtgagtgcggtgtttaatgggtttgtcaccaactttccattttcttaccaacgaagaagaagcagaaaaaaagtaaacaaagactaaaaaaaaaaagccagcatcttcggagttggtgggagagagacagagatggagaggagaaagattgtgatgtgtggtgttttatttcttcttggtttattatcagctgttactgccttcgtcgctgaagctactcgaatcaagagatctcaggtcacggttaccgtttcggattcaatcacaaaatgcacttatccaagaagtccagctttcaatctcggcttcacttcagctctctttctgatgatggctcagataatagtcagtgtctcaagcggttgtttctgttgtagaaaaggtcctgctccttcaaggtctaattggattatctccttaatctgctttgttgtttcctggttcacttttgtaatagctttcctcgtgctgctttctggagctgcactcaacgatgaacacaccgaggaatcaatgaatgctggtacctacttttgctacatagtgaaaccaggcgttttctctaccggtgctgtgctttcgcttgttactattgcccttgggattgtctactatttatgtttgacttcaaataagcaaattgttgctgccacaacgacccaaggaacaggaatagcaatggggcagcctcagattccagagagagtagaagatcctgtttttgttcatgaggatacttacatgagaagacagttcacttaaaaacagacaaagcttgcttgtaaagcacgttaggtttagtagaagatttagacaaaatgattaacggatatgtgtttgattaagagtattgaaactttgtaatgattgttattcttgattgaagtagaaatctttgagaaccccaaaaacgtcacttagttttgtagtttttttctctg

SEQ ID NO: 35424 - protein, 209 aa, Arabidopsis thaliana
  peptide (1)..(209): Ceres Seq. ID no. 13592450
MERRKIVMCGVLFLLGLLSAVTAFVAEATRIKRSQVTVTVSDSITKCTYPRSPAFNLGFTSALFLMMAQIIVSVSSGCFCCRKGPAPSRSNWIISLICFVVSWFTFVIAFLVLLSGAALNDEHTEESMNAGTYFCYIVKPGVFSTGAVLSLVTIALGIVYYLCLTSNKQIVAATTTQGTGIAMGQPQIPERVEDPVFVHEDTYMRRQFT

SEQ ID NO: 35425 - protein, 202 aa, Arabidopsis thaliana
  peptide (1)..(202): Ceres Seq. ID no. 13592451
MCGVLFLLGLLSAVTAFVAEATRIKRSQVTVTVSDSITKCTYPRSPAFNLGFTSALFLMMAQIIVSVSSGCFCCRKGPAPSRSNWIISLICFVVSWFTFVIAFLVLLSGAALNDEHTEESMNAGTYFCYIVKPGVFSTGAVLSLVTIALGIVYYLCLTSNKQIVAATTTQGTGIAMGQPQIPERVEDPVFVHEDTYMRRQFT

SEQ ID NO: 35426 - protein, 144 aa, Arabidopsis thaliana
  peptide (1)..(144): Ceres Seq. ID no. 13592452
MMAQIIVSVSSGCFCCRKGPAPSRSNWIISLICFVVSWFTFVIAFLVLLSGAALNDEHTEESMNAGTYFCYIVKPGVFSTGAVLSLVTIALGIVYYLCLTSNKQIVAATTTQGTGIAMGQPQIPERVEDPVFVHEDTYMRRQFT

SEQ ID NO: 35427 - DNA, 1018 bp, Arabidopsis thaliana
  misc_feature (1)..(1018): Ceres Seq. ID no. 13488235
  misc_feature (1)..(1018): Ortholog of  Ceres SEQ ID NO 12609518 as cited in SEQ ID NO 51887
  misc_feature (1)..(1018): Ortholog of  Ceres SEQ ID NO 13638980 as cited in SEQ ID NO 55975
  misc_feature (1)..(1018): Ortholog of  Ceres SEQ ID NO 13597466 as cited in SEQ ID NO 65077
  misc_feature (1)..(1018): Ortholog of  Ceres SEQ ID NO 13654590 as cited in SEQ ID NO 68615
aggagactcttgctttttcacaaaaaaaaaagaaagagatagagcagcaaccccagcagcatcgaagatcatcgatcggtttctctctttcattaatcagatctaattgatacccaaccttcttcatcggaggccgtatctcacgaggaaacatgggcggtagatttggagtcctcctagtcctcttcctcttgagctggtcttgtcatgctacaaacccgattcttctcgaaccattcgaatcagctcatgatgacaaccaagtctgtgaactatgtgacaagtatgtcacgctagtcattgattaccttcaagactacgacaaccagaatgaactcgttgaggcccttcatatcagctgctctcagattcctcctctcaaaaaacagtgtctttcaatggtagatcattacacccaacttttcttcacacaagtctctactatcaaatcagaccaaatctgcaaacggcttaacctctgtcaagctgtgacaccggcctttgcccctcaagtccatcaaggaaactgcgaggcttgccgcgagactgtctctgaggtcgtcaccaaactcaaggatcctgagactaagctgaagataattcggttacttctcaaggaatgcaagtcgcttaacaattaccaggacaagtgcaagaagatggtattcgagtacgggcctctgatgcttacggatttgcagaagtttctggagaagaaagacgtgtgcactatcctccacgtctgtccaggtccagccacccaccgtgactacgttcctgcggtggagtcattggcagattcgtaaattcggccaccttggtttcgtcgtcattcacactaataccatgccatgatcgtgatgctaatttaatttggtaacccggtggtcatgtaaatactgattgatatattaaaaacataactacacgattgatgattcttgtgtgatttgaaaagaacgctgtctaaaggcccattgtccatcgatgggcctttttgctaatttctacattgctc

SEQ ID NO: 35428 - protein, 217 aa, Arabidopsis thaliana
  peptide (1)..(217): Ceres Seq. ID no. 13488236
MGGRFGVLLVLFLLSWSCHATNPILLEPFESAHDDNQVCELCDKYVTLVIDYLQDYDNQNELVEALHISCSQIPPLKKQCLSMVDHYTQLFFTQVSTIKSDQICKRLNLCQAVTPAFAPQVHQGNCEACRETVSEVVTKLKDPETKLKIIRLLLKECKSLNNYQDKCKKMVFEYGPLMLTDLQKFLEKKDVCTILHVCPGPATHRDYVPAVESLADS

SEQ ID NO: 35429 - protein, 135 aa, Arabidopsis thaliana
  peptide (1)..(135): Ceres Seq. ID no. 13488237
MVDHYTQLFFTQVSTIKSDQICKRLNLCQAVTPAFAPQVHQGNCEACRETVSEVVTKLKDPETKLKIIRLLLKECKSLNNYQDKCKKMVFEYGPLMLTDLQKFLEKKDVCTILHVCPGPATHRDYVPAVESLADS

SEQ ID NO: 35430 - DNA, 617 bp, Arabidopsis thaliana
  misc_feature (1)..(617): Ceres Seq. ID no. 12562672
  misc_feature (1)..(617): Ortholog of  Ceres SEQ ID NO 13595067 as cited in SEQ ID NO 55857
  misc_feature (1)..(617): Ortholog of  Ceres SEQ ID NO 12635516 as cited in SEQ ID NO 0
  misc_feature (1)..(617): Ortholog of  Ceres SEQ ID NO 15179376 as cited in SEQ ID NO 0
aatatataactttaaaacattgaagctaacttctcacaagtcaccaccatttctctctagaaaaaatctgaaaaacaaaaccatctcaaagtttcttgagaagaaaaaaagggtcaagaaagatgcctaaagacaggaatatcggaatcgccatggatttctcagagagcagcaagaacgctctgaaatgggcgatcgagaacttagcagacaaaggagacacgatttacatcatccacactctaccactctctggcgatgaatctcgtaactccctctggttcaaatccggttctcctctcataccgttggcagagtttagggaaccggagattatggagaaatacggtgtcaaaaccgacatcgcatgtcttgatatgctcgacactggttcgaggcagaaagaggtgcatgtagtgaccaagttatactggggagatgcaagagagaagcttgttgatgctgttaaagatcttaaactcgattctattgtcatgggaagcagaggactcagtgctcttcaaaggataataatgggaagcgtgagcagctttgtgatccaacacgcgccttgccctgtcaccgttgtcaaggataacgaataaacgattctcact

SEQ ID NO: 35431 - protein, 160 aa, Arabidopsis thaliana
  peptide (1)..(160): Ceres Seq. ID no. 12562673
MPKDRNIGIAMDFSESSKNALKWAIENLADKGDTIYIIHTLPLSGDESRNSLWFKSGSPLIPLAEFREPEIMEKYGVKTDIACLDMLDTGSRQKEVHVVTKLYWGDAREKLVDAVKDLKLDSIVMGSRGLSALQRIIMGSVSSFVIQHAPCPVTVVKDNE

SEQ ID NO: 35432 - protein, 150 aa, Arabidopsis thaliana
  peptide (1)..(150): Ceres Seq. ID no. 12562674
MDFSESSKNALKWAIENLADKGDTIYIIHTLPLSGDESRNSLWFKSGSPLIPLAEFREPEIMEKYGVKTDIACLDMLDTGSRQKEVHVVTKLYWGDAREKLVDAVKDLKLDSIVMGSRGLSALQRIIMGSVSSFVIQHAPCPVTVVKDNE

SEQ ID NO: 35433 - protein, 89 aa, Arabidopsis thaliana; identical to SEQ ID NO: 34717
  peptide (1)..(89): Ceres Seq. ID no. 12562675

SEQ ID NO: 35434 - DNA, 572 bp, Arabidopsis thaliana
  misc_feature (1)..(572): Ceres Seq. ID no. 13490216
  misc_feature (1)..(572): Ortholog of  Ceres SEQ ID NO 12585656 as cited in SEQ ID NO 68874
aaaaaccctagatctgatactaaaatggcgacggcgttgaagaagaacagaaagaagagaggtcacgtcagcgccggacatggacgtatcggtaagcaccgtaagcatcccggaggtcgtggaaacgcaggaggtatgcatcaccacaggatcctcttcgacaagtaccatccaggttacttcgggaaagttggtatgaggtatttccacaagcttcgtaacaagttcttttgcccaatcgtgaacctggacaagctatggtcacttgttcctgaagacgtgaaggcgaaatcgagcaaggataatgttccgttgatcgatgtgacgcagcatggtttcttcaaggttttggggaaaggtcatttgcctgagaacaaacctttcgttgtgaaggctaagcttatctctaagactgctgagaagaagattaaggaagctggtggtgctgttgttctcactgcttagtttttttttttcaattcagtctctttttaatttatttcatgttattgaactcagctttgttggattttggaatcagagatcttttaatctatggtattggattatac

SEQ ID NO: 35435 - protein, 154 aa, Arabidopsis thaliana
  peptide (1)..(154): Ceres Seq. ID no. 13490217
KNPRSDTKMATALKKNRKKRGHVSAGHGRIGKHRKHPGGRGNAGGMHHHRILFDKYHPGYFGKVGMRYFHKLRNKFFCPIVNLDKLWSLVPEDVKAKSSKDNVPLIDVTQHGFFKVLGKGHLPENKPFVVKAKLISKTAEKKIKEAGGAVVLTA

SEQ ID NO: 35436 - protein, 146 aa, Arabidopsis thaliana
  peptide (1)..(146): Ceres Seq. ID no. 13490218
MATALKKNRKKRGHVSAGHGRIGKHRKHPGGRGNAGGMHHHRILFDKYHPGYFGKVGMRYFHKLRNKFFCPIVNLDKLWSLVPEDVKAKSSKDNVPLIDVTQHGFFKVLGKGHLPENKPFVVKAKLISKTAEKKIKEAGGAVVLTA

SEQ ID NO: 35437 - protein, 109 aa, Arabidopsis thaliana
  peptide (1)..(109): Ceres Seq. ID no. 13490219
MHHHRILFDKYHPGYFGKVGMRYFHKLRNKFFCPIVNLDKLWSLVPEDVKAKSSKDNVPLIDVTQHGFFKVLGKGHLPENKPFVVKAKLISKTAEKKIKEAGGAVVLTA

SEQ ID NO: 35438 - DNA, 742 bp, Arabidopsis thaliana
  misc_feature (1)..(742): Ceres Seq. ID no. 12370138
  misc_feature (1)..(742): Ortholog of  Ceres SEQ ID NO 15172885 as cited in SEQ ID NO 51883
  misc_feature (1)..(742): Ortholog of  Ceres SEQ ID NO 13594663 as cited in SEQ ID NO 51894
  misc_feature (1)..(742): Ortholog of  Ceres SEQ ID NO 15226128 as cited in SEQ ID NO 60215
  misc_feature (1)..(742): Ortholog of  Ceres SEQ ID NO 14302271 as cited in SEQ ID NO 68360
  misc_feature (1)..(742): Ortholog of  Ceres SEQ ID NO 12635134 as cited in SEQ ID NO 0
  misc_feature (1)..(742): Ortholog of  Ceres SEQ ID NO 13623037 as cited in SEQ ID NO 0
  misc_feature (1)..(742): Ortholog of  Ceres SEQ ID NO 15175141 as cited in SEQ ID NO 0
aattaagatctctctttactgttttcccacttttcctttgagaaaactcaaaacaaagtaaacaaacaaaccagaaaaaggaatggcactgagaatgtgggcttcctctacagcaaatgctctcaagctctcttcttctgcctccaaatctcatctcttgccagctttctccatctccagatgcttctcctcagtgttggaaggacttaagtatgcaaattcacatgagtgggtgaaacatgaaggctcagttgctacaattggtatcactgaccatgcgcaggaccatttaggagaagttgtgtttgtggagctgcctgaagcaaacagttcagtgagcaaagaaaaaagctttggagctgttgagagtgttaaggccacaagtgagattctatctccaatctctggtgaagtcattgaggttaacacaaagctcaccgagtcacctggtttgatcaactcaagcccttatgaagatggttggatgataaaggtgaaaccgagcagccccgcggagttggaagctctgatgggtccaaaggaatacaccaagttctgcgaagaagaagacgctgctcactagggtttcttcgccttttatctttcccaaatgttcgaaaaacagagcaaaacaagagaatccatgctttagtttcaatctttcatttctcaatgtttcttaccactctcaacttgtatcagtgtgatactaatttgattaaaagatcatccaatgagacac

SEQ ID NO: 35439 - protein, 166 aa, Arabidopsis thaliana
  peptide (1)..(166): Ceres Seq. ID no. 12370139
MALRMWASSTANALKLSSSASKSHLLPAFSISRCFSSVLEGLKYANSHEWVKHEGSVATIGITDHAQDHLGEVVFVELPEANSSVSKEKSFGAVESVKATSEILSPISGEVIEVNTKLTESPGLINSSPYEDGWMIKVKPSSPAELEALMGPKEYTKFCEEEDAAH

SEQ ID NO: 35440 - protein, 162 aa, Arabidopsis thaliana
  peptide (1)..(162): Ceres Seq. ID no. 12370140
MWASSTANALKLSSSASKSHLLPAFSISRCFSSVLEGLKYANSHEWVKHEGSVATIGITDHAQDHLGEVVFVELPEANSSVSKEKSFGAVESVKATSEILSPISGEVIEVNTKLTESPGLINSSPYEDGWMIKVKPSSPAELEALMGPKEYTKFCEEEDAAH

SEQ ID NO: 35441 - DNA, 826 bp, Arabidopsis thaliana
  misc_feature (1)..(826): Ceres Seq. ID no. 12332018
  misc_feature (1)..(826): Ortholog of  Ceres SEQ ID NO 15178302 as cited in SEQ ID NO 0
aattgtcttatctttcgacttttcttcttcttcttcttcttaagagatttttctccaagaaagttcgctccttttctctgttcttaacaaaaaagtctcggtttttttctctttgttttgggtactagcgtgatgtcttctgagaatgatttcgttgagttttcttctatgttcgagagaattatacaaggaagaggtgatggtctctctcgatttttgccggtgattgtagctttagccgccagaaagacgatgatgaccaaggatctaccgatcaaacaacgagacggggagatccgttgagtccaaggttcgtgatgatcggatcgcgatcgggactcgacgatttctttagcgacggtggaaaacaagggaggtcgccggcgttgaagtcagcggtggagaatatgccacgtgtcgtgatcggagaggataaggagaaaaatggtggttcttgcgcgatttgtttggatgagtggtctaaaggtgacgtggcggcggagatgccgtgtaaacataagtttcactcaaagtgtgtggaggagtggttagggaggcacgccacgtgtcctatgtgtaggtttgagatgcctgttgaagaagtggaagaagagaagaagatcgggatttggattggcttctccattaacgccggcgacagaagaaactaagaagacggaggaagaagaagttaaaagtgactcgaaccctcacgatgcaacatgggctaggtttaggtttaggcttaggtttgctagaagaatgttttgtatagcttcgttttcgtttactgaaatcaatttctaattcaataaaattggttgcc

SEQ ID NO: 35442 - protein, 117 aa, Arabidopsis thaliana
  peptide (1)..(117): Ceres Seq. ID no. 12332019
MIGSRSGLDDFFSDGGKQGRSPALKSAVENMPRVVIGEDKEKNGGSCAICLDEWSKGDVAAEMPCKHKFHSKCVEEWLGRHATCPMCRFEMPVEEVEEEKKIGIWIGFSINAGDRRN

SEQ ID NO: 35443 - protein, 87 aa, Arabidopsis thaliana
  peptide (1)..(87): Ceres Seq. ID no. 12332020
MPRVVIGEDKEKNGGSCAICLDEWSKGDVAAEMPCKHKFHSKCVEEWLGRHATCPMCRFEMPVEEVEEEKKIGIWIGFSINAGDRRN

SEQ ID NO: 35444 - DNA, 1456 bp, Arabidopsis thaliana
  misc_feature (1)..(1456): Ceres Seq. ID no. 13495658
  misc_feature (1)..(1456): Ortholog of  Ceres SEQ ID NO 15170804 as cited in SEQ ID NO 52653
  misc_feature (1)..(1456): Ortholog of  Ceres SEQ ID NO 15170203 as cited in SEQ ID NO 53291
  misc_feature (1)..(1456): Ortholog of  Ceres SEQ ID NO 14303083 as cited in SEQ ID NO 66573
tggaatcactttagttatcaatcgatagaaacgcctttcaattaccaaacatcgaaaccaccatgagggttatctcaaaactgttcgattccgacagaagacgaatacccaaatcgccgaagcatttggattccggcgaaagcgccacgtcatcttcctcactcagcgacgtaaccaccggctcaagcagccttcatagcagtctctctctccaaacgcttccttcagttccctctcttcagaaaatcccatccaccaccgtcaccgtctctcactccgttacctcctcgtttaaactccgtgaacggagtcttcctgtaacttgtctcgccgtcaatggtggttacctcttcgccgtgtctggacacgaagtaagtatctacgatcgcgacatgtgtgctcatctcgacacattcaacggccaagatcctttctcaggaaccgtgaagtccgtcggcttctccggtgagaaaatcttcacggcgcatcaagacggtaaaatcggagtttggaaacttacggcgaaaagcggttataaacagttaacgacgcttcctactttaaacgaccgtttacgacgtttcgctcttcctaaaaactacgttcaagtacgccgtcataagaaacgtctctggatcgaacatgctgacgccgttactgctctcgccgttagtgacggattcatttactctgtttcttgggataagactttgaagatatggagagcctccgatcttcgttgcaaagaatcaatcaaagctcacgatgacgccgttaatgccattgccgtttctactaacggcaccgtttacactggatccgcggatagacgtatccgggtttgggccaaaccgaccggtgagaaacgtcacacgttagttgcgactttagagaagcacaaatcggcggttaacgcattagcattaaacgacgacggatcggttttgttctccggttcgtgtgaccggtctattttggtttgggagagagaggatacttccaattacatggcggtgagaggtgcgttgaggggacatgataaagcaatacttagcttgttcaacgtctctgatttgctactcagtggatcagctgatcggacggtcaggatttggcgacgtggacccgattctagttatagttgtttggaggttctttccggtcataccaagccggttaagtcgttggcggcggttagagaaaaggagttagacgatgtcgtttcgatcattagtggaagtcttgacggagaggttaaatgttggaaggtgtccgtcaccaaaccggataattcattttacacgaatctcgttcaataaattagtggcattaatttgttcttttgtcggtgtgttttatttatttgttagtactttagtattgttcggcgaacaaacaatttggcgtttttcagaagtcatttacacaaaatgagtaagaaataattgagcattat

SEQ ID NO: 35445 - protein, 418 aa, Arabidopsis thaliana
  peptide (1)..(418): Ceres Seq. ID no. 13495659
MRVISKLFDSDRRRIPKSPKHLDSGESATSSSSLSDVTTGSSSLHSSLSLQTLPSVPSLQKIPSTTVTVSHSVTSSFKLRERSLPVTCLAVNGGYLFAVSGHEVSIYDRDMCAHLDTFNGQDPFSGTVKSVGFSGEKIFTAHQDGKIGVWKLTAKSGYKQLTTLPTLNDRLRRFALPKNYVQVRRHKKRLWIEHADAVTALAVSDGFIYSVSWDKTLKIWRASDLRCKESIKAHDDAVNAIAVSTNGTVYTGSADRRIRVWAKPTGEKRHTLVATLEKHKSAVNALALNDDGSVLFSGSCDRSILVWEREDTSNYMAVRGALRGHDKAILSLFNVSDLLLSGSADRTVRIWRRGPDSSYSCLEVLSGHTKPVKSLAAVREKELDDVVSIISGSLDGEVKCWKVSVTKPDNSFYTNLVQ

SEQ ID NO: 35446 - protein, 308 aa, Arabidopsis thaliana
  peptide (1)..(308): Ceres Seq. ID no. 13495660
MCAHLDTFNGQDPFSGTVKSVGFSGEKIFTAHQDGKIGVWKLTAKSGYKQLTTLPTLNDRLRRFALPKNYVQVRRHKKRLWIEHADAVTALAVSDGFIYSVSWDKTLKIWRASDLRCKESIKAHDDAVNAIAVSTNGTVYTGSADRRIRVWAKPTGEKRHTLVATLEKHKSAVNALALNDDGSVLFSGSCDRSILVWEREDTSNYMAVRGALRGHDKAILSLFNVSDLLLSGSADRTVRIWRRGPDSSYSCLEVLSGHTKPVKSLAAVREKELDDVVSIISGSLDGEVKCWKVSVTKPDNSFYTNLVQ

SEQ ID NO: 35447 - DNA, 1027 bp, Arabidopsis thaliana
  misc_feature (1)..(1027): Ceres Seq. ID no. 12421011
  misc_feature (1)..(1027): Ortholog of  Ceres SEQ ID NO 15170807 as cited in SEQ ID NO 52723
  misc_feature (1)..(1027): Ortholog of  Ceres SEQ ID NO 12611846 as cited in SEQ ID NO 59904
  misc_feature (1)..(1027): Ortholog of  Ceres SEQ ID NO 14303535 as cited in SEQ ID NO 68728
  misc_feature (1)..(1027): Ortholog of  Ceres SEQ ID NO 12635196 as cited in SEQ ID NO 0
  misc_feature (1)..(1027): Ortholog of  Ceres SEQ ID NO 15179463 as cited in SEQ ID NO 0
attcgtcttctccaattttctcgcgaagaaaactttcctactttgtttcaatccaaacgagtcaaaatgcttatcaagactgtttcttcatcttcttcttcagctctctcgctggtgaatttccatggcgtgaagaaggatgtgtctcctttgttaccttccatttcatcgaatcttcgagtttcttctggaaaatctggaaaattaactttctctgttcgcgcatctaaaagctcaaccaccgacgcgctaagcggcgttgtcttcgagccgtttaaggaagtaaaaaaggagctcgatctcgtccctaccagctctcatctctcactcgctcgacaaaagtactcagacgagtgcgaagccgccattaacgagcagatcaatgtggaatacaatgtctcgtatgtgtatcacgctatgtatgcttactttgatcgggataacatcgcgctcaaaggtcttgccaagttctttaaggaatcaagtctggaagaaagagagcatgctgagaagttaatggagtatcagaacaaacgtggtgggagggttaagttacagtccattgtaatgcctctttcagagtttgaacatgttgacaaaggagatgctctttatggcatggagcttgctctgtcactggagaaactagttaatgagaagctcttaaaccttcacagtgttgcttcgaggaacaatgatgtccacttggcagattttattgagagcgagtttctgacagagcaggtggaagcaatcaagttgatctcagaatatgtggctcaactgcgacgagttggcaaaggacacggaacatggcatttcaatcagatgcttctggaagggtaagcagcttcgagggactcttgtgtctactgtgtttctatatgaagctctcttagtgatatgtatggaactactttatgtttagttctttagcttttacgattttgtgaggtagtagacttctttttctgtaagagacaaaagacatgatcacataactttatattctggtataaggttcacc

SEQ ID NO: 35448 - protein, 281 aa, Arabidopsis thaliana
  peptide (1)..(281): Ceres Seq. ID no. 12421012
IRLLQFSREENFPTLFQSKRVKMLIKTVSSSSSSALSLVNFHGVKKDVSPLLPSISSNLRVSSGKSGKLTFSVRASKSSTTDALSGVVFEPFKEVKKELDLVPTSSHLSLARQKYSDECEAAINEQINVEYNVSYVYHAMYAYFDRDNIALKGLAKFFKESSLEEREHAEKLMEYQNKRGGRVKLQSIVMPLSEFEHVDKGDALYGMELALSLEKLVNEKLLNLHSVASRNNDVHLADFIESEFLTEQVEAIKLISEYVAQLRRVGKGHGTWHFNQMLLEG

SEQ ID NO: 35449 - protein, 259 aa, Arabidopsis thaliana
  peptide (1)..(259): Ceres Seq. ID no. 12421013
MLIKTVSSSSSSALSLVNFHGVKKDVSPLLPSISSNLRVSSGKSGKLTFSVRASKSSTTDALSGVVFEPFKEVKKELDLVPTSSHLSLARQKYSDECEAAINEQINVEYNVSYVYHAMYAYFDRDNIALKGLAKFFKESSLEEREHAEKLMEYQNKRGGRVKLQSIVMPLSEFEHVDKGDALYGMELALSLEKLVNEKLLNLHSVASRNNDVHLADFIESEFLTEQVEAIKLISEYVAQLRRVGKGHGTWHFNQMLLEG

SEQ ID NO: 35450 - protein, 142 aa, Arabidopsis thaliana
  peptide (1)..(142): Ceres Seq. ID no. 12421014
MYAYFDRDNIALKGLAKFFKESSLEEREHAEKLMEYQNKRGGRVKLQSIVMPLSEFEHVDKGDALYGMELALSLEKLVNEKLLNLHSVASRNNDVHLADFIESEFLTEQVEAIKLISEYVAQLRRVGKGHGTWHFNQMLLEG

SEQ ID NO: 35451 - DNA, 1524 bp, Arabidopsis thaliana
  misc_feature (1)..(1524): Ceres Seq. ID no. 15174461
  misc_feature (1)..(1524): Ortholog of  Ceres SEQ ID NO 14314264 as cited in SEQ ID NO 57374
cattgggattaaactaacttctcattctcattccaccttcttcttctttgttcttgtgtgctactaaaaatcaagaaagcacaaggagacaaataaacctatccatttcattaccaaacaagccgtacattctctagttatggcttcttcttcttcttcttcttcttcttcaactacttcaaccatcacatccaaatttattgggcttatgcttcttctctctcttcaactagacttattactcggatcagctattcatcttaaaaaccaaacttcattcagacccaacagggagattcagaagcttagaagagtggaagcatatctcagcaaaatcaacaaaccttccatcaaaacaatccacagcccagacggagatgtaatagaatgtgtaccgtctcatttacaacccgcatttgatcatcctcagctacaaggccagaaaccacttgactcaccttacaggccaagtaaaggaaatgaaacaacatatgaggaaagttttaatcagttatggagtatgtccggtgaaagttgtccaattgggtcaataccaattagaaaaacaacaaagaatgatgttttaagggcaaattcaccggacatactccataactgattaaaactttcctcaaatattgattcgaaaggagcacaggatttggcgcgagccatcaaggattatcctaaccgtcgtggagacgttggatggttggattttgattacaacttaccaggagattgtctttcattcttgtattacaggcagagcagagagaataagaatccatcggatcagagaacctcgatgcttctacaagcattgggggttgcagaatcagaaaaggctaagaacaggttgaacacagagctatacggggacaaggaagcagagaaggagaaggagaagaagaagaaggaagaggaagtcaaagctattcggattccagtggtgaggcttaagtttggagaagtagcagaagcgacctcggtggtagttttaccggtttgtaaagcagaggaaggggaaaagaagattcttgaagctccaatggagatcatagccggaggggattttaaggtggttgaggcggagaaaggatggaagagatgggtagtgcttccgtcgtggaacccagtggcagccattgggaaaggcggtgtggcggtttctttcagggatgatagaaaagtgctgccttgggatggaaaggaggagcctttactggtagtggccgatagggtgaggaatgttgtggaggctgatgacgggtattatctcgtggtggctgagaacggacttaagctagagaaaggatcagatttgaaggcgagagaggtgaaggagagtttagggatggttgttttggtggtgaggccgccaagagaagatgatgatgattggcagacaagtcatcagaactgggactgaattaatagaatcaatactcatatgctgtaactgattacggagtcatcatggtcatgtaaaatttttggataaaggtggtaactttttgttct

SEQ ID NO: 35452 - protein, 207 aa, Arabidopsis thaliana
  peptide (1)..(207): Ceres Seq. ID no. 15174462
MLLQALGVAESEKAKNRLNTELYGDKEAEKEKEKKKKEEEVKAIRIPVVRLKFGEVAEATSVVVLPVCKAEEGEKKILEAPMEIIAGGDFKVVEAEKGWKRWVVLPSWNPVAAIGKGGVAVSFRDDRKVLPWDGKEEPLLVVADRVRNVVEADDGYYLVVAENGLKLEKGSDLKAREVKESLGMVVLVVRPPREDDDDWQTSHQNWD

SEQ ID NO: 35453 - protein, 159 aa, Arabidopsis thaliana
  peptide (1)..(159): Ceres Seq. ID no. 15174463
MASSSSSSSSSTTSTITSKFIGLMLLLSLQLDLLLGSAIHLKNQTSFRPNREIQKLRRVEAYLSKINKPSIKTIHSPDGDVIECVPSHLQPAFDHPQLQGQKPLDSPYRPSKGNETTYEESFNQLWSMSGESCPIGSIPIRKTTKNDVLRANSPDILHN

SEQ ID NO: 35454 - protein, 136 aa, Arabidopsis thaliana
  peptide (1)..(136): Ceres Seq. ID no. 15174464
MLLLSLQLDLLLGSAIHLKNQTSFRPNREIQKLRRVEAYLSKINKPSIKTIHSPDGDVIECVPSHLQPAFDHPQLQGQKPLDSPYRPSKGNETTYEESFNQLWSMSGESCPIGSIPIRKTTKNDVLRANSPDILHN

SEQ ID NO: 35455 - DNA, 732 bp, Arabidopsis thaliana
  misc_feature (1)..(732): Ceres Seq. ID no. 13497746
  misc_feature (1)..(732): Ortholog of  Ceres SEQ ID NO 13599549 as cited in SEQ ID NO 505
aaaaggtaaactcggtaacgaaatcagaattcgtcgaagaagaaaaagaagatcaatgacgttgaagaagcttgacgcgaatccatcgaccttagaatcgattttacaggaactgaaatcagacgagacaaatcgtagcaagatcaatttcatactcttcctcgccgacaatgatcccaccaccggtcaaagctggtgtccagactgtgttagagctgaacctgtgatttacaagactctagaggaatttccagaggaggtgaatctaattcgtgcttacgccggagaccgaccgacgtggcggactccggcgcatccttggagagttgattctcggtttaagctaaccggagtaccaactcttgttcgttgggatggtgactctgttaaaggacgtcttgaagatcatcaagctcaccttcctcacttgattcttccccttcttgcaccatccacttgatttgatcgatatcgatttctcgggactatcgtgggattgaggatcaaatatcttatatatatttctagttgtgaattgttttccaataaatcctttacaatggtaaaggaaagtttgtttcttcgatgatctttacgatttcgtgctcaatgtagtgttatttctctaataaattacggtgatattagccgaattctagactctggactcgagatttcgacttatatttggttttgaagttatagttgtgataaaactacgagatttgattg

SEQ ID NO: 35456 - protein, 152 aa, Arabidopsis thaliana
  peptide (1)..(152): Ceres Seq. ID no. 15223017
KGKLGNEIRIRRRRKRRSMTLKKLDANPSTLESILQELKSDETNRSKINFILFLADNDPTTGQSWCPDCVRAEPVIYKTLEEFPEEVNLIRAYAGDRPTWRTPAHPWRVDSRFKLTGVPTLVRWDGDSVKGRLEDHQAHLPHLILPLLAPST

SEQ ID NO: 35457 - protein, 134 aa, Arabidopsis thaliana
  peptide (1)..(134): Ceres Seq. ID no. 15223018
MTLKKLDANPSTLESILQELKSDETNRSKINFILFLADNDPTTGQSWCPDCVRAEPVIYKTLEEFPEEVNLIRAYAGDRPTWRTPAHPWRVDSRFKLTGVPTLVRWDGDSVKGRLEDHQAHLPHLILPLLAPST

SEQ ID NO: 35458 - DNA, 1331 bp, Arabidopsis thaliana
  misc_feature (1)..(1331): Ceres Seq. ID no. 13487073
  misc_feature (1)..(1331): Ortholog of  Ceres SEQ ID NO 12599421 as cited in SEQ ID NO 65135
attacaacaaactctttgagacctaaagagagagagagcgatagtgagatttagatcaacagatttgaatcgatttctgaaaacatgcagtacaagaatctggggaaatcgggtttaaaagtgagcacgctctcgttcggagcgtgggttacgttcgggaaccagctcgatgtgaaagaagcgaaatcgattcttcagtgttgtcgtgatcatggagtcaatttcttcgataacgctgaggtttacgctaatggtcgcgctgaggagattatgggtcaagcgattcgtgaactgggttggcgtcgatccgatatcgtcatctctaccaagatcttctggggtggtcctggtcctaacgataagggtttatctaggaaacatatcgttgaaggcactaaagcttctctcaaacgacttgatatggattacgttgatgtgctctattgccacaggccggatgcttcaactcctatcgaagagactgtgagggcgatgaactacgtgattgataagggttgggccttctattggggaaccagtgaatggtcagctcaacaaattacggaggcatggggagctgctgaccggttggatttggttggtccaattgtcgaacagccagaatacaacatgttcgctaggcacaaagttgagacagagtttcttcctctgtacaccaaccatggtataggtctcactacctggagcccacttgcatctggtgtgctcactggtaaatacaacaagggagctattccctcagacagccgatttgcattggagaactacaaaaaccttgccaatagatcacttgtggatgacgtgctgaggaaagttagcggtctcaaacccattgcagatgagctaggtgtaaccttggctcagcttgcaatcgcatggtgtgcttcaaatcctaatgtgtcatctgttatcactggtgccacaagggagtcacagattcaagaaaatatgaaagctgttgatgtgatcccattgttgacccctattgttctggacaagattgagcaagtgatacagagcaaaccaaaacgtcctgaatcatataggtaaaaccaacatccaagatctctcttccctattcaatcgtttacaaaagagtgttgcaggaaaaagaaaacattagaagaagctctgtgatgtatgttgttggatgttgtctcgttttcgctttgtttgttctctttagcagcttatgcatttttaagactcagacagagagaaagagagactaatgtttttttttagtttttcttgtttcatcatttaaaaaacggtcttatttgttacttgttagtgcaacttaaagtttg

SEQ ID NO: 35459 - protein, 328 aa, Arabidopsis thaliana
  peptide (1)..(328): Ceres Seq. ID no. 13487074
MQYKNLGKSGLKVSTLSFGAWVTFGNQLDVKEAKSILQCCRDHGVNFFDNAEVYANGRAEEIMGQAIRELGWRRSDIVISTKIFWGGPGPNDKGLSRKHIVEGTKASLKRLDMDYVDVLYCHRPDASTPIEETVRAMNYVIDKGWAFYWGTSEWSAQQITEAWGAADRLDLVGPIVEQPEYNMFARHKVETEFLPLYTNHGIGLTTWSPLASGVLTGKYNKGAIPSDSRFALENYKNLANRSLVDDVLRKVSGLKPIADELGVTLAQLAIAWCASNPNVSSVITGATRESQIQENMKAVDVIPLLTPIVLDKIEQVIQSKPKRPESYR

SEQ ID NO: 35460 - protein, 266 aa, Arabidopsis thaliana
  peptide (1)..(266): Ceres Seq. ID no. 13487075
MGQAIRELGWRRSDIVISTKIFWGGPGPNDKGLSRKHIVEGTKASLKRLDMDYVDVLYCHRPDASTPIEETVRAMNYVIDKGWAFYWGTSEWSAQQITEAWGAADRLDLVGPIVEQPEYNMFARHKVETEFLPLYTNHGIGLTTWSPLASGVLTGKYNKGAIPSDSRFALENYKNLANRSLVDDVLRKVSGLKPIADELGVTLAQLAIAWCASNPNVSSVITGATRESQIQENMKAVDVIPLLTPIVLDKIEQVIQSKPKRPESYR

SEQ ID NO: 35461 - protein, 216 aa, Arabidopsis thaliana
  peptide (1)..(216): Ceres Seq. ID no. 13487076
MDYVDVLYCHRPDASTPIEETVRAMNYVIDKGWAFYWGTSEWSAQQITEAWGAADRLDLVGPIVEQPEYNMFARHKVETEFLPLYTNHGIGLTTWSPLASGVLTGKYNKGAIPSDSRFALENYKNLANRSLVDDVLRKVSGLKPIADELGVTLAQLAIAWCASNPNVSSVITGATRESQIQENMKAVDVIPLLTPIVLDKIEQVIQSKPKRPESYR

SEQ ID NO: 35462 - DNA, 692 bp, Arabidopsis thaliana
  misc_feature (1)..(692): Ceres Seq. ID no. 12322747
  misc_feature (1)..(692): Ortholog of  Ceres SEQ ID NO 14307370 as cited in SEQ ID NO 54127
  misc_feature (1)..(692): Ortholog of  Ceres SEQ ID NO 13596338 as cited in SEQ ID NO 68005
  misc_feature (1)..(692): Ortholog of  Ceres SEQ ID NO 14302128 as cited in SEQ ID NO 0
  misc_feature (1)..(692): Ortholog of  Ceres SEQ ID NO 15179357 as cited in SEQ ID NO 0
gatcacaaattcagaagaaaagaacagagaaaacagaggaagaggtgagatggaggaacttgtagggcttctgagaatccgagtgaagagagggatcaatcttgctcagcgagacactctaagcagcgacccttttgttgtcataaccatgggatcacagaagctgaagactcgtgttgtggaaaataactgcaaccctgagtggaacgaggaattaacccttgcgttaagacatcccgatgaacctgtgaatctgatagtgtatgataaagatacattcacatcgcacgacaagatgggagatgcaaagatagatattaaaccatttctggaggttcacaaaatgggtttgcaagaacttccagatggaacagagatcaagagagttgtgcccaacagagaaaactgtttggctgaagcgagcagtatcgtctccaataatggcaaaatcgttcagaacatgattcttctgttgaggaatgtcgaatgcggtgaggtcgagattcagcttgaatggattgatattccaggttctagagggctttgaacatatctctttctgtgtgtaataaaaaaaaaactcagttcgttttgggtttttagacaaaagtcacaataagtagaacagagtactactctgttttgtaattgaaatatttggttttagcacctaacctaaatcgttttggttt

SEQ ID NO: 35463 - protein, 181 aa, Arabidopsis thaliana
  peptide (1)..(181): Ceres Seq. ID no. 12322748
ITNSEEKNRENRGRGEMEELVGLLRIRVKRGINLAQRDTLSSDPFVVITMGSQKLKTRVVENNCNPEWNEELTLALRHPDEPVNLIVYDKDTFTSHDKMGDAKIDIKPFLEVHKMGLQELPDGTEIKRVVPNRENCLAEASSIVSNNGKIVQNMILLLRNVECGEVEIQLEWIDIPGSRGL

SEQ ID NO: 35464 - protein, 165 aa, Arabidopsis thaliana
  peptide (1)..(165): Ceres Seq. ID no. 12322749
MEELVGLLRIRVKRGINLAQRDTLSSDPFVVITMGSQKLKTRVVENNCNPEWNEELTLALRHPDEPVNLIVYDKDTFTSHDKMGDAKIDIKPFLEVHKMGLQELPDGTEIKRVVPNRENCLAEASSIVSNNGKIVQNMILLLRNVECGEVEIQLEWIDIPGSRGL

SEQ ID NO: 35465 - protein, 132 aa, Arabidopsis thaliana
  peptide (1)..(132): Ceres Seq. ID no. 12322750
MGSQKLKTRVVENNCNPEWNEELTLALRHPDEPVNLIVYDKDTFTSHDKMGDAKIDIKPFLEVHKMGLQELPDGTEIKRVVPNRENCLAEASSIVSNNGKIVQNMILLLRNVECGEVEIQLEWIDIPGSRGL

SEQ ID NO: 35466 - DNA, 1065 bp, Arabidopsis thaliana
  misc_feature (1)..(1065): Ceres Seq. ID no. 12371318
  misc_feature (1)..(1065): Ortholog of  Ceres SEQ ID NO 13598479 as cited in SEQ ID NO 60680
attttttccaaaaaaataaaaaacagaaaaaattcgtggaaacgccattaacgagatctagcacaaactcgtagtgtggtgtagaagaagacaaaagcaaggagcttcataataaaaccctagagatatttgtttctccaatttcaaaagacgagacgtgaagaagacgatcgaagatgaacattttcagattagctggtgatatgactcacctagccagtgttcttgtcttgcttctcaagatccacaccatcaaatcctgcgctggtgtttcattgaagactcaagaactctatgccattgtctttgcgacgcgttatttggatattttcacgagttttgtgtctctgtacaacacctctatgaagttggtgtttttaggaagttctttttcgattgtgtggtacatgaagtatcataaggccgtccacaggacttacgacagagagcaagatacgtttcgtcattggttccttgtgcttccttgctttctcttagctcttttgatacatgaaaagtttacctttcttgaggtattgtggacgtcttcattgtacttggaggctgttgccatattacctcagcttgtcttgttgcaaaggactagaaatattgacaacttgaccggacaatatatatttctccttggggggtaccgtggattatacatcctcaactggatctaccgttacttcactgagccgcactttgttcactggataacatggatcgccgggtttgttcaaacactgctctatgccgacttcttctattattatttcctaagctggaagaacaacaaaaagctccaattaccagcttaatttctaaagtttcaatgctcgggaaccctacggattcgatttggtgcccgacaaaacatctaccggaatgttaccaatttactctgttggtggttattagaggagaacgagcatagatgtgtaaactccagcaatctaacttattacactttctttagactttctcgtctctcatcttttttttggtcgacttagtgttactaaatatttcgacgcgacagtaatatattcaccacaattc

SEQ ID NO: 35467 - protein, 215 aa, Arabidopsis thaliana
  peptide (1)..(215): Ceres Seq. ID no. 12371319
MNIFRLAGDMTHLASVLVLLLKIHTIKSCAGVSLKTQELYAIVFATRYLDIFTSFVSLYNTSMKLVFLGSSFSIVWYMKYHKAVHRTYDREQDTFRHWFLVLPCFLLALLIHEKFTFLEVLWTSSLYLEAVAILPQLVLLQRTRNIDNLTGQYIFLLGGYRGLYILNWIYRYFTEPHFVHWITWIAGFVQTLLYADFFYYYFLSWKNNKKLQLPA

SEQ ID NO: 35468 - protein, 206 aa, Arabidopsis thaliana
  peptide (1)..(206): Ceres Seq. ID no. 12371320
MTHLASVLVLLLKIHTIKSCAGVSLKTQELYAIVFATRYLDIFTSFVSLYNTSMKLVFLGSSFSIVWYMKYHKAVHRTYDREQDTFRHWFLVLPCFLLALLIHEKFTFLEVLWTSSLYLEAVAILPQLVLLQRTRNIDNLTGQYIFLLGGYRGLYILNWIYRYFTEPHFVHWITWIAGFVQTLLYADFFYYYFLSWKNNKKLQLPA

SEQ ID NO: 35469 - protein, 153 aa, Arabidopsis thaliana
  peptide (1)..(153): Ceres Seq. ID no. 12371321
MKLVFLGSSFSIVWYMKYHKAVHRTYDREQDTFRHWFLVLPCFLLALLIHEKFTFLEVLWTSSLYLEAVAILPQLVLLQRTRNIDNLTGQYIFLLGGYRGLYILNWIYRYFTEPHFVHWITWIAGFVQTLLYADFFYYYFLSWKNNKKLQLPA

SEQ ID NO: 35470 - DNA, 1229 bp, Arabidopsis thaliana
  misc_feature (1)..(1229): Ceres Seq. ID no. 12385455
  misc_feature (1)..(1229): Ortholog of  Ceres SEQ ID NO 15176333 as cited in SEQ ID NO 52787
  misc_feature (1)..(1229): Ortholog of  Ceres SEQ ID NO 15170403 as cited in SEQ ID NO 53457
  misc_feature (1)..(1229): Ortholog of  Ceres SEQ ID NO 14303479 as cited in SEQ ID NO 54254
  misc_feature (1)..(1229): Ortholog of  Ceres SEQ ID NO 14312047 as cited in SEQ ID NO 55656
  misc_feature (1)..(1229): Ortholog of  Ceres SEQ ID NO 13660872 as cited in SEQ ID NO 60830
  misc_feature (1)..(1229): Ortholog of  Ceres SEQ ID NO 12616221 as cited in SEQ ID NO 63291
  misc_feature (1)..(1229): Ortholog of  Ceres SEQ ID NO 14302355 as cited in SEQ ID NO 65830
gattacaatcttgagcagacgaagaaaacccaaaaaaaatccagatccagctgaaattgaattttcaaccaacgaagaagagatttttccaagagcaacagacaagaagaagagaatgaagtcggagctaaatttaccagctgggttccgattccatccaacggacgaggagcttgtgaaattctacttgtgccggaaatgtgcttccgagcagatctcggctccggttatcgccgagattgatctctacaagttcaatccttgggagcttccagagatgtctctgtacggagagaaagagtggtacttcttctcacctagagatcggaaatacccaaacggttcgcgtcctaaccgggcagcaggaaccggttattggaaagctaccggagcagataaaccgattggtaaaccgaagacgttgggtatcaagaaagcactcgtcttctacgcagggaaagctccaaaagggattaagaccaattggataatgcatgagtatcgtctcgctaatgttgatagatcagcttctgttaacaaaaagaacaacctacgacttgatgattgggttttatgtcgaatatacaacaagaaaggaaccatggagaagtatttccccgcggatgagaagccgaggaccacgacaatggctgaacagtcatcatcaccttttgatacatcagactcgacttacccgacattgcaagaggatgattccagcagctcaggtggtcacggtcacgtggtgtcaccggatgttttggaggttcagagcgagcctaaatggggagagcttgaggatgctttggaagcttttgatacttcaatgtttggtagttccatggagttgttgcagcctgacgcttttgtccctcagttcttgtatcagtctgattatttcacttccttccaggatccgcctgagcagaaaccattcttgaattggagttttgctccacaggggtaaaaacggaagagaccaaaaaaggtgtttgctagtagtactgtgatgtgccagagagaagagtctcatctcaactcatccctggctcttagtagtaaaagaagattgtagaatgttaatagcttttagcatcaatgtctcattagcaggcacattcttgttctttcatgagaagtttatatgaaaactaaaaatttatattcaaattcttcaagatgttgcacttatgtagatactgatattaaataacaacctaacctttatg

SEQ ID NO: 35471 - protein, 321 aa, Arabidopsis thaliana
  peptide (1)..(321): Ceres Seq. ID no. 12385456
ITILSRRRKPKKNPDPAEIEFSTNEEEIFPRATDKKKRMKSELNLPAGFRFHPTDEELVKFYLCRKCASEQISAPVIAEIDLYKFNPWELPEMSLYGEKEWYFFSPRDRKYPNGSRPNRAAGTGYWKATGADKPIGKPKTLGIKKALVFYAGKAPKGIKTNWIMHEYRLANVDRSASVNKKNNLRLDDWVLCRIYNKKGTMEKYFPADEKPRTTTMAEQSSSPFDTSDSTYPTLQEDDSSSSGGHGHVVSPDVLEVQSEPKWGELEDALEAFDTSMFGSSMELLQPDAFVPQFLYQSDYFTSFQDPPEQKPFLNWSFAPQG

SEQ ID NO: 35472 - protein, 283 aa, Arabidopsis thaliana
  peptide (1)..(283): Ceres Seq. ID no. 12385457
MKSELNLPAGFRFHPTDEELVKFYLCRKCASEQISAPVIAEIDLYKFNPWELPEMSLYGEKEWYFFSPRDRKYPNGSRPNRAAGTGYWKATGADKPIGKPKTLGIKKALVFYAGKAPKGIKTNWIMHEYRLANVDRSASVNKKNNLRLDDWVLCRIYNKKGTMEKYFPADEKPRTTTMAEQSSSPFDTSDSTYPTLQEDDSSSSGGHGHVVSPDVLEVQSEPKWGELEDALEAFDTSMFGSSMELLQPDAFVPQFLYQSDYFTSFQDPPEQKPFLNWSFAPQG

SEQ ID NO: 35473 - protein, 229 aa, Arabidopsis thaliana
  peptide (1)..(229): Ceres Seq. ID no. 12385458
MSLYGEKEWYFFSPRDRKYPNGSRPNRAAGTGYWKATGADKPIGKPKTLGIKKALVFYAGKAPKGIKTNWIMHEYRLANVDRSASVNKKNNLRLDDWVLCRIYNKKGTMEKYFPADEKPRTTTMAEQSSSPFDTSDSTYPTLQEDDSSSSGGHGHVVSPDVLEVQSEPKWGELEDALEAFDTSMFGSSMELLQPDAFVPQFLYQSDYFTSFQDPPEQKPFLNWSFAPQG

SEQ ID NO: 35474 - DNA, 1287 bp, Arabidopsis thaliana
  misc_feature (1)..(1287): Ceres Seq. ID no. 13494261
  misc_feature (1)..(1287): Ortholog of  Ceres SEQ ID NO 15175496 as cited in SEQ ID NO 56127
  misc_feature (1)..(1287): Ortholog of  Ceres SEQ ID NO 13598714 as cited in SEQ ID NO 62656
  misc_feature (1)..(1287): Ortholog of  Ceres SEQ ID NO 13596969 as cited in SEQ ID NO 63375
  misc_feature (1)..(1287): Ortholog of  Ceres SEQ ID NO 13597519 as cited in SEQ ID NO 64759
  misc_feature (1)..(1287): Ortholog of  Ceres SEQ ID NO 13597870 as cited in SEQ ID NO 64982
  misc_feature (1)..(1287): Ortholog of  Ceres SEQ ID NO 13656123 as cited in SEQ ID NO 65212
aactataacttaaacacacacttcatcttctctaaaaccctaaaatttaaacacaagatgggtttggttagatcattgtgcttattaataaccttccttaattgtctcatcatctcggttcatggccaagccaccgcaaggcctggtcctgtttccggcactaggattgggttttacttaactacgtgtcctagagctgagactattgtccgaaacgccgtgaatgctggtttcagttctgaccccagaatcgcacccggaatactgagaatgcatttccacgactgttttgtccaaggttgtgacggttcgatccttatatccggagctaacaccgagagaaccgccggtccgaacctcaatctccaaggatttgaagtcatagacaacgccaaaacgcagctcgaagccgcgtgtcctggagttgtctcttgtgctgatattttagcattagccgctcgtgacacagtcattctcactcaaggaacaggctggcaagtaccaacgggacgtagagatggtagagtttctttggcttcgaatgctaacaatctccctggtccccgtgactccgttgccgttcaacaacagaaattctccgccttgggactcaatactcgtgatctcgtcgtcctcgtcggaggacacacgatcggaacagcaggatgtggtgtattcaggaacaggctattcaataccaccggacaaaccgcagatccaaccatcgacccaacatttttggcgcagcttcaaacacaatgtccccaaaacggcgacggttcagtgcgcgtggatctcgacaccggaagcggaagcacttgggacacttcttactacaacaacctaagccgtgggcgtggagttctccaatccgatcaagtcctttggaccgatccagccactagacccatagtgcaacaattgatggctcctagaagcaccttcaacgttgagtttgcgaggtcaatggtcagaatgagtaatatcggtgtggttaccggagctaatggggaaatccgtagggtttgctctgcggttaattaattaaccgattagaatctgtcgtgataaactttcatgacgcaaagtacttgtttcgagtgtggttttaatctgaacaataaataaaccaatagaaaacgacatacaaagaaaaaacccaaaagtgggttgatgaaaattgtatctataaggtgttggtattcgatttcttttggttttagttaaaaaaaactgtaatgtcttcacaaaaatattataatgagtttggtcctagtttggattcct

SEQ ID NO: 35475 - protein, 347 aa, Arabidopsis thaliana
  peptide (1)..(347): Ceres Seq. ID no. 13494262
NYNLNTHFIFSKTLKFKHKMGLVRSLCLLITFLNCLIISVHGQATARPGPVSGTRIGFYLTTCPRAETIVRNAVNAGFSSDPRIAPGILRMHFHDCFVQGCDGSILISGANTERTAGPNLNLQGFEVIDNAKTQLEAACPGVVSCADILALAARDTVILTQGTGWQVPTGRRDGRVSLASNANNLPGPRDSVAVQQQKFSALGLNTRDLVVLVGGHTIGTAGCGVFRNRLFNTTGQTADPTIDPTFLAQLQTQCPQNGDGSVRVDLDTGSGSTWDTSYYNNLSRGRGVLQSDQVLWTDPATRPIVQQLMAPRSTFNVEFARSMVRMSNIGVVTGANGEIRRVCSAVN

SEQ ID NO: 35476 - protein, 328 aa, Arabidopsis thaliana
  peptide (1)..(328): Ceres Seq. ID no. 13494263
MGLVRSLCLLITFLNCLIISVHGQATARPGPVSGTRIGFYLTTCPRAETIVRNAVNAGFSSDPRIAPGILRMHFHDCFVQGCDGSILISGANTERTAGPNLNLQGFEVIDNAKTQLEAACPGVVSCADILALAARDTVILTQGTGWQVPTGRRDGRVSLASNANNLPGPRDSVAVQQQKFSALGLNTRDLVVLVGGHTIGTAGCGVFRNRLFNTTGQTADPTIDPTFLAQLQTQCPQNGDGSVRVDLDTGSGSTWDTSYYNNLSRGRGVLQSDQVLWTDPATRPIVQQLMAPRSTFNVEFARSMVRMSNIGVVTGANGEIRRVCSAVN

SEQ ID NO: 35477 - protein, 257 aa, Arabidopsis thaliana
  peptide (1)..(257): Ceres Seq. ID no. 13494264
MHFHDCFVQGCDGSILISGANTERTAGPNLNLQGFEVIDNAKTQLEAACPGVVSCADILALAARDTVILTQGTGWQVPTGRRDGRVSLASNANNLPGPRDSVAVQQQKFSALGLNTRDLVVLVGGHTIGTAGCGVFRNRLFNTTGQTADPTIDPTFLAQLQTQCPQNGDGSVRVDLDTGSGSTWDTSYYNNLSRGRGVLQSDQVLWTDPATRPIVQQLMAPRSTFNVEFARSMVRMSNIGVVTGANGEIRRVCSAVN

SEQ ID NO: 35478 - DNA, 952 bp, Arabidopsis thaliana
  misc_feature (1)..(952): Ceres Seq. ID no. 13497003
  misc_feature (1)..(952): Ortholog of  Ceres SEQ ID NO 15169682 as cited in SEQ ID NO 54434
atggataaccctcaagaagaagctgctgaagaagaaacctcatccttcgaacgttaagaggaagaagaataagagaaatcgattcgtggttttgggaaaattcaatggcggtttctactgtatcgtcgtttctattgccatctttcggcattccaagctcttcgccttcttctaccagactcaaagtctctctgctgccttcatcttctacccatggcggccttagttcctgcgtccttacgaaaccatccgtctcgcttacgaaggtcttcgctgttcccgataccctagatccaactccagaaattctcgatgaacccgcctctgaggttccgagctcttcatccatcagtgtagacgcggataagatggcgccaaagcaaaagattaggatcaagcttagatcatactgggtgcctcttattgaggactcatgcaagcagatacttgatgctgcgagaaacaccaatgcaaagacgatgggtcctgttccattgccaaccaagaagcgtatctactgtgttctcaagtctcctcacgttcacaaggatgctaggttccattttgaaatccggacacaccagcgcatgattgatattctctacccgactgctcaaactatcgattctttgatgcaacttgatcttcctgctggtgtcgatgtggaagtgaagctctgaagaagaagcgtaactacaatgatgtgatgggcacttttgcattgaatgaacagactgtttcagatcaactacattgcttagaactggtaagccttgtatcatcttttttgagaacctttgtaacgaaaatgtaagttgtattatctggtccttggaatctatctttagcgatgcttggttcttagttgatgaacatatccttaattaagcaagttcaaaggaatttgtttttgttttactaattgttatgcagtttgcctgtgtccattatg

SEQ ID NO: 35479 - protein, 191 aa, Arabidopsis thaliana
  peptide (1)..(191): Ceres Seq. ID no. 13497004
MAVSTVSSFLLPSFGIPSSSPSSTRLKVSLLPSSSTHGGLSSCVLTKPSVSLTKVFAVPDTLDPTPEILDEPASEVPSSSSISVDADKMAPKQKIRIKLRSYWVPLIEDSCKQILDAARNTNAKTMGPVPLPTKKRIYCVLKSPHVHKDARFHFEIRTHQRMIDILYPTAQTIDSLMQLDLPAGVDVEVKL

SEQ ID NO: 35480 - protein, 103 aa, Arabidopsis thaliana
  peptide (1)..(103): Ceres Seq. ID no. 13497005
MAPKQKIRIKLRSYWVPLIEDSCKQILDAARNTNAKTMGPVPLPTKKRIYCVLKSPHVHKDARFHFEIRTHQRMIDILYPTAQTIDSLMQLDLPAGVDVEVKL

SEQ ID NO: 35481 - DNA, 783 bp, Arabidopsis thaliana
  misc_feature (1)..(783): Ceres Seq. ID no. 12580494
  misc_feature (1)..(783): Ortholog of  Ceres SEQ ID NO 15168553 as cited in SEQ ID NO 57750
aatcaatcaacaaacataagaaaacaaactcaaaaggattcttcttcaaacacaacatctcaaggaaaacatgaaaatgggaatgggtttagtgttccttacagtttttatggctgagaagtcttctacaatggtctctgctcagtcaagctgcacaaacgcgttgattagcatgtcgccgtgtctcaactacataactggaaactctacctctcctaatcagcaatgctgtaatcagttgagtagagtagtccagtcttctcctgactgtttgtgtcaagtccttaacggtggaggctctcagcttgggatcaatattaaccaaacacaagctcttggtctgcctagggcttgtaatgttcagactcctcctgtcagtcgctgtaataccggtggtggtggtggtggttctacttctgactctcctgcagaatcaccaaactcttcaggaccaggtaatggatcgaaaaccgtaccagtaggagaaggagacggacccccatcgtctgatggaagctctatcaagttctcatttcctctcattgccttcttctccgcggtttcctacatggcaatcttctgagttactattttcccatacgcttttgtgccactcagattgcattctttatttgtccctatttattcacatttcgttgtgattttgtgtgatgtattttatgctctgtaaatccctactctccgggtgatattgctttgttgtaccaacggagagcattttggatctctttaccttttataataaacattactttccagaac

SEQ ID NO: 35482 - protein, 170 aa, Arabidopsis thaliana
  peptide (1)..(170): Ceres Seq. ID no. 12580495
MKMGMGLVFLTVFMAEKSSTMVSAQSSCTNALISMSPCLNYITGNSTSPNQQCCNQLSRVVQSSPDCLCQVLNGGGSQLGININQTQALGLPRACNVQTPPVSRCNTGGGGGGSTSDSPAESPNSSGPGNGSKTVPVGEGDGPPSSDGSSIKFSFPLIAFFSAVSYMAIF

SEQ ID NO: 35483 - protein, 168 aa, Arabidopsis thaliana
  peptide (1)..(168): Ceres Seq. ID no. 12580496
MGMGLVFLTVFMAEKSSTMVSAQSSCTNALISMSPCLNYITGNSTSPNQQCCNQLSRVVQSSPDCLCQVLNGGGSQLGININQTQALGLPRACNVQTPPVSRCNTGGGGGGSTSDSPAESPNSSGPGNGSKTVPVGEGDGPPSSDGSSIKFSFPLIAFFSAVSYMAIF

SEQ ID NO: 35484 - protein, 166 aa, Arabidopsis thaliana
  peptide (1)..(166): Ceres Seq. ID no. 12580497
MGLVFLTVFMAEKSSTMVSAQSSCTNALISMSPCLNYITGNSTSPNQQCCNQLSRVVQSSPDCLCQVLNGGGSQLGININQTQALGLPRACNVQTPPVSRCNTGGGGGGSTSDSPAESPNSSGPGNGSKTVPVGEGDGPPSSDGSSIKFSFPLIAFFSAVSYMAIF

SEQ ID NO: 35485 - DNA, 1138 bp, Arabidopsis thaliana
  misc_feature (1)..(1138): Ceres Seq. ID no. 13492871
  misc_feature (1)..(1138): Ortholog of  Ceres SEQ ID NO 14309591 as cited in SEQ ID NO 52617
  misc_feature (1)..(1138): Ortholog of  Ceres SEQ ID NO 13597418 as cited in SEQ ID NO 63764
tcattcttcaaataaattaaaatcttcgttggcgttgttgttggttgcgttacagattttggactaatcattattttcgtgcctgcaaagtcagcacgacgatcgcgtttcgatcttcaaagtagaagaagacccgccacaatcacaaatcgcggtgcatatagtctaaagggtcaatggcctcttcttcggatccatggatgagagagtacaatgaggctttgaaactctctgaggatattaatggcatgatgtctgaaaggaatgcctccgggttaaccgggcctgatgctcaacgtcgtgcctctgcaattcgaagaaagatcaccattttggggactcgattagacagtctgcaatcccttcttgtcaaggttcctggcaagcagcatgtttcggagaaagagatgaatcgtcgcaaggatatggttgggaatttgagatcaaaaacaaatcaggtggcctctgctttgaatatgtcaaactttgcaaacagagacagcttgtttggaacagatttaaagccggatgatgcgataaatagagtctctggcatggacaaccaaggaattgttgtatttcaacggcaagttatgagagaacaagacgagggacttgagaagttggaggaaacagtcatgagtaccaaacacattgctctcgctgttaacgaggagctcaccctgcagacaaggcttattgatgacttagattacgatgtggatatcactgactctcgcttacggcgtgttcaaaagagccttgccttgatgaacaagagcatgaaaagtggttgctcatgcatgtctatgctcttgtctgtgcttggaatcgttggtcttgctcttgtaatttggctgctggttaagtacctgtaataatgccaatgtggtggcaacttgtgaaagctcatccttttctctcagcctatcctctgtgcttaatggttgttttctattccttctatcgattgattcgtgtctgtgaggcaaagaagaataccactgcgtgtaagaaaccctcagaagtacataatctgtattaccttcgtatcaaccacgaattgtaaactaagttgacatttgtctatatatggtatggctcctacttggttcaataaagagaactagtggcttgg

SEQ ID NO: 35486 - protein, 233 aa, Arabidopsis thaliana
  peptide (1)..(233): Ceres Seq. ID no. 13492872
MASSSDPWMREYNEALKLSEDINGMMSERNASGLTGPDAQRRASAIRRKITILGTRLDSLQSLLVKVPGKQHVSEKEMNRRKDMVGNLRSKTNQVASALNMSNFANRDSLFGTDLKPDDAINRVSGMDNQGIVVFQRQVMREQDEGLEKLEETVMSTKHIALAVNEELTLQTRLIDDLDYDVDITDSRLRRVQKSLALMNKSMKSGCSCMSMLLSVLGIVGLALVIWLLVKYL

SEQ ID NO: 35487 - protein, 225 aa, Arabidopsis thaliana
  peptide (1)..(225): Ceres Seq. ID no. 13492873
MREYNEALKLSEDINGMMSERNASGLTGPDAQRRASAIRRKITILGTRLDSLQSLLVKVPGKQHVSEKEMNRRKDMVGNLRSKTNQVASALNMSNFANRDSLFGTDLKPDDAINRVSGMDNQGIVVFQRQVMREQDEGLEKLEETVMSTKHIALAVNEELTLQTRLIDDLDYDVDITDSRLRRVQKSLALMNKSMKSGCSCMSMLLSVLGIVGLALVIWLLVKYL

SEQ ID NO: 35488 - protein, 209 aa, Arabidopsis thaliana
  peptide (1)..(209): Ceres Seq. ID no. 13492874
MMSERNASGLTGPDAQRRASAIRRKITILGTRLDSLQSLLVKVPGKQHVSEKEMNRRKDMVGNLRSKTNQVASALNMSNFANRDSLFGTDLKPDDAINRVSGMDNQGIVVFQRQVMREQDEGLEKLEETVMSTKHIALAVNEELTLQTRLIDDLDYDVDITDSRLRRVQKSLALMNKSMKSGCSCMSMLLSVLGIVGLALVIWLLVKYL

SEQ ID NO: 35489 - DNA, 872 bp, Arabidopsis thaliana
  misc_feature (1)..(872): Ceres Seq. ID no. 12327663
  misc_feature (1)..(872): Ortholog of  Ceres SEQ ID NO 12557850 as cited in SEQ ID NO 65
  misc_feature (1)..(872): Ortholog of  Ceres SEQ ID NO 14312702 as cited in SEQ ID NO 0
atcgaacattaaaacctgattttactgaaactgtgctgcgaaggagaagccgcaaaccattttttgtcaatctagggttcttcttcgtacttgcagatttcgcctccgttttcactacgatctgtgaagatgttctccgctcagaacaagatcaataaggacaagaatgctgagccaacagaatgcgaggagcaagttgctcaggctttgtttgatttggagaacactaaccaggagttgaaaagcgagttgaaagatctctacatcaaccaagctgttcacatggatatctctggaaaccgcaaagctgttgtgatttacgttccattcagattgaggaaagctttccgcaagattcatccccgtctcgtcagagagcttgagaagaagttcagtggaaaggatgttatctttgttaccacaagaaggatcatgcgtccccccaagaagggtgctgctgttcagaggccacgtaacagaactcttacctcagttcatgaagctatgcttgaagatgttgctttccccgctgagattgttggaaagcgtactcgctaccgtcttgatggttccaagatcatgaaggtctttttggatgccaaggaaaagaacaacacagagtacaagctcgagactatggtcggtgtgtaccgtaaacttactggcaaagatgttgtttttgagtacccagtcgaagcttgaaagaagatgatgaagaaccatcaggatagtgaaagagagcttttgtttatgttttgtggtatttaggatgaaggaaactctcttgattcagttccttgttcacaatctttaatgttctatttacaatgactactttttgtgtttttcaattttgaaacctctatgatttc

SEQ ID NO: 35490 - protein, 190 aa, Arabidopsis thaliana
  peptide (1)..(190): Ceres Seq. ID no. 12327664
MFSAQNKINKDKNAEPTECEEQVAQALFDLENTNQELKSELKDLYINQAVHMDISGNRKAVVIYVPFRLRKAFRKIHPRLVRELEKKFSGKDVIFVTTRRIMRPPKKGAAVQRPRNRTLTSVHEAMLEDVAFPAEIVGKRTRYRLDGSKIMKVFLDAKEKNNTEYKLETMVGVYRKLTGKDVVFEYPVEA

SEQ ID NO: 35491 - protein, 139 aa, Arabidopsis thaliana
  peptide (1)..(139): Ceres Seq. ID no. 12327665
MDISGNRKAVVIYVPFRLRKAFRKIHPRLVRELEKKFSGKDVIFVTTRRIMRPPKKGAAVQRPRNRTLTSVHEAMLEDVAFPAEIVGKRTRYRLDGSKIMKVFLDAKEKNNTEYKLETMVGVYRKLTGKDVVFEYPVEA

SEQ ID NO: 35492 - DNA, 873 bp, Arabidopsis thaliana; identical to SEQ ID NO: 21755
  misc_feature (1)..(873): Ceres Seq. ID no. 13497760
  misc_feature (1)..(873): Ortholog of  Ceres SEQ ID NO 14306406 as cited in SEQ ID NO 1412
  misc_feature (1)..(873): Ortholog of  Ceres SEQ ID NO 15178824 as cited in SEQ ID NO 0

SEQ ID NO: 35493 - protein, 200 aa, Arabidopsis thaliana; identical to SEQ ID NO: 21756
  peptide (1)..(200): Ceres Seq. ID no. 13497761

SEQ ID NO: 35494 - protein, 175 aa, Arabidopsis thaliana; identical to SEQ ID NO: 21757
  peptide (1)..(175): Ceres Seq. ID no. 13497762

SEQ ID NO: 35495 - DNA, 1259 bp, Arabidopsis thaliana
  misc_feature (1)..(1259): Ceres Seq. ID no. 12370424
  misc_feature (1)..(1259): Ortholog of  Ceres SEQ ID NO 14305682 as cited in SEQ ID NO 59267
  misc_feature (1)..(1259): Ortholog of  Ceres SEQ ID NO 13594430 as cited in SEQ ID NO 60181
  misc_feature (1)..(1259): Ortholog of  Ceres SEQ ID NO 13597809 as cited in SEQ ID NO 64598
  misc_feature (1)..(1259): Ortholog of  Ceres SEQ ID NO 14313544 as cited in SEQ ID NO 68424
  misc_feature (1)..(1259): Ortholog of  Ceres SEQ ID NO 12617960 as cited in SEQ ID NO 69051
  misc_feature (1)..(1259): Ortholog of  Ceres SEQ ID NO 13589401 as cited in SEQ ID NO 0
aagcatcgctctagttaaggaagcagcaggtttggatccgaaccaaccaacggatcagatcagaaacaaaatattcaacggctcagatttattctaattttcctccttttattgttggttttttcattcgtcttcgagatctttcttctcagaggtgtaacgaaaacgctagaacaataactttgatcgttcttcttcttctcttgaatcggaaacaatggcggatgaacataagcatgaagaatcttcacctaatttggatccagcagtggaggttgtagagagggaatcgttgatggagaagttatcggagaagatccatcacaaaggtgattcgtcgtcttcatcatcatcagatgacgaaaacgagaagaagtcttcgtcatcgtctccaaagtctttgaaatcgaaggtttatcgtttgttcggaagagagagacctgttcataaggttctcggcggcggaaaaccggcagatatatttatgtggaaggacaagaaaatgtcaggaggtgtatttggcggtgctacagtggcatgggtgctatttgaattgatggagtatcatcttcttactctgttatgtcacgttatgatcgttgctcttgctgtgttgtttctatggtctaatgccactatgttcattcacaagtctccaccaaagattcctgaagttcatatccctgaagaacctcttcttcagcttgcttcgggtcttagaatcgaaatcaaccgtgggatctcttctcttcgtgagattgcgtcggggagggatatcaagaagttcctctctgctattgccggattgtgggttctatcgatcttgggcggctgctatagtttcttgacattggcatacatagctctggttctgctcttcactgttcctcttttctacgacaagtacgaagacaaagtagactcatacggtgagaaagcaatggctgagttgaagaagcaatacgctgtgttggacgcaaaggtattcagcaaaatcccaagaggaccgttgaaagacaagaagaaggattagttttttttggggtttttgttttgtgtgggttttctttggagtgcaatgtgcacaatgctctggtttttatacacgtgggttgtgttgtgttgtgaattggtaatctaaaaggttatgtgttagatctcaacccaaattttacttgacaactttgctttgtttttggagtggtttgtggcattagcacaatgattgtagtcgttctcttgatctatacttttaatgt

SEQ ID NO: 35496 - protein, 271 aa, Arabidopsis thaliana
  peptide (1)..(271): Ceres Seq. ID no. 12370425
MADEHKHEESSPNLDPAVEVVERESLMEKLSEKIHHKGDSSSSSSSDDENEKKSSSSSPKSLKSKVYRLFGRERPVHKVLGGGKPADIFMWKDKKMSGGVFGGATVAWVLFELMEYHLLTLLCHVMIVALAVLFLWSNATMFIHKSPPKIPEVHIPEEPLLQLASGLRIEINRGISSLREIASGRDIKKFLSAIAGLWVLSILGGCYSFLTLAYIALVLLFTVPLFYDKYEDKVDSYGEKAMAELKKQYAVLDAKVFSKIPRGPLKDKKKD

SEQ ID NO: 35497 - protein, 245 aa, Arabidopsis thaliana
  peptide (1)..(245): Ceres Seq. ID no. 12370426
MEKLSEKIHHKGDSSSSSSSDDENEKKSSSSSPKSLKSKVYRLFGRERPVHKVLGGGKPADIFMWKDKKMSGGVFGGATVAWVLFELMEYHLLTLLCHVMIVALAVLFLWSNATMFIHKSPPKIPEVHIPEEPLLQLASGLRIEINRGISSLREIASGRDIKKFLSAIAGLWVLSILGGCYSFLTLAYIALVLLFTVPLFYDKYEDKVDSYGEKAMAELKKQYAVLDAKVFSKIPRGPLKDKKKD

SEQ ID NO: 35498 - protein, 182 aa, Arabidopsis thaliana
  peptide (1)..(182): Ceres Seq. ID no. 12370427
MWKDKKMSGGVFGGATVAWVLFELMEYHLLTLLCHVMIVALAVLFLWSNATMFIHKSPPKIPEVHIPEEPLLQLASGLRIEINRGISSLREIASGRDIKKFLSAIAGLWVLSILGGCYSFLTLAYIALVLLFTVPLFYDKYEDKVDSYGEKAMAELKKQYAVLDAKVFSKIPRGPLKDKKKD

SEQ ID NO: 35499 - DNA, 1289 bp, Arabidopsis thaliana
  misc_feature (1)..(1289): Ceres Seq. ID no. 12324513
  misc_feature (1)..(1289): Ortholog of  Ceres SEQ ID NO 14311515 as cited in SEQ ID NO 51680
  misc_feature (1)..(1289): Ortholog of  Ceres SEQ ID NO 14315035 as cited in SEQ ID NO 56880
  misc_feature (1)..(1289): Ortholog of  Ceres SEQ ID NO 13594276 as cited in SEQ ID NO 57728
  misc_feature (1)..(1289): Ortholog of  Ceres SEQ ID NO 13594147 as cited in SEQ ID NO 58975
  misc_feature (1)..(1289): Ortholog of  Ceres SEQ ID NO 13655302 as cited in SEQ ID NO 63307
  misc_feature (1)..(1289): Ortholog of  Ceres SEQ ID NO 13597380 as cited in SEQ ID NO 64054
  misc_feature (1)..(1289): Ortholog of  Ceres SEQ ID NO 12625474 as cited in SEQ ID NO 64169
  misc_feature (1)..(1289): Ortholog of  Ceres SEQ ID NO 13597502 as cited in SEQ ID NO 64681
acattcactcatatcactacactttccattaattaccaatatatttttactacttaaaaaagatattggtcttgaaatggagagttacttaacgaaatggtgtgtagtgcttgtgttgttgtgtttcgggtttagtgtagtaaaagcacaagcacaagctcaagttccatgtttctttgtttttggtgactctttggttgacaatggaaacaacaacggtcttatttctattgcaagatccaattacttcccttacggtatcgatttcggcggccctaccggccgtttctccaacggcaagactactgttgatgtgatcgctgagctacttggatttaatggctacattcctgcgtacaatactgtgagtggtcggcaaatactctccggagttaactacgcttccgcagctgctggaatccgagaagaaaccggtcgacaattgggacaaaggataagctttagtggacaagttaggaactaccagaccacagtatcgcaagttgtgcagcttctaggagacgagactcgtgcagctgattacctcaagagatgtatttactctgttggtttaggaagcaacgactatctcaacaactacttcatgcctacgttttactcttcaagcagacaattcacacccgaacaatacgctaacgatctcatcagtcgctacagcacccagctcaatgcattatacaactatggggctcgaaagtttgcattgagtggaattggagcagttggttgtagtcctaacgcgctcgcaggcagtcccgacggtaggacttgcgtagaccgcatcaactcagcaaaccagatcttcaacaacaagctaagatctcttgttgatcagctcaacaacaatcaccctgatgcaaagttcatctacatcaatgcttatggcattttccaggacatgatcacaaatcctgccagatttgggtttagagtgacgaacgcgggatgttgcggtattgggaggaatgctggacagatcacatgtttaccgggacagagaccgtgtagagaccgcaatgcgtacgtgttctgggacgcatttcaccctactgaagccgcaaatgtgatcatcgcaaggagatcgtacaatgcacaatcggcttcagacgcttaccctatggatatttcaaggctggcacagctttgaagaaacatagtaaaataagaactaaagaagttccacaaaccaatgtgtgatcttgttgtgtaccgtaccgctatttaagattttcttgacgtaattgaaatcgagtaaaacattattctac

SEQ ID NO: 35500 - protein, 388 aa, Arabidopsis thaliana
  peptide (1)..(388): Ceres Seq. ID no. 12324514
HSLISLHFPLITNIFLLLKKDIGLEMESYLTKWCVVLVLLCFGFSVVKAQAQAQVPCFFVFGDSLVDNGNNNGLISIARSNYFPYGIDFGGPTGRFSNGKTTVDVIAELLGFNGYIPAYNTVSGRQILSGVNYASAAAGIREETGRQLGQRISFSGQVRNYQTTVSQVVQLLGDETRAADYLKRCIYSVGLGSNDYLNNYFMPTFYSSSRQFTPEQYANDLISRYSTQLNALYNYGARKFALSGIGAVGCSPNALAGSPDGRTCVDRINSANQIFNNKLRSLVDQLNNNHPDAKFIYINAYGIFQDMITNPARFGFRVTNAGCCGIGRNAGQITCLPGQRPCRDRNAYVFWDAFHPTEAANVIIARRSYNAQSASDAYPMDISRLAQL

SEQ ID NO: 35501 - protein, 363 aa, Arabidopsis thaliana
  peptide (1)..(363): Ceres Seq. ID no. 12324515
MESYLTKWCVVLVLLCFGFSVVKAQAQAQVPCFFVFGDSLVDNGNNNGLISIARSNYFPYGIDFGGPTGRFSNGKTTVDVIAELLGFNGYIPAYNTVSGRQILSGVNYASAAAGIREETGRQLGQRISFSGQVRNYQTTVSQVVQLLGDETRAADYLKRCIYSVGLGSNDYLNNYFMPTFYSSSRQFTPEQYANDLISRYSTQLNALYNYGARKFALSGIGAVGCSPNALAGSPDGRTCVDRINSANQIFNNKLRSLVDQLNNNHPDAKFIYINAYGIFQDMITNPARFGFRVTNAGCCGIGRNAGQITCLPGQRPCRDRNAYVFWDAFHPTEAANVIIARRSYNAQSASDAYPMDISRLAQL

SEQ ID NO: 35502 - DNA, 865 bp, Arabidopsis thaliana
  misc_feature (1)..(865): Ceres Seq. ID no. 13580449
  misc_feature (1)..(865): Ortholog of  Ceres SEQ ID NO 12597207 as cited in SEQ ID NO 62146
aattccaaaaacactccccaaatataatttcccgagaaaatcctcagccgctcgagctcagagtcgaaaatggtgtcaggatcagggatattctcgaagcgcgttgtcgtcgacgcgcgccaccacatgcttggccgtcttgcgtcgatcaccgccaaagagcttctcaatggccagaaagttgtcattgtccggtgcgaagagatttgcctctccggtggactcgttcgtcagaaaatgaagtacatgaggtttcttcgcaaacgtatgaacactaaaccttctcatggtcctattcacttccgtgctccttccaaaatcttctggcgtaccgttcgcggtatgattccacacaagacgaagcgtggagctgctgcactagcacgtttgaaggtatatgaaggtgttcctactccatatgacaagatcaagaggatgggtcatccctgatgctctcaaggtgttgaggcttcaagctggtcacaaatactgtctgttgggccgtctttcttctgaagttgggtggaaccattacgacaccatcaaggagctggagacaaagaggaaggagagagcccacgtggtttacgagcgaaagaagcaacttaacaaacttagagttaaggccgagaaggtcgctgaagagaagctcggagcacagctcgatattcttgcgccagttaagtactgagcttgtcagtagtagttttttttttttggtaaggagcttgtcagtagtagtttgtctttgcatgttttgagccaacccaatacctttttactttttatcttttacttaggtcttgtatcgaaatttgtactcctaacattttattcttgagttttatttattatattgcgtggc

SEQ ID NO: 35503 - protein, 126 aa, Arabidopsis thaliana
  peptide (1)..(126): Ceres Seq. ID no. 13580450
MVSGSGIFSKRVVVDARHHMLGRLASITAKELLNGQKVVIVRCEEICLSGGLVRQKMKYMRFLRKRMNTKPSHGPIHFRAPSKIFWRTVRGMIPHKTKRGAAALARLKVYEGVPTPYDKIKRMGHP

SEQ ID NO: 35504 - protein, 107 aa, Arabidopsis thaliana
  peptide (1)..(107): Ceres Seq. ID no. 13580451
MLGRLASITAKELLNGQKVVIVRCEEICLSGGLVRQKMKYMRFLRKRMNTKPSHGPIHFRAPSKIFWRTVRGMIPHKTKRGAAALARLKVYEGVPTPYDKIKRMGHP

SEQ ID NO: 35505 - protein, 97 aa, Arabidopsis thaliana
  peptide (1)..(97): Ceres Seq. ID no. 13580452
MKVFLLHMTRSRGWVIPDALKVLRLQAGHKYCLLGRLSSEVGWNHYDTIKELETKRKERAHVVYERKKQLNKLRVKAEKVAEEKLGAQLDILAPVKY

SEQ ID NO: 35506 - DNA, 627 bp, Arabidopsis thaliana
  misc_feature (1)..(627): Ceres Seq. ID no. 12377321
  misc_feature (1)..(627): Ortholog of  Ceres SEQ ID NO 13638769 as cited in SEQ ID NO 51773
  misc_feature (1)..(627): Ortholog of  Ceres SEQ ID NO 12583723 as cited in SEQ ID NO 58297
  misc_feature (1)..(627): Ortholog of  Ceres SEQ ID NO 12623263 as cited in SEQ ID NO 60988
  misc_feature (1)..(627): Ortholog of  Ceres SEQ ID NO 15225568 as cited in SEQ ID NO 61512
  misc_feature (1)..(627): Ortholog of  Ceres SEQ ID NO 13590249 as cited in SEQ ID NO 68385
  misc_feature (1)..(627): Ortholog of  Ceres SEQ ID NO 12635807 as cited in SEQ ID NO 0
  misc_feature (1)..(627): Ortholog of  Ceres SEQ ID NO 15179245 as cited in SEQ ID NO 0
cataatcctcaaaaatctcaactttatctcccaaaacacaaaacaaaaaaaaatggcttccactgctctctcaagcgccatcgtcggaacttcattcatccgtcgttccccagctccaatcagtctccgttcccttccatcagccaacacacaatccctcttcggtctcaaatcaggcaccgctcgtggtggacgtgtcacagccatggctacatacaaggtcaagttcatcacaccagaaggtgagctagaggttgagtgtgacgacgacgtctacgttcttgatgctgctgaggaagctggaatcgatttgccttactcttgccgtgctggttcttgttcgagctgtgctggtaaagttgtgtctggatctgttgatcagtctgaccagagtttccttgatgatgaacagattggtgaagggtttgttctcacttgtgctgcttaccctacctctgatgttaccattgaaacccacaaagaagaagacattgtttaagcctcacctactcaccagcttttgatggtttaaaaatcatgtctttataattgagtttgttgttacaaaactattgttatctgttgttattgttcctggtttggctcaccatcaatcgatgacatttt

SEQ ID NO: 35507 - protein, 165 aa, Arabidopsis thaliana
  peptide (1)..(165): Ceres Seq. ID no. 12377322
IILKNLNFISQNTKQKKMASTALSSAIVGTSFIRRSPAPISLRSLPSANTQSLFGLKSGTARGGRVTAMATYKVKFITPEGELEVECDDDVYVLDAAEEAGIDLPYSCRAGSCSSCAGKVVSGSVDQSDQSFLDDEQIGEGFVLTCAAYPTSDVTIETHKEEDIV

SEQ ID NO: 35508 - protein, 148 aa, Arabidopsis thaliana
  peptide (1)..(148): Ceres Seq. ID no. 12377323
MASTALSSAIVGTSFIRRSPAPISLRSLPSANTQSLFGLKSGTARGGRVTAMATYKVKFITPEGELEVECDDDVYVLDAAEEAGIDLPYSCRAGSCSSCAGKVVSGSVDQSDQSFLDDEQIGEGFVLTCAAYPTSDVTIETHKEEDIV

SEQ ID NO: 35509 - protein, 97 aa, Arabidopsis thaliana
  peptide (1)..(97): Ceres Seq. ID no. 12377324
MATYKVKFITPEGELEVECDDDVYVLDAAEEAGIDLPYSCRAGSCSSCAGKVVSGSVDQSDQSFLDDEQIGEGFVLTCAAYPTSDVTIETHKEEDIV

SEQ ID NO: 35510 - DNA, 647 bp, Arabidopsis thaliana
  misc_feature (1)..(647): Ceres Seq. ID no. 12394127
  misc_feature (1)..(647): Ortholog of  Ceres SEQ ID NO 14305967 as cited in SEQ ID NO 1343
accaacgttgattattcttcttctctctttctcatctaaaccaaaaaatggcagatcagctcaccgatgatcagatctctgagttcaaggaagcttttagccttttcgacaaagacggagatggttgcatcacaacgaaagagctaggaacagtgatgagatcattaggtcaaaatccaacagaagcagagttacaagatatgataaacgaagtagatgctgatggtaacggaaccatagacttccctgagtttctgaacctaatggctaggaagatgaaggacactgactctgaagaagagctgaaagaagctttcagggttttcgataaggaccagaacggtttcatctcggcagctgagttaagacatgtaatgacaaatcttggtgagaagttaactgatgaagaagttgatgagatgatcaaagaagctgatgttgatggagatggtcagatcaattatgaagagtttgtcaaagttatgatggcaaagtgaggaaactattctcatatcttttctctctttttctttctttctttttttgaattgaacaactctgattattgctttattctatgtttgactgttcattattatgcattcgtcccaaatttcatgttatgaactattttgtgactttggggt

SEQ ID NO: 35511 - protein, 149 aa, Arabidopsis thaliana; identical to SEQ ID NO: 29417
  peptide (1)..(149): Ceres Seq. ID no. 12394128

SEQ ID NO: 35512 - protein, 113 aa, Arabidopsis thaliana; identical to SEQ ID NO: 29418
  peptide (1)..(113): Ceres Seq. ID no. 12394129

SEQ ID NO: 35513 - protein, 98 aa, Arabidopsis thaliana; identical to SEQ ID NO: 29419
  peptide (1)..(98): Ceres Seq. ID no. 12394130

SEQ ID NO: 35514 - DNA, 702 bp, Arabidopsis thaliana
  misc_feature (1)..(702): Ceres Seq. ID no. 13509139
  misc_feature (1)..(702): Ortholog of  Ceres SEQ ID NO 14312281 as cited in SEQ ID NO 59172
  misc_feature (1)..(702): Ortholog of  Ceres SEQ ID NO 14302299 as cited in SEQ ID NO 68665
  misc_feature (1)..(702): Ortholog of  Ceres SEQ ID NO 15174396 as cited in SEQ ID NO 0
atgcgtatgagttgtaacggatgtcgagttctacgaaaaggctgcagtgaaaactgtagcataagaccttgtcttcaatggatcaaatccgctgaatctcaagccaacgccaccgtcttcctcgccaagttttatggccgtgcggggctcatgaacctcctcaacaccggtcctgaccacctccgtcctgcgatatttagatcattgttgtacgaagcatgcgggaggattgtgaatccgatatacggatccgtggggttattgtggtcaggaaactggcatctttgtcaagcggccgttgaggcagtaatgagaggctcacccgtgactccgatcgcatgcgacgcagcggttactggtcaagcacctccttttaacaacaagctttgcgacataagacacgtgtcaagcagggacgagaacgttaagagacggagccgtggtgcatgcaaggaagagagaaacgtgaggtctttgagtcatgagtcgtcactgagtcacgagtcaccggtgtcttctgaggagacgacgacggaggaaccaaagacttggatcgggcttgagctgactttggggttggagcctttagcacgtggaaatcacgtggtggtaccgatgaagaaaagaaagttagagaggtgtggcacgtctgaggatgaggacacgtgtaagattgagcttggactggtgtgcagtgagtga

SEQ ID NO: 35515 - protein, 233 aa, Arabidopsis thaliana
  peptide (1)..(233): Ceres Seq. ID no. 13509140
MRMSCNGCRVLRKGCSENCSIRPCLQWIKSAESQANATVFLAKFYGRAGLMNLLNTGPDHLRPAIFRSLLYEACGRIVNPIYGSVGLLWSGNWHLCQAAVEAVMRGSPVTPIACDAAVTGQAPPFNNKLCDIRHVSSRDENVKRRSRGACKEERNVRSLSHESSLSHESPVSSEETTTEEPKTWIGLELTLGLEPLARGNHVVVPMKKRKLERCGTSEDEDTCKIELGLVCSE

SEQ ID NO: 35516 - protein, 231 aa, Arabidopsis thaliana
  peptide (1)..(231): Ceres Seq. ID no. 13509141
MSCNGCRVLRKGCSENCSIRPCLQWIKSAESQANATVFLAKFYGRAGLMNLLNTGPDHLRPAIFRSLLYEACGRIVNPIYGSVGLLWSGNWHLCQAAVEAVMRGSPVTPIACDAAVTGQAPPFNNKLCDIRHVSSRDENVKRRSRGACKEERNVRSLSHESSLSHESPVSSEETTTEEPKTWIGLELTLGLEPLARGNHVVVPMKKRKLERCGTSEDEDTCKIELGLVCSE

SEQ ID NO: 35517 - protein, 183 aa, Arabidopsis thaliana
  peptide (1)..(183): Ceres Seq. ID no. 13509142
MNLLNTGPDHLRPAIFRSLLYEACGRIVNPIYGSVGLLWSGNWHLCQAAVEAVMRGSPVTPIACDAAVTGQAPPFNNKLCDIRHVSSRDENVKRRSRGACKEERNVRSLSHESSLSHESPVSSEETTTEEPKTWIGLELTLGLEPLARGNHVVVPMKKRKLERCGTSEDEDTCKIELGLVCSE

SEQ ID NO: 35518 - DNA, 1002 bp, Arabidopsis thaliana
  misc_feature (1)..(1002): Ceres Seq. ID no. 12371985
  misc_feature (1)..(1002): Ortholog of  Ceres SEQ ID NO 14313644 as cited in SEQ ID NO 54334
acacacccatagtcgtcttcctcgatcagtctctctctcaaattgcaaaggtttcttcgaggactttggcatactgcagtttttctgattcggaattttaaataaaaatcggtcgtgacgatttaggttgttggagctgtagtgcttaaaaaccctaactttatactgtttagagcagcagtccctccatgtcaggtcttgtggcgttatgcagagctcgagcttctgcttcgtcttctttattcaacagcgttattcgtccagcatttcgcaatttctctacaggttttgctgatacacagaacaaatcattggtagcacaaatgaaagaagagatgctccacatggacatcaactcaatgataggaagttccatgccactaggtatgatgcgtatcggaacaatcatccacaacatcgagatgaacccagggcaaggcgcaaagatggtccgagctgcaggaaccaacgccaagatcctaaaggagcctgctaaagggaaatgcttgataaagcttccgtcaggggacaccaagtggatcaatgccaaatgtcgtgctacgattggcacagtgtcgaacccgtctcatggaacgaagaagctatataaagcaggacagagtaggtggttagggataaggcccaaagttagaggagtggcgatgaatccgtgtgatcatccacacggtggaggtgaaggaaaaagcaaaagtagtggaagcagaggaaggacatcggttagtccgtggggaaaaccgtgtaaaggcggttacaaatcagctagtgtcaagaagaagaagaagcgtttggcagaagcagcagccaaaatgtgatatgggtgaacaagtttcgattttcttcaaatgtttctttcttttaaaaagcctccaatgttatttggttacgttattgaatctgttttttgagagttttttaggcttcatgaaactagaagatctttgatcagttgagaataaatatggttacgtgtttacttttatt

SEQ ID NO: 35519 - protein, 214 aa, Arabidopsis thaliana
  peptide (1)..(214): Ceres Seq. ID no. 12371986
MSGLVALCRARASASSSLFNSVIRPAFRNFSTGFADTQNKSLVAQMKEEMLHMDINSMIGSSMPLGMMRIGTIIHNIEMNPGQGAKMVRAAGTNAKILKEPAKGKCLIKLPSGDTKWINAKCRATIGTVSNPSHGTKKLYKAGQSRWLGIRPKVRGVAMNPCDHPHGGGEGKSKSSGSRGRTSVSPWGKPCKGGYKSASVKKKKKRLAEAAAKM

SEQ ID NO: 35520 - protein, 169 aa, Arabidopsis thaliana
  peptide (1)..(169): Ceres Seq. ID no. 12371987
MKEEMLHMDINSMIGSSMPLGMMRIGTIIHNIEMNPGQGAKMVRAAGTNAKILKEPAKGKCLIKLPSGDTKWINAKCRATIGTVSNPSHGTKKLYKAGQSRWLGIRPKVRGVAMNPCDHPHGGGEGKSKSSGSRGRTSVSPWGKPCKGGYKSASVKKKKKRLAEAAAKM

SEQ ID NO: 35521 - protein, 165 aa, Arabidopsis thaliana
  peptide (1)..(165): Ceres Seq. ID no. 12371988
MLHMDINSMIGSSMPLGMMRIGTIIHNIEMNPGQGAKMVRAAGTNAKILKEPAKGKCLIKLPSGDTKWINAKCRATIGTVSNPSHGTKKLYKAGQSRWLGIRPKVRGVAMNPCDHPHGGGEGKSKSSGSRGRTSVSPWGKPCKGGYKSASVKKKKKRLAEAAAKM

SEQ ID NO: 35522 - DNA, 1223 bp, Arabidopsis thaliana
  misc_feature (1)..(1223): Ceres Seq. ID no. 12334539
  misc_feature (1)..(1223): Ortholog of  Ceres SEQ ID NO 12609869 as cited in SEQ ID NO 52065
  misc_feature (1)..(1223): Ortholog of  Ceres SEQ ID NO 14301506 as cited in SEQ ID NO 61159
  misc_feature (1)..(1223): Ortholog of  Ceres SEQ ID NO 13597124 as cited in SEQ ID NO 64173
  misc_feature (1)..(1223): Ortholog of  Ceres SEQ ID NO 12780602 as cited in SEQ ID NO 65695
aacgacaagtgacattatcattactctcatcgagagcgttggtctctcttctccttcacctttgagtttctcgaggctcttttcttaattttactgctaaatagtagtgtttactgtcttcagccgccgtcgccggattccattatcgaaggcgacggaagcagtatcttaggttttgtccgacgaagctccgtttgattgttatcggttccgttgtattcgtcgatcttccattttcgcatttgttttctatatccgaagatgggaagcagtccagctccgtttgccgatattggcaagaaagccaaagatctcctaaacaaggattacatttttgaccacaagtttactctcacaatgctgagtgctacaggaacggaatttgtggctactggtttgaagaaggatgatttcttttttggcgatataagcacactatataaaggtcaaaacaccattgttgatctgaaaatcgacagccactctagtgtgtcgacgaaagtaactctcaaaaatctcttgccatccgctaaagctgtaattagtttcaaaatacctgatcacaagtctggcaagctggatgtgcaatatgttcatcctcatgctacgctcaattccagcattggcctcaacccaactcctctgttagatctatcagcaactatcggaagccagaatgtttgccttggtggtgaagtcagtttcgacacagcttcatcatcactaacaaagtacaatgcagggattggtttcaacaaccaaggcgtctctgctgcactcatactggaggataaaggggagagtctgagagctacttacgtccacacagtgaacccaaccacatcctttggtgcagaactgatccgtcgcttctccaattataacaacagcttcaccgtcggaagctctcactctgtggatcaattcacagtggttaagaccagattttctaacagtgggaaagcagggatggtggtccagagagaatggagaccgaagtcgcacatcactttctcagctgagtatgactcaaaggctgtgacctcttcaccaaagcttggtctcgccctcgccctcaaaccataaaacaagaaaagagctcttatcagtttggaaaacacaaactaaacaattcaatttttcaccaagtgctaaaaaaatcacccccaaacgaacggtttgtagggttattgaatcacttttgcattaatatttgttttttc

SEQ ID NO: 35523 - protein, 274 aa, Arabidopsis thaliana
  peptide (1)..(274): Ceres Seq. ID no. 12334540
MGSSPAPFADIGKKAKDLLNKDYIFDHKFTLTMLSATGTEFVATGLKKDDFFFGDISTLYKGQNTIVDLKIDSHSSVSTKVTLKNLLPSAKAVISFKIPDHKSGKLDVQYVHPHATLNSSIGLNPTPLLDLSATIGSQNVCLGGEVSFDTASSSLTKYNAGIGFNNQGVSAALILEDKGESLRATYVHTVNPTTSFGAELIRRFSNYNNSFTVGSSHSVDQFTVVKTRFSNSGKAGMVVQREWRPKSHITFSAEYDSKAVTSSPKLGLALALKP

SEQ ID NO: 35524 - protein, 242 aa, Arabidopsis thaliana
  peptide (1)..(242): Ceres Seq. ID no. 12334541
MLSATGTEFVATGLKKDDFFFGDISTLYKGQNTIVDLKIDSHSSVSTKVTLKNLLPSAKAVISFKIPDHKSGKLDVQYVHPHATLNSSIGLNPTPLLDLSATIGSQNVCLGGEVSFDTASSSLTKYNAGIGFNNQGVSAALILEDKGESLRATYVHTVNPTTSFGAELIRRFSNYNNSFTVGSSHSVDQFTVVKTRFSNSGKAGMVVQREWRPKSHITFSAEYDSKAVTSSPKLGLALALKP

SEQ ID NO: 35525 - DNA, 1005 bp, Arabidopsis thaliana
  misc_feature (1)..(1005): Ceres Seq. ID no. 12562843
  misc_feature (1)..(1005): Ortholog of  Ceres SEQ ID NO 13595072 as cited in SEQ ID NO 55971
atccaatttcatcacatcttattaactaaagagccttttacttgcgccacactctcaccgcaatggccgcctcgacaatggctctctcctctcctgctttgaccggaaaggccgttaagctatccccggcggcctccgaagtatttggaaccggccgaatcaccatgcgcaaagcctccaagcccaccggtccatccggcagcccatggtacggatccgaccgagtcaagtacttgggtccattctccggtgagcctccgagctacctcactggagagttccccggtgattacgggtgggacactgccggtctatccgccgatcccgagaccttcgctaggaaccgtgagctagaagttatccacagcagatgggccatgctcggagccctaggctgcgttttccctgagctattggctaggaacggagtgaagttcggagaagcggtttggttcaaggctggttcacagatcttcagcgacggaggattggactacttgggcaaccccgagcttggtccacgctcagagcatcttagccatttgggctactcaagttatcctcatgggagctgttgagggctaccagagtcgccggagatggtccattgggagaagcagaggacttgctttacccaggtgggagcttcgacccattgggcctcgctactgaccccgaggctttcgcggagttgaaggtgaaggagctcaagaacggaaggttggctatgttctctatgtttggattcttcgttcaggccattgtcaccggaaagggaccgttggagaacctcgcggaccacttggctgatccagtcaacaacaatgcatgggccttcgctaccaacttcgtccccggaaagtgagtttaatttgtgatcgagttgtgtgtatccggtttgttgcatcttggaaatgtgatgcagatttcatatcttgtaaattactttgtatgtgtgtgaaatatttaagaagctttatgatattgatggatcagtcacttact

SEQ ID NO: 35526 - protein, 171 aa, Arabidopsis thaliana
  peptide (1)..(171): Ceres Seq. ID no. 12562844
MAASTMALSSPALTGKAVKLSPAASEVFGTGRITMRKASKPTGPSGSPWYGSDRVKYLGPFSGEPPSYLTGEFPGDYGWDTAGLSADPETFARNRELEVIHSRWAMLGALGCVFPELLARNGVKFGEAVWFKAGSQIFSDGGLDYLGNPELGPRSEHLSHLGYSSYPHGSC

SEQ ID NO: 35527 - protein, 166 aa, Arabidopsis thaliana
  peptide (1)..(166): Ceres Seq. ID no. 12562845
MALSSPALTGKAVKLSPAASEVFGTGRITMRKASKPTGPSGSPWYGSDRVKYLGPFSGEPPSYLTGEFPGDYGWDTAGLSADPETFARNRELEVIHSRWAMLGALGCVFPELLARNGVKFGEAVWFKAGSQIFSDGGLDYLGNPELGPRSEHLSHLGYSSYPHGSC

SEQ ID NO: 35528 - protein, 137 aa, Arabidopsis thaliana
  peptide (1)..(137): Ceres Seq. ID no. 12562846
MRKASKPTGPSGSPWYGSDRVKYLGPFSGEPPSYLTGEFPGDYGWDTAGLSADPETFARNRELEVIHSRWAMLGALGCVFPELLARNGVKFGEAVWFKAGSQIFSDGGLDYLGNPELGPRSEHLSHLGYSSYPHGSC

SEQ ID NO: 35529 - DNA, 1494 bp, Arabidopsis thaliana
  misc_feature (1)..(1494): Ceres Seq. ID no. 12324357
  misc_feature (1)..(1494): Ortholog of  Ceres SEQ ID NO 15169533 as cited in SEQ ID NO 67374
gagagatcactgtacttattgggttttgatctttgatggctccactgagtccaagagtagtggtgaaggtggatttgaagaagaagccatggcagcaggaccagccattgcacaatagatggcatccggagataccaccagtagcagaggtcaaggctggtgagtttttccgggtagaaatgattgatgcaatgggaggtgttatcaaggacaatgactctgcaagcgatatcaagaacctagtcctaactactactcatcacctaagtgggccgattagggttgtagatgaggaaggtgttgcagctaaagcaggtgatcttcttgctgttgagatatgcaacttgggtcctcttccaggagatgaatggggattcactggttcgtttgatagagagaatggtggcggtttcttgactgaccatttcccttgtgcgaccaaagctatttggtactttgaagggatctatgcctactctcctcagattcctggagtacgatttccgggtttgacacacccaggagtcattggcactgcaccatcgaatgaactcttgagaatatggaatgatagggaaagacaattagaagaaagtggtgttgagtccctaacactatgtgaggtagtgcatcagcggccattagcatgcctaccaacaactaaaggatgtctcctcgggaatattgaagaaggaacaccagaatgggaaaggattgcaaacgaggctgcgaggacaataccaggaagagaaaacggaggaaactgtgacattaaaaacctaagcagaggctctaaaatatatcttccagtatttgttgaaggggctaatctaagcacaggagacatgcatttctcacaaggtgatggtgagatctcgttctgcggagccatcgagatgagtggatttctagaactcaagtgtgaaatcataagaaatgggatgcaagagtaccttacgccaatgggacctacccctctccatgtaaacccaatctttgagataggaccagtggaaccgaggttctcagagtggcttgtcttcgaaggtatcagtgtcgatgagagcggaaaacagcattacctagatgcaacagttgcttacaaacgggcagttctcaacgccatagactatcttttcaaatttggttactcaaaagaacaggtgtacctcttactctcatgttgtccatgtgaaggaagactatctgggatagttgattctccgagtgccgttgctacactagcaatacctacagccatctttgatcaggatattaggccaaagaatcggaaggttccagtaggacctcgggttgtgaggaaaccagatgtactgaagagcacatatgatggaaagcttccaattacaaagaatccaagttcttcctcttagcttctacaaaaaaattaaaattaaaatttagaagctaataccaagattgtataatcaagcatatgttccaataataaagcaataacttggtgttttcttt

SEQ ID NO: 35530 - protein, 452 aa, Arabidopsis thaliana
  peptide (1)..(452): Ceres Seq. ID no. 12324358
MAPLSPRVVVKVDLKKKPWQQDQPLHNRWHPEIPPVAEVKAGEFFRVEMIDAMGGVIKDNDSASDIKNLVLTTTHHLSGPIRVVDEEGVAAKAGDLLAVEICNLGPLPGDEWGFTGSFDRENGGGFLTDHFPCATKAIWYFEGIYAYSPQIPGVRFPGLTHPGVIGTAPSNELLRIWNDRERQLEESGVESLTLCEVVHQRPLACLPTTKGCLLGNIEEGTPEWERIANEAARTIPGRENGGNCDIKNLSRGSKIYLPVFVEGANLSTGDMHFSQGDGEISFCGAIEMSGFLELKCEIIRNGMQEYLTPMGPTPLHVNPIFEIGPVEPRFSEWLVFEGISVDESGKQHYLDATVAYKRAVLNAIDYLFKFGYSKEQVYLLLSCCPCEGRLSGIVDSPSAVATLAIPTAIFDQDIRPKNRKVPVGPRVVRKPDVLKSTYDGKLPITKNPSSSS

SEQ ID NO: 35531 - protein, 404 aa, Arabidopsis thaliana
  peptide (1)..(404): Ceres Seq. ID no. 12324359
MIDAMGGVIKDNDSASDIKNLVLTTTHHLSGPIRVVDEEGVAAKAGDLLAVEICNLGPLPGDEWGFTGSFDRENGGGFLTDHFPCATKAIWYFEGIYAYSPQIPGVRFPGLTHPGVIGTAPSNELLRIWNDRERQLEESGVESLTLCEVVHQRPLACLPTTKGCLLGNIEEGTPEWERIANEAARTIPGRENGGNCDIKNLSRGSKIYLPVFVEGANLSTGDMHFSQGDGEISFCGAIEMSGFLELKCEIIRNGMQEYLTPMGPTPLHVNPIFEIGPVEPRFSEWLVFEGISVDESGKQHYLDATVAYKRAVLNAIDYLFKFGYSKEQVYLLLSCCPCEGRLSGIVDSPSAVATLAIPTAIFDQDIRPKNRKVPVGPRVVRKPDVLKSTYDGKLPITKNPSSSS

SEQ ID NO: 35532 - protein, 400 aa, Arabidopsis thaliana
  peptide (1)..(400): Ceres Seq. ID no. 12324360
MGGVIKDNDSASDIKNLVLTTTHHLSGPIRVVDEEGVAAKAGDLLAVEICNLGPLPGDEWGFTGSFDRENGGGFLTDHFPCATKAIWYFEGIYAYSPQIPGVRFPGLTHPGVIGTAPSNELLRIWNDRERQLEESGVESLTLCEVVHQRPLACLPTTKGCLLGNIEEGTPEWERIANEAARTIPGRENGGNCDIKNLSRGSKIYLPVFVEGANLSTGDMHFSQGDGEISFCGAIEMSGFLELKCEIIRNGMQEYLTPMGPTPLHVNPIFEIGPVEPRFSEWLVFEGISVDESGKQHYLDATVAYKRAVLNAIDYLFKFGYSKEQVYLLLSCCPCEGRLSGIVDSPSAVATLAIPTAIFDQDIRPKNRKVPVGPRVVRKPDVLKSTYDGKLPITKNPSSSS

SEQ ID NO: 35533 - DNA, 1330 bp, Arabidopsis thaliana
  misc_feature (1)..(1330): Ceres Seq. ID no. 12324401
  misc_feature (1)..(1330): Ortholog of  Ceres SEQ ID NO 14303843 as cited in SEQ ID NO 53775
  misc_feature (1)..(1330): Ortholog of  Ceres SEQ ID NO 15179800 as cited in SEQ ID NO 58215
  misc_feature (1)..(1330): Ortholog of  Ceres SEQ ID NO 13654549 as cited in SEQ ID NO 68530
gattgagagcaaagtctcactctcttccttaagctctgagaaacctccgataagcttatcggacaaaaagagaagtagacgccgccatggataggcttttgcaacctccttcttctcactcaattgctccctccaaattccaatcaagaccatctcccttattactccaccgtctccactcaacgaatcttagtacttttccctcctctcgccgtctcgagtcacgccgaatcagctccatttcctgcttcttccgtcagaatccatcgccggatacatctccaggattgaatcagagtagtaatttcttgattgcttcttctcaaaccgatgcgtcgaaacctaatccaggatttatccaacggatcgtgagcagttttgagcaacgcaagaccataccggcaggaatggttatattagtctctgctatagctgcgcttttgcttaatcccattcttgtgccgcctgctttcgctagctttcaaacggctactaattctggtggagctgctgtggttggtggaaaactcctcaggactgaagtattgacaagtgcttggactggtttctttgctggttgcttacacacgttatctggacctgatcaccttgctgctttggctccactttcgattggacggacgagaatggagagtgctgcggttggagctctttggggatgtggtcatgacgctggtcagctcatctttggtttattgtttctgcttctaaaagataggctccacattgaagttataagaacttggggtacaagagttgttggtttgactctccttgtgattggtgctatgggaatcaaagaagcttctgagatgccggaaccatgtgttgttactttggagaatggggaaacagatgagaaaagcttaaagaagaaaaagatagggtttgcgacatttgcgactgggattgttcatggcctgcaaccggatgctctgatgatggtattgcctgcattggctcttccttctcggatagccggtgcttcgtttctcatcatgttcttgattgggacggtgattgcgatgggaagctacacagtttttattgggtcgtgtagcgaagcgttgaaagagaaagttcctaggatcactgagaaactaacgtgggcatcttctcttgtggccattggacttggattggcaattattgtcagccagttctttggattcagcctgtattgaagaaaacatcgtcaagtctttgtagctctctctgtaggataagattttttgcatgtaccaacaaaatttgtatctttgcttcagaatctttttcttcaatcaaatacaagtttgagtttggctcc

SEQ ID NO: 35534 - protein, 372 aa, Arabidopsis thaliana
  peptide (1)..(372): Ceres Seq. ID no. 12324402
MDRLLQPPSSHSIAPSKFQSRPSPLLLHRLHSTNLSTFPSSRRLESRRISSISCFFRQNPSPDTSPGLNQSSNFLIASSQTDASKPNPGFIQRIVSSFEQRKTIPAGMVILVSAIAALLLNPILVPPAFASFQTATNSGGAAVVGGKLLRTEVLTSAWTGFFAGCLHTLSGPDHLAALAPLSIGRTRMESAAVGALWGCGHDAGQLIFGLLFLLLKDRLHIEVIRTWGTRVVGLTLLVIGAMGIKEASEMPEPCVVTLENGETDEKSLKKKKIGFATFATGIVHGLQPDALMMVLPALALPSRIAGASFLIMFLIGTVIAMGSYTVFIGSCSEALKEKVPRITEKLTWASSLVAIGLGLAIIVSQFFGFSLY

SEQ ID NO: 35535 - protein, 265 aa, Arabidopsis thaliana
  peptide (1)..(265): Ceres Seq. ID no. 12324403
MVILVSAIAALLLNPILVPPAFASFQTATNSGGAAVVGGKLLRTEVLTSAWTGFFAGCLHTLSGPDHLAALAPLSIGRTRMESAAVGALWGCGHDAGQLIFGLLFLLLKDRLHIEVIRTWGTRVVGLTLLVIGAMGIKEASEMPEPCVVTLENGETDEKSLKKKKIGFATFATGIVHGLQPDALMMVLPALALPSRIAGASFLIMFLIGTVIAMGSYTVFIGSCSEALKEKVPRITEKLTWASSLVAIGLGLAIIVSQFFGFSLY

SEQ ID NO: 35536 - DNA, 1033 bp, Arabidopsis thaliana
  misc_feature (1)..(1033): Ceres Seq. ID no. 12334955
  misc_feature (1)..(1033): Ortholog of  Ceres SEQ ID NO 13581804 as cited in SEQ ID NO 51424
  misc_feature (1)..(1033): Ortholog of  Ceres SEQ ID NO 14307559 as cited in SEQ ID NO 54006
  misc_feature (1)..(1033): Ortholog of  Ceres SEQ ID NO 14307797 as cited in SEQ ID NO 54802
  misc_feature (1)..(1033): Ortholog of  Ceres SEQ ID NO 15168374 as cited in SEQ ID NO 55652
  misc_feature (1)..(1033): Ortholog of  Ceres SEQ ID NO 13663874 as cited in SEQ ID NO 67003
  misc_feature (1)..(1033): Ortholog of  Ceres SEQ ID NO 13624654 as cited in SEQ ID NO 0
acattaccatcattagaaaactttcctaattagatcaagatcgtcgttatctctcttgttttttcttcatataatttagttatttttagagaaatgggaaggggtagggttgaattgaagaggatagagaacaagatcaatagacaagtgacatactcgaaaagaagaactggtcttttgaagaaagctcaggagatctctgttctttgtgatgccgaggtttcccttattgtcttctcccataagggcaaatagttcgagtactcctctgaatcttgcatggagaaggtactagaacgctacgagaggtattcttacgccgagagacagctgattgcacctgactctcacgttaatgcacagacgaactggtcaatggagtatagcaggcttaaggccaagattgagcttttggagagaaaccaaaggcattatctgggagaagagttggaaccaatgagcctcaaggatctccaaaatctggagcagcagcttgagactgctcttaagcacattcgctccagaaaaaatcaactcatgaatgagtccctcaaccacctccaaagaaaggagaaggagatacaggaggaaaacagcatgcttaccaaacagataaagaagagggaaaacatcctaaggacaaaacaaatccaatgtgagcagctgaaccgcagcgtcgacgatgtaccacagccacaaccatttcaacacccccatctttacatgatcgctcatcagacttctcctttcctaaatatgggtggtttgtaccaaggagaagaccaaacggcgatgaggaggaacaatctggatctgactcttgaacccatttacaattaccttggctgttacgccgcttgaatagactacatcgatctatatcaatctctttaaaataatataagatcgatcctctattcatgatctatattaaacaccggttaattaatatatttttggtatgtccttatatcatatcaacatcatcaagcctttttccaattcaatatatcttgtatttcggggagcaatg

SEQ ID NO: 35537 - protein, 193 aa, Arabidopsis thaliana
  peptide (1)..(193): Ceres Seq. ID no. 12334956
MEKVLERYERYSYAERQLIAPDSHVNAQTNWSMEYSRLKAKIELLERNQRHYLGEELEPMSLKDLQNLEQQLETALKHIRSRKNQLMNESLNHLQRKEKEIQEENSMLTKQIKKRENILRTKQIQCEQLNRSVDDVPQPQPFQHPHLYMIAHQTSPFLNMGGLYQGEDQTAMRRNNLDLTLEPIYNYLGCYAA

SEQ ID NO: 35538 - protein, 161 aa, Arabidopsis thaliana
  peptide (1)..(161): Ceres Seq. ID no. 12334957
MEYSRLKAKIELLERNQRHYLGEELEPMSLKDLQNLEQQLETALKHIRSRKNQLMNESLNHLQRKEKEIQEENSMLTKQIKKRENILRTKQIQCEQLNRSVDDVPQPQPFQHPHLYMIAHQTSPFLNMGGLYQGEDQTAMRRNNLDLTLEPIYNYLGCYAA

SEQ ID NO: 35539 - protein, 134 aa, Arabidopsis thaliana
  peptide (1)..(134): Ceres Seq. ID no. 12334958
MSLKDLQNLEQQLETALKHIRSRKNQLMNESLNHLQRKEKEIQEENSMLTKQIKKRENILRTKQIQCEQLNRSVDDVPQPQPFQHPHLYMIAHQTSPFLNMGGLYQGEDQTAMRRNNLDLTLEPIYNYLGCYAA

SEQ ID NO: 35540 - DNA, 1213 bp, Arabidopsis thaliana
  misc_feature (1)..(1213): Ceres Seq. ID no. 13647078
  misc_feature (1)..(1213): Ortholog of  Ceres SEQ ID NO 12484482 as cited in SEQ ID NO 53324
  misc_feature (1)..(1213): Ortholog of  Ceres SEQ ID NO 15176234 as cited in SEQ ID NO 54949
  misc_feature (1)..(1213): Ortholog of  Ceres SEQ ID NO 14314507 as cited in SEQ ID NO 59337
aacatacacatcaccactaagtagaagaaaaatggcgactcttaaggtttctgattctgttcctgctccttctgatgatgctgagcaattgagaaccgcttttgaaggatggggtacgaacgaggacttgatcatatcaatcttggctcacagaagtgctgaacagaggaaagtcatcaggcaagcataccatgaaacctacggcgaagaccttctcaagactcttgacaaggagctctctaacgacttcgagagagctatcttgttgtggactcttgaacccggtgagcgtgatgctttattggctaatgaagctacaaaaagatggacttcaagcaaccaagtgcttatggaagttgcttgcacaaggacatcaacgcagctgcttcacgctaggcaagcttaccatgctcgctacaagaagtctcttgaagaggacgttgctcaccacactaccggtgacttcagaaagcttttggtttctcttgttacctcatacaggtacgaaggagatgaagtgaacatgacattggctaagcaagaagctaagctggtccatgaaaaaatcaaggacaagcactacaatgatgaggatgttattagaatcttgtccacaagaagcaaagctcagatcaatgctacttttaaccgttaccaagatgatcatggcgaggaaattctcaagagtcttgaggaaggagatgatgatgacaagttccttgctttgttgaggtcaaccattcagtgcttgacaagaccagagctttactttgtcgatgttcttcgttcagcaatcaacaaaactggaactgatgaaggagcactcactagaattgtcaccacaagagctgagattgacttgaaggtcattggagaggagtaccagcgcaggaacagcattcctttggagaaagccattaccaaagacacacgtggagattacgagaagatgctcgtcgcacttctcggtgaagatgatgcttaatcaatcaatcctctacagagaaacataagcttctttatagcttatgttatctcttatctccctctctctatctctctttttgatgagtttcaaatcgtttgattttgtttctacaaaaaccttgtttgtttctgttgtgtgttttgagttactaaataatgcaaaagagagagacagagagaaccagtgtggtctcttaagttatatatatatgaagagcattggccc

SEQ ID NO: 35541 - protein, 327 aa, Arabidopsis thaliana
  peptide (1)..(327): Ceres Seq. ID no. 15219131
TYTSPLSRRKMATLKVSDSVPAPSDDAEQLRTAFEGWGTNEDLIISILAHRSAEQRKVIRQAYHETYGEDLLKTLDKELSNDFERAILLWTLEPGERDALLANEATKRWTSSNQVLMEVACTRTSTQLLHARQAYHARYKKSLEEDVAHHTTGDFRKLLVSLVTSYRYEGDEVNMTLAKQEAKLVHEKIKDKHYNDEDVIRILSTRSKAQINATFNRYQDDHGEEILKSLEEGDDDDKFLALLRSTIQCLTRPELYFVDVLRSAINKTGTDEGALTRIVTTRAEIDLKVIGEEYQRRNSIPLEKAITKDTRGDYEKMLVALLGEDDA

SEQ ID NO: 35542 - protein, 317 aa, Arabidopsis thaliana
  peptide (1)..(317): Ceres Seq. ID no. 15219132
MATLKVSDSVPAPSDDAEQLRTAFEGWGTNEDLIISILAHRSAEQRKVIRQAYHETYGEDLLKTLDKELSNDFERAILLWTLEPGERDALLANEATKRWTSSNQVLMEVACTRTSTQLLHARQAYHARYKKSLEEDVAHHTTGDFRKLLVSLVTSYRYEGDEVNMTLAKQEAKLVHEKIKDKHYNDEDVIRILSTRSKAQINATFNRYQDDHGEEILKSLEEGDDDDKFLALLRSTIQCLTRPELYFVDVLRSAINKTGTDEGALTRIVTTRAEIDLKVIGEEYQRRNSIPLEKAITKDTRGDYEKMLVALLGEDDA

SEQ ID NO: 35543 - protein, 211 aa, Arabidopsis thaliana; identical to SEQ ID NO: 24550
  peptide (1)..(211): Ceres Seq. ID no. 15219133

SEQ ID NO: 35544 - DNA, 710 bp, Arabidopsis thaliana; identical to SEQ ID NO: 20991
  misc_feature (1)..(710): Ceres Seq. ID no. 13489897
  misc_feature (1)..(710): Ortholog of  Ceres SEQ ID NO 13595763 as cited in SEQ ID NO 57864

SEQ ID NO: 35545 - protein, 139 aa, Arabidopsis thaliana; identical to SEQ ID NO: 20992
  peptide (1)..(139): Ceres Seq. ID no. 13489898

SEQ ID NO: 35546 - protein, 134 aa, Arabidopsis thaliana; identical to SEQ ID NO: 20993
  peptide (1)..(134): Ceres Seq. ID no. 13489899

SEQ ID NO: 35547 - protein, 106 aa, Arabidopsis thaliana; identical to SEQ ID NO: 20994
  peptide (1)..(106): Ceres Seq. ID no. 13489900

SEQ ID NO: 35548 - DNA, 1263 bp, Arabidopsis thaliana
  misc_feature (1)..(1263): Ceres Seq. ID no. 12324361
  misc_feature (1)..(1263): Ortholog of  Ceres SEQ ID NO 13593955 as cited in SEQ ID NO 54278
  misc_feature (1)..(1263): Ortholog of  Ceres SEQ ID NO 13597380 as cited in SEQ ID NO 64054
  misc_feature (1)..(1263): Ortholog of  Ceres SEQ ID NO 12625474 as cited in SEQ ID NO 64169
ttttcagagattgatgataggtgtagaagaaccatgaaatcgatattaattggatttgttttctttcttttatcatcatttcgtagcttcttcgtgaccaccacctattcccaagtgatccatcaccggcgtctacggccatggccaccgccagaatctgggtccggcccatcacctggcccatctccatcaccacataacaaaaccacaccggcagtgtttttctttggggattcgatcatagatacaggaaataataataatctaacaacagaaatgaaatgtaattttagtccttatggtaaggattttccactcggagttgcaactggtagattcagcaacggaaaggtcgtttccgattatatatctgaatatttgggagtaaaaccaattgtaccagcatattttgaccccaatgtacaactagaagatcttctcacgggtgtatcatttgcttcagagagtaaagtcaatgttggagcaattgacatatttccaacgacacatagcgagagtaaagaggttagtaggggaagagaagacggatcaactgttagccaagggcttatccgttgtggtcgcaggcagcaacgatttggctattacatattatggtcatggtgctcaattgctcaaagatgatatccactactttacttcaaagatggcaaattccgcggcaagttttgttatgcaattatacgaatatggagcaagacaaatagcagttctaggaacaccaccacttggctgcgtaccaatactaagaactctaaaaggaggtcttcgtagagagtgtgctcaagatataaactatgcttctcagcttttcaacgtcaaactctccaacattttggaccaattggcaaaaaacctaccaaattccaatctcatttacattgacatatactctgctttcagtcacatcttagaaaattcagcagattatgggtttgaagaaataaagagaggttgttgtggaactggatttgtggaagctggtccactttgcaatcgattcacaacatttgtgtgctccaatgtatctgcttacatgttttgggatagtctccatcctacccaaagattctataaaatcttaaccaaaatactttttgagaaatacatccacaatttaaattgagtagtgtgatcaaatgactcacattgtatgctttaagttttcttaaagcttgtgcagttgttattgtaagtcactatattgattaccaattgattttaagagaaacttttatcacg

SEQ ID NO: 35549 - protein, 223 aa, Arabidopsis thaliana
  peptide (1)..(223): Ceres Seq. ID no. 12324362
MLEQLTYFQRHIARVKRLVGEEKTDQLLAKGLSVVVAGSNDLAITYYGHGAQLLKDDIHYFTSKMANSAASFVMQLYEYGARQIAVLGTPPLGCVPILRTLKGGLRRECAQDINYASQLFNVKLSNILDQLAKNLPNSNLIYIDIYSAFSHILENSADYGFEEIKRGCCGTGFVEAGPLCNRFTTFVCSNVSAYMFWDSLHPTQRFYKILTKILFEKYIHNLN

SEQ ID NO: 35550 - protein, 214 aa, Arabidopsis thaliana
  peptide (1)..(214): Ceres Seq. ID no. 12324363
FSEIDDRCRRTMKSILIGFVFFLLSSFRSFFVTTTYSQVIHHRRLRPWPPPESGSGPSPGPSPSPHNKTTPAVFFFGDSIIDTGNNNNLTTEMKCNFSPYGKDFPLGVATGRFSNGKVVSDYISEYLGVKPIVPAYFDPNVQLEDLLTGVSFASESKVNVGAIDIFPTTHSESKEVSRGREDGSTVSQGLIRCGRRQQRFGYYILWSWCSIAQR

SEQ ID NO: 35551 - protein, 203 aa, Arabidopsis thaliana
  peptide (1)..(203): Ceres Seq. ID no. 12324364
MKSILIGFVFFLLSSFRSFFVTTTYSQVIHHRRLRPWPPPESGSGPSPGPSPSPHNKTTPAVFFFGDSIIDTGNNNNLTTEMKCNFSPYGKDFPLGVATGRFSNGKVVSDYISEYLGVKPIVPAYFDPNVQLEDLLTGVSFASESKVNVGAIDIFPTTHSESKEVSRGREDGSTVSQGLIRCGRRQQRFGYYILWSWCSIAQR

SEQ ID NO: 35552 - DNA, 1433 bp, Arabidopsis thaliana
  misc_feature (1)..(1433): Ceres Seq. ID no. 12439643
  misc_feature (1)..(1433): Ortholog of  Ceres SEQ ID NO 15169419 as cited in SEQ ID NO 58491
gtcgcatctcgattcaaagctattgataatttcgtcttcttcttccatggaataacgtgtttaggcgtgtatcacatggttctttctttgtgtgacacaaaaccaacataaagcttccatacgatttagacattgtcgatcgctattgtaagatctggtctgggtcctcgattttggtgaggattgtcgggtggaacaaaactctttcttaaaggctctgcagaaattaattctctgctctggctggatctgatagtgattttacagattgttcaggtcagaaatgggcaatccgggatcagacacagagagaaacaagggaaatgtggtctcaagtgtgtttgatcctgcactctctcgattcgttggattttcccagaaactccaaactcgtcttaagtcccagctgaagaatttgacagatgataagcatgggattggttcttcatggaggcaagataaaggaaactcatcgatctccatgcaaattgatctggagaaacagttagattgttggagggaaaacccttcgtggactgatcagatcccagtcgttaaggtgggtattccaaaaggatcgctttgcaatcttaaagccgaggtgaatgttggtttacctcctgatgcagtctataacattgtaattgaccctgacaatagaagagtcttcaagaatatcaaggaggttatgtcgcggaaagtattggtagatgacgggttaaggcaagtggtggaagttgaacaagcagctttgtggagatttctctggtggtcaggaacaatctcagttcatgtcttggtggatcaggatcgggcagatcactctatgaaattcaagcaagtgaaaagtggattcatgaagagattcgaaggaagctggcaagtaaagcctttgtttgtggatgaacatatgtgcgatcgtttgaaaccgaaaacgctggaggagtataacaggtgcactggaggtaaagggaggatcggatctaaggtaacgctggaccagctaatacagccagcgattgttccacctccgcccatttcttggtatctcagaggaatcacggctaagacgacagagatgcttatccatgacttgttggctgagaccgccaggatccgtgcagctggagtaatggaggatggtcactcgcccgatgagcaacggattggcacacctggagatataaaagaaagatggtctgcacatagaagaacatcaaggagacgacgcaatgatttgtgttaagtcacagactcacacagtccatgattctgggataatagatatcttgaggatttttggatcacccagcaatatgtgaacataatataatatttgttttcataagatacactggcatataaatgtgggaatctattccttgttgaagaagtttacaaccatgactcaatgactcatgaccattacaacc

SEQ ID NO: 35553 - protein, 320 aa, Arabidopsis thaliana
  peptide (1)..(320): Ceres Seq. ID no. 12439644
MGNPGSDTERNKGNVVSSVFDPALSRFVGFSQKLQTRLKSQLKNLTDDKHGIGSSWRQDKGNSSISMQIDLEKQLDCWRENPSWTDQIPVVKVGIPKGSLCNLKAEVNVGLPPDAVYNIVIDPDNRRVFKNIKEVMSRKVLVDDGLRQVVEVEQAALWRFLWWSGTISVHVLVDQDRADHSMKFKQVKSGFMKRFEGSWQVKPLFVDEHMCDRLKPKTLEEYNRCTGGKGRIGSKVTLDQLIQPAIVPPPPISWYLRGITAKTTEMLIHDLLAETARIRAAGVMEDGHSPDEQRIGTPGDIKERWSAHRRTSRRRRNDLC

SEQ ID NO: 35554 - protein, 254 aa, Arabidopsis thaliana
  peptide (1)..(254): Ceres Seq. ID no. 12439645
MQIDLEKQLDCWRENPSWTDQIPVVKVGIPKGSLCNLKAEVNVGLPPDAVYNIVIDPDNRRVFKNIKEVMSRKVLVDDGLRQVVEVEQAALWRFLWWSGTISVHVLVDQDRADHSMKFKQVKSGFMKRFEGSWQVKPLFVDEHMCDRLKPKTLEEYNRCTGGKGRIGSKVTLDQLIQPAIVPPPPISWYLRGITAKTTEMLIHDLLAETARIRAAGVMEDGHSPDEQRIGTPGDIKERWSAHRRTSRRRRNDLC

SEQ ID NO: 35555 - protein, 185 aa, Arabidopsis thaliana
  peptide (1)..(185): Ceres Seq. ID no. 12439646
MSRKVLVDDGLRQVVEVEQAALWRFLWWSGTISVHVLVDQDRADHSMKFKQVKSGFMKRFEGSWQVKPLFVDEHMCDRLKPKTLEEYNRCTGGKGRIGSKVTLDQLIQPAIVPPPPISWYLRGITAKTTEMLIHDLLAETARIRAAGVMEDGHSPDEQRIGTPGDIKERWSAHRRTSRRRRNDLC

SEQ ID NO: 35556 - DNA, 811 bp, Arabidopsis thaliana
  misc_feature (1)..(811): Ceres Seq. ID no. 12321167
  misc_feature (1)..(811): Ortholog of  Ceres SEQ ID NO 13599631 as cited in SEQ ID NO 0
aatctataatcattttgtgactcttggagcactctcttctctttgtctctgtgactcacatggagaagaaactgtgaagataccattgacgttgatctatgatgacatcaagagcacttacaacgatatcaaccccgggatgatcataccttacagaatcaaggttgatctgattgtggatgtgccagtattgggaagactgacattgccgctggagaaatgtggagagatcccaattccaaagaaacctgatgttgatatcgagaagattaagttccagaagttctctttggaggaaaccgtggcgattctccatgtgaggcttcagaacatgaatgatttcgacttggggctcaatgacttggactgtgaagtttggctgtgtgatgtaagcattgggaaagcagagatcgcggactcgatcaagcttgacaaaaacggaagcggattgattaatgtgccgatgacattccgaccaaaggactttggttctgcgctttgggatatgattcgtggtaaaggaacagggtacacaatcaaaggtaatattgatgttgatacaccatttggagctatgaagcttcctattatcaaggaaggtggagagacccgtctgaagaaggaagatgatgatgacgacgatgaggaataaggaaacaaagtgctgcagagacagaatggtcatagttactaaatctccgatcttgaaatgtctatttaaaattaaaaaaaaaaagaaagacttgttttgtgtgctttttgataactgatggatcagacttttgaatagagccgtctttttattggactc

SEQ ID NO: 35557 - protein, 216 aa, Arabidopsis thaliana
  peptide (1)..(216): Ceres Seq. ID no. 12321168
IYNHFVTLGALSSLCLCDSHGEETVKIPLTLIYDDIKSTYNDINPGMIIPYRIKVDLIVDVPVLGRLTLPLEKCGEIPIPKKPDVDIEKIKFQKFSLEETVAILHVRLQNMNDFDLGLNDLDCEVWLCDVSIGKAEIADSIKLDKNGSGLINVPMTFRPKDFGSALWDMIRGKGTGYTIKGNIDVDTPFGAMKLPIIKEGGETRLKKEDDDDDDEE

SEQ ID NO: 35558 - protein, 170 aa, Arabidopsis thaliana
  peptide (1)..(170): Ceres Seq. ID no. 12321169
MIIPYRIKVDLIVDVPVLGRLTLPLEKCGEIPIPKKPDVDIEKIKFQKFSLEETVAILHVRLQNMNDFDLGLNDLDCEVWLCDVSIGKAEIADSIKLDKNGSGLINVPMTFRPKDFGSALWDMIRGKGTGYTIKGNIDVDTPFGAMKLPIIKEGGETRLKKEDDDDDDEE

SEQ ID NO: 35559 - DNA, 842 bp, Arabidopsis thaliana
  misc_feature (1)..(842): Ceres Seq. ID no. 12332852
  misc_feature (1)..(842): Ortholog of  Ceres SEQ ID NO 12557915 as cited in SEQ ID NO 62
  misc_feature (1)..(842): Ortholog of  Ceres SEQ ID NO 13638917 as cited in SEQ ID NO 56018
  misc_feature (1)..(842): Ortholog of  Ceres SEQ ID NO 13663116 as cited in SEQ ID NO 60731
ctctctgtccctctctcgtaaccaaaagccgtctcagaagaaaactcaactgcgaagaatatggcgaccgatgatgtgaacgagcctctcccggcggcggcggaattaccggcgacagaggcggagaaacaaccacacaagctcgaaagaaagtggagtttctggttcgataaccaatcaaagaaaggcgccgcctggggagcttctcttcgtaaagcctatactttcgacaccgtcgaagatttttggggattgcacgagactatatttcagactagcaaattgacagcgaatgctgaaattcacttgttcaaagctggtgttgagccaaagtgggaagatccagagtgtgctaatggaggaaagtggacttgggttgttactgctaataggaaggaagctttagacaaaggctggcttgaaactttgatggctttgattggagagcaatttgatgaagcagatgagatttgtggtgtggttgctagtgtccgtccacagtcgaagcaagacaagctctccttgtggactaggacgaagtctaatgaagctgttctgatgggtattgggaagaagtggaaggagatacttgatgtcaccgacaagataactttcaataaccatgatgattccagaagaagccggttcactgtctgaagaaacgagtgtgaagccagaggaagatgcaatatggctttttttgtgatactgtttggtcggtttactcaaatagctgagacatttagggacattcactttgaggtgtaaactctacaaagttttctgtttcattaaaatgattttttgttataaattaagttgagttatataaatctctttcg

SEQ ID NO: 35560 - protein, 198 aa, Arabidopsis thaliana
  peptide (1)..(198): Ceres Seq. ID no. 12332853
MATDDVNEPLPAAAELPATEAEKQPHKLERKWSFWFDNQSKKGAAWGASLRKAYTFDTVEDFWGLHETIFQTSKLTANAEIHLFKAGVEPKWEDPECANGGKWTWVVTANRKEALDKGWLETLMALIGEQFDEADEICGVVASVRPQSKQDKLSLWTRTKSNEAVLMGIGKKWKEILDVTDKITFNNHDDSRRSRFTV

SEQ ID NO: 35561 - DNA, 1742 bp, Arabidopsis thaliana; identical to SEQ ID NO: 24563
  misc_feature (1)..(1742): Ceres Seq. ID no. 12377355
  misc_feature (1)..(1742): Ortholog of  Ceres SEQ ID NO 15170811 as cited in SEQ ID NO 52649
  misc_feature (1)..(1742): Ortholog of  Ceres SEQ ID NO 13638331 as cited in SEQ ID NO 58047
  misc_feature (1)..(1742): Ortholog of  Ceres SEQ ID NO 15225845 as cited in SEQ ID NO 65125

SEQ ID NO: 35562 - protein, 503 aa, Arabidopsis thaliana; identical to SEQ ID NO: 24564
  peptide (1)..(503): Ceres Seq. ID no. 12377356

SEQ ID NO: 35563 - protein, 393 aa, Arabidopsis thaliana; identical to SEQ ID NO: 24565
  peptide (1)..(393): Ceres Seq. ID no. 12377357

SEQ ID NO: 35564 - protein, 364 aa, Arabidopsis thaliana; identical to SEQ ID NO: 24566
  peptide (1)..(364): Ceres Seq. ID no. 12377358

SEQ ID NO: 35565 - DNA, 1188 bp, Arabidopsis thaliana
  misc_feature (1)..(1188): Ceres Seq. ID no. 12324550
  misc_feature (1)..(1188): Ortholog of  Ceres SEQ ID NO 14315162 as cited in SEQ ID NO 60005
  misc_feature (1)..(1188): Ortholog of  Ceres SEQ ID NO 15169727 as cited in SEQ ID NO 60328
  misc_feature (1)..(1188): Ortholog of  Ceres SEQ ID NO 13659881 as cited in SEQ ID NO 66938
aatctagaacaagaaaccaaaacatacaccacttctgtttttaaaggtaaaaaagatcaagaagaaaccaaagaaaatcagacagcaacaagaaaagatcagtttttaagagaaggaaagtaggaaacgggtcagattgttggatagagagaggaagcgaaaaaagagtcgcagtgttctttttccactgcgtggttttggtataatcagctgtggctacaacgaggaggcataatctaccgacgtcggattccggtgcgttcaccgactgggcggccacgacgacgacaccttcccgtgccaccgaggatctctctcttggtttcaatgctggttcctccgtcatccacggtggtttaggctcagcttcagtcgccgccggcgttccatcatggcctccgggatcttctgtccgttacggcctaccttcttcggcggcggcgacggagatgggcatggttggtctaagagatgttttccttgttgctccggcttatcaccaccagaacgccggagtgatatctggatccgatcatatgaacagtaatgcagctgcggcggcggcgctcgctgtcggagtgattcctctactcacggcgggtccaccgcagcaaaacgtggaagactccgacattaacttcctcggaaacaaccggagatggcagaataacaacaacaaccacgaaacgcagtatcttcacttcaagagtactaaccagacaacggtcggaacgagctcgaacaactcggggtctggctcaggcgcatcaggaaccgccacgtgtcaagactgtggaaatcaggcgaagaaagaatgtaagcagaggcggtgtaggacttgctgcaagagccgtggctttgattgttctactcacgtgaagagcacgtgggtctctgctgctcggcggagagagaggcaggtcatgcctaccggcgctaatccaacggctggctcgtctctttcgacctcctccgggacgaagaagccgaggatcgtagggtctcaacaacaacaacaacaacaacaacaacaacaagccacttctcatacttcaacttctaacacaccacctcaaagtttcgagaccagctccagccgacaaggtagttttacattttcattagtatacatagctacatgattttatgtatgtatatacatgcatataacactattagcccttcttg

SEQ ID NO: 35566 - protein, 230 aa, Arabidopsis thaliana
  peptide (1)..(230): Ceres Seq. ID no. 12324551
MGMVGLRDVFLVAPAYHHQNAGVISGSDHMNSNAAAAAALAVGVIPLLTAGPPQQNVEDSDINFLGNNRRWQNNNNNHETQYLHFKSTNQTTVGTSSNNSGSGSGASGTATCQDCGNQAKKECKQRRCRTCCKSRGFDCSTHVKSTWVSAARRRERQVMPTGANPTAGSSLSTSSGTKKPRIVGSQQQQQQQQQQQATSHTSTSNTPPQSFETSSSRQGSFTFSLVYIAT

SEQ ID NO: 35567 - protein, 228 aa, Arabidopsis thaliana
  peptide (1)..(228): Ceres Seq. ID no. 12324552
MVGLRDVFLVAPAYHHQNAGVISGSDHMNSNAAAAAALAVGVIPLLTAGPPQQNVEDSDINFLGNNRRWQNNNNNHETQYLHFKSTNQTTVGTSSNNSGSGSGASGTATCQDCGNQAKKECKQRRCRTCCKSRGFDCSTHVKSTWVSAARRRERQVMPTGANPTAGSSLSTSSGTKKPRIVGSQQQQQQQQQQQATSHTSTSNTPPQSFETSSSRQGSFTFSLVYIAT

SEQ ID NO: 35568 - protein, 201 aa, Arabidopsis thaliana
  peptide (1)..(201): Ceres Seq. ID no. 12324553
MNSNAAAAAALAVGVIPLLTAGPPQQNVEDSDINFLGNNRRWQNNNNNHETQYLHFKSTNQTTVGTSSNNSGSGSGASGTATCQDCGNQAKKECKQRRCRTCCKSRGFDCSTHVKSTWVSAARRRERQVMPTGANPTAGSSLSTSSGTKKPRIVGSQQQQQQQQQQQATSHTSTSNTPPQSFETSSSRQGSFTFSLVYIAT

SEQ ID NO: 35569 - DNA, 1162 bp, Arabidopsis thaliana
  misc_feature (1)..(1162): Ceres Seq. ID no. 12350405
  misc_feature (1)..(1162): Ortholog of  Ceres SEQ ID NO 14314164 as cited in SEQ ID NO 54346
  misc_feature (1)..(1162): Ortholog of  Ceres SEQ ID NO 13595066 as cited in SEQ ID NO 55849
  misc_feature (1)..(1162): Ortholog of  Ceres SEQ ID NO 13597721 as cited in SEQ ID NO 65430
  misc_feature (1)..(1162): Ortholog of  Ceres SEQ ID NO 14309100 as cited in SEQ ID NO 0
gtagcagatctgagttttggagagttcaaaggaagaagataactccaataccagaggttcgtaacgattgaaagcattcaggaaacatgcctcctcagaagattgaaactggtcatagcgacactattcatgatgtggtcatggattactatggaaagcgagtagcaactgcctcgtctgactgcacgatcaagataaccggagtaagcaacagcggtggatctcagcatctagctaccttaaccggtcatcgaggtcctgtctggcaagtcgcttgggcgcacccaaagtttggttcacttctcgcttcatgttcctatgatgggcaaattatattatggaaagaaggtaaccaaaaccaatggacacaagctcatgtcttcacagaccacaaagtatctgtcaactctatcgcttgggctcctcatgaacttggactctccttagcttgcggagcatctgatggaaacatatcagttttctcggctcgagctgatggcggttgggacacgacaaagatagaccaagcacaccctgttggtgtcacttcagtgtcgtgggcaccggccacagaaccaggcgcactcgttagctctggtatgatcgatccggtctacaaactagcatccggcgggtgtgatagcacggtgaaagtgtggaagttctcgaacgggtcatggaaaatggattgtttcccggctctcaacaagcacacggattgggtccgtgatgtggcttgggcaccgaacttgggtctcccaaagtcaaccatagccagtggttcagaagatgggaaagtgatcatatggaccatagggaaagaaggtgagcaatgggaaggtactgttttgaaagatttcaaaacaccagtgtggcgggtctcgtggtcgttgaccggtaatttgttggctgtttccgatgggaacaataacgttacagtgtggaaagagtctgttgatggagagtgggaacaagtgactgttgttgagccatagattgttgtttgtttgtttggttatcttttgttttgtggtaatatcaaaatgtggtgtgttctgtatacaatttctagggacctgtttctctctatacgtttctcaggaaagtatattcttatgtattttaatcagacaacagagattgcaaaagaaatgtatttttc

SEQ ID NO: 35570 - protein, 302 aa, Arabidopsis thaliana
  peptide (1)..(302): Ceres Seq. ID no. 12350406
MPPQKIETGHSDTIHDVVMDYYGKRVATASSDCTIKITGVSNSGGSQHLATLTGHRGPVWQVAWAHPKFGSLLASCSYDGQIILWKEGNQNQWTQAHVFTDHKVSVNSIAWAPHELGLSLACGASDGNISVFSARADGGWDTTKIDQAHPVGVTSVSWAPATEPGALVSSGMIDPVYKLASGGCDSTVKVWKFSNGSWKMDCFPALNKHTDWVRDVAWAPNLGLPKSTIASGSEDGKVIIWTIGKEGEQWEGTVLKDFKTPVWRVSWSLTGNLLAVSDGNNNVTVWKESVDGEWEQVTVVEP

SEQ ID NO: 35571 - protein, 284 aa, Arabidopsis thaliana
  peptide (1)..(284): Ceres Seq. ID no. 12350407
MDYYGKRVATASSDCTIKITGVSNSGGSQHLATLTGHRGPVWQVAWAHPKFGSLLASCSYDGQIILWKEGNQNQWTQAHVFTDHKVSVNSIAWAPHELGLSLACGASDGNISVFSARADGGWDTTKIDQAHPVGVTSVSWAPATEPGALVSSGMIDPVYKLASGGCDSTVKVWKFSNGSWKMDCFPALNKHTDWVRDVAWAPNLGLPKSTIASGSEDGKVIIWTIGKEGEQWEGTVLKDFKTPVWRVSWSLTGNLLAVSDGNNNVTVWKESVDGEWEQVTVVEP

SEQ ID NO: 35572 - DNA, 1318 bp, Arabidopsis thaliana
  misc_feature (1)..(1318): Ceres Seq. ID no. 12334532
  misc_feature (1)..(1318): Ortholog of  Ceres SEQ ID NO 15177059 as cited in SEQ ID NO 60196
aaagtaacaaaatactaattcaaaagctttataaagtttcttttctcattcggttctaaagttcctatttttcaatggattacgtgagaacccaagtcgaagctgtttttgatgattctgagcaagatggatcaaccatctctgaatctggaagctgcgattcttcttctgatcgatcttttgctgacgagcttgggcttatggagttgcttgaaggagataaagctcatgatttgatctatcgtaattgtaaatctggtcttggtgatcaatgtcagattctctctgttcttagaaacggatttaggaacgttggatctcgtgcaaagctcaagacttttcaggtttttcaagaggcggtgcagatgaaacacggtggagacggtggagctaaggtgaaatacggttggtgctctgtttcgaaacatgagcttaaaacgatttttgagtatgggtttagcgagccgctgaggaatgatggatcttttggccgtggattgtatctctcgccggataattctcctcttgattgtttgaaggattcagcttcagaatcagaagatgggatgagattcttgttgctttgtagagttctacttggaaaatcagagattgttcctcaaggctcgactagatcatgtccaagttcaccagagtttgattctggtgtggatgatttagtttctacgaagaagtatattgtgtggagtacacacatgaacactcatgttttgcctgagtttcttgtttgcatcaaagctccatttaacctaactcgaagtccaaagagattgagatcaccatggatggcatttcctgtattgatcaaagcattgtccaagtttctacctccttctcaaatacttgtcattcagaaacattacaaagatcaacaaaataggagaattacacggagcgaactaatccaacgagtcagaagcataaccggagacaagttactagttcacatcatcaaagcttgtggacataaagtacaacactaaatctccattgcagatcactttggcgtttttgtttcaaggacacaatcaccatggttgtatttgtctgtttaccaactccaaaatgatcaggactggtagagtccctttctattgttttcccatgatagtgatgaaaaaaaactgttcattagattatttaagatcgattagattagggtcttagcaacattattaatgaagagaacattaacaagttatcatcttgtttttcttttcactcttcttctttcaaaaacatttgtattattgtctggctttgagctgaagaaaatttctggtggactgagttttac

SEQ ID NO: 35573 - protein, 309 aa, Arabidopsis thaliana
  peptide (1)..(309): Ceres Seq. ID no. 12334533
MDYVRTQVEAVFDDSEQDGSTISESGSCDSSSDRSFADELGLMELLEGDKAHDLIYRNCKSGLGDQCQILSVLRNGFRNVGSRAKLKTFQVFQEAVQMKHGGDGGAKVKYGWCSVSKHELKTIFEYGFSEPLRNDGSFGRGLYLSPDNSPLDCLKDSASESEDGMRFLLLCRVLLGKSEIVPQGSTRSCPSSPEFDSGVDDLVSTKKYIVWSTHMNTHVLPEFLVCIKAPFNLTRSPKRLRSPWMAFPVLIKALSKFLPPSQILVIQKHYKDQQNRRITRSELIQRVRSITGDKLLVHIIKACGHKVQH

SEQ ID NO: 35574 - protein, 267 aa, Arabidopsis thaliana
  peptide (1)..(267): Ceres Seq. ID no. 12334534
MELLEGDKAHDLIYRNCKSGLGDQCQILSVLRNGFRNVGSRAKLKTFQVFQEAVQMKHGGDGGAKVKYGWCSVSKHELKTIFEYGFSEPLRNDGSFGRGLYLSPDNSPLDCLKDSASESEDGMRFLLLCRVLLGKSEIVPQGSTRSCPSSPEFDSGVDDLVSTKKYIVWSTHMNTHVLPEFLVCIKAPFNLTRSPKRLRSPWMAFPVLIKALSKFLPPSQILVIQKHYKDQQNRRITRSELIQRVRSITGDKLLVHIIKACGHKVQH

SEQ ID NO: 35575 - protein, 212 aa, Arabidopsis thaliana
  peptide (1)..(212): Ceres Seq. ID no. 12334535
MKHGGDGGAKVKYGWCSVSKHELKTIFEYGFSEPLRNDGSFGRGLYLSPDNSPLDCLKDSASESEDGMRFLLLCRVLLGKSEIVPQGSTRSCPSSPEFDSGVDDLVSTKKYIVWSTHMNTHVLPEFLVCIKAPFNLTRSPKRLRSPWMAFPVLIKALSKFLPPSQILVIQKHYKDQQNRRITRSELIQRVRSITGDKLLVHIIKACGHKVQH

SEQ ID NO: 35576 - DNA, 1195 bp, Arabidopsis thaliana; identical to SEQ ID NO: 28415
  misc_feature (1)..(1195): Ceres Seq. ID no. 13486843
  misc_feature (1)..(1195): Ortholog of  Ceres SEQ ID NO 12333459 as cited in SEQ ID NO 20477
  misc_feature (1)..(1195): Ortholog of  Ceres SEQ ID NO 15176155 as cited in SEQ ID NO 0

SEQ ID NO: 35577 - protein, 306 aa, Arabidopsis thaliana; identical to SEQ ID NO: 28416
  peptide (1)..(306): Ceres Seq. ID no. 13486844

SEQ ID NO: 35578 - DNA, 1335 bp, Arabidopsis thaliana
  misc_feature (1)..(1335): Ceres Seq. ID no. 13490506
  misc_feature (1)..(1335): Ortholog of  Ceres SEQ ID NO 12636774 as cited in SEQ ID NO 372
  misc_feature (1)..(1335): Ortholog of  Ceres SEQ ID NO 13582350 as cited in SEQ ID NO 56734
  misc_feature (1)..(1335): Ortholog of  Ceres SEQ ID NO 12476493 as cited in SEQ ID NO 58163
  misc_feature (1)..(1335): Ortholog of  Ceres SEQ ID NO 12615466 as cited in SEQ ID NO 62761
  misc_feature (1)..(1335): Ortholog of  Ceres SEQ ID NO 13597295 as cited in SEQ ID NO 63743
  misc_feature (1)..(1335): Ortholog of  Ceres SEQ ID NO 12617090 as cited in SEQ ID NO 64005
  misc_feature (1)..(1335): Ortholog of  Ceres SEQ ID NO 15226458 as cited in SEQ ID NO 64042
  misc_feature (1)..(1335): Ortholog of  Ceres SEQ ID NO 13597439 as cited in SEQ ID NO 64081
  misc_feature (1)..(1335): Ortholog of  Ceres SEQ ID NO 13597233 as cited in SEQ ID NO 64370
  misc_feature (1)..(1335): Ortholog of  Ceres SEQ ID NO 13598327 as cited in SEQ ID NO 68040
  misc_feature (1)..(1335): Ortholog of  Ceres SEQ ID NO 13599438 as cited in SEQ ID NO 0
aaaattacatatccgccattgtttccggcaacgcaaactaccaaaaaaaataatggaggtcgaaagagtccaagacatttcatcttcttctctactaacagaagcaatcccgttggagttcatcagatcagagaaagaacaaccagcgatcacaacattccgaggtccaacgccggcgattcccgtcgtcgatctaagcgatcccgacgaagaaagcgtgaggcgcgcggtggtgaaagcgagtgaagaatgggggctattccaagtggttaaccacgggattccgacggagctgatacgacgtttacaagacgtcggaagaaaattcttcgagcttccttcgtcggagaaagaatccgtcgctaaaccggaagattcgaaagacattgaaggatacggaacaaagcttcagaaagatccagaaggtaaaaaagcttgggtcgatcatctcttccatcgaatctggccaccgtcatgcgtcaattacagattctggcctaagaatccacctgaatacagggaggtgaatgaagagtatgcagtgcatgtgaagaagctatcggagacgttattagggattctctcggatggattagggttaaagcgtgatgcgttgaaagaaggtctcggcggagagatggcggagtatatgatgaagattaactattatccgccgtgtcctcggccggatttagctttaggtgtaccggctcatacagatctcagtggaatcactcttcttgttcctaacgaagttcctggacttcaagttttcaaagatgatcactggttcgatgcagagtatattccctccgccgtcattgttcacatcggcgatcagattctgaggttgagtaatgggaggtataaaaatgtgttgcataggacgacggtggataaagagaagacgaggatgtcgtggccggttttcttggagcctccccgtgaaaagattgttggacctttaccggaactaaccggagatgataatcctccaaagtttaaaccgtttgctttcaaggattacagttaccgcaagctcaataaacttcctctggattgagaaaaatcaatacgagaagaataatttgtggttgtggaataggaagtggttcgttattgagttgttgttttcccgcggttgtgtctcttgcttattgttattttatgtttaaaataaagattaaaacatctacctacattgtgtgtgatgttgacatgtttttattgtgttgcgatgcctttgcaagttatgtcggaccatttttaggcattggaaagagtaggtttgtattttgtaaatttttaacctgtcacggaaaaaaatcggtgatc

SEQ ID NO: 35579 - protein, 353 aa, Arabidopsis thaliana
  peptide (1)..(353): Ceres Seq. ID no. 13490507
KLHIRHCFRQRKLPKKIMEVERVQDISSSSLLTEAIPLEFIRSEKEQPAITTFRGPTPAIPVVDLSDPDEESVRRAVVKASEEWGLFQVVNHGIPTELIRRLQDVGRKFFELPSSEKESVAKPEDSKDIEGYGTKLQKDPEGKKAWVDHLFHRIWPPSCVNYRFWPKNPPEYREVNEEYAVHVKKLSETLLGILSDGLGLKRDALKEGLGGEMAEYMMKINYYPPCPRPDLALGVPAHTDLSGITLLVPNEVPGLQVFKDDHWFDAEYIPSAVIVHIGDQILRLSNGRYKNVLHRTTVDKEKTRMSWPVFLEPPREKIVGPLPELTGDDNPPKFKPFAFKDYSYRKLNKLPLD

SEQ ID NO: 35580 - protein, 336 aa, Arabidopsis thaliana
  peptide (1)..(336): Ceres Seq. ID no. 13490508
MEVERVQDISSSSLLTEAIPLEFIRSEKEQPAITTFRGPTPAIPVVDLSDPDEESVRRAVVKASEEWGLFQVVNHGIPTELIRRLQDVGRKFFELPSSEKESVAKPEDSKDIEGYGTKLQKDPEGKKAWVDHLFHRIWPPSCVNYRFWPKNPPEYREVNEEYAVHVKKLSETLLGILSDGLGLKRDALKEGLGGEMAEYMMKINYYPPCPRPDLALGVPAHTDLSGITLLVPNEVPGLQVFKDDHWFDAEYIPSAVIVHIGDQILRLSNGRYKNVLHRTTVDKEKTRMSWPVFLEPPREKIVGPLPELTGDDNPPKFKPFAFKDYSYRKLNKLPLD

SEQ ID NO: 35581 - DNA, 767 bp, Arabidopsis thaliana
  misc_feature (1)..(767): Ceres Seq. ID no. 12393433
  misc_feature (1)..(767): Ortholog of  Ceres SEQ ID NO 15171235 as cited in SEQ ID NO 52469
  misc_feature (1)..(767): Ortholog of  Ceres SEQ ID NO 15172705 as cited in SEQ ID NO 56069
  misc_feature (1)..(767): Ortholog of  Ceres SEQ ID NO 13654980 as cited in SEQ ID NO 63094
  misc_feature (1)..(767): Ortholog of  Ceres SEQ ID NO 15178542 as cited in SEQ ID NO 65410
  misc_feature (1)..(767): Ortholog of  Ceres SEQ ID NO 12589584 as cited in SEQ ID NO 0
  misc_feature (1)..(767): Ortholog of  Ceres SEQ ID NO 12635657 as cited in SEQ ID NO 0
  misc_feature (1)..(767): Ortholog of  Ceres SEQ ID NO 12635879 as cited in SEQ ID NO 0
  misc_feature (1)..(767): Ortholog of  Ceres SEQ ID NO 13599649 as cited in SEQ ID NO 0
  misc_feature (1)..(767): Ortholog of  Ceres SEQ ID NO 14309205 as cited in SEQ ID NO 0
  misc_feature (1)..(767): Ortholog of  Ceres SEQ ID NO 14309404 as cited in SEQ ID NO 0
  misc_feature (1)..(767): Ortholog of  Ceres SEQ ID NO 15177492 as cited in SEQ ID NO 0
acacaatcacagaacctaatcttcttctccaatcaatctcagagaaaaaaagaaatggcaacaaaccctaaagtctacttcgacatgaccgtcggtggcaaatccgccggtcgtatcgtgatggagctttacgccgacacaacaccagaaaccgccgagaatttcagagcactctgtaccggagagagaggaatcggtaaacaaggtaagccattacactacaaaggatcaagctttcaccgagtgattccgaaattcatgtgtcaaggaggtgatttcacagccgggaatggtaccggaggtgaatctatctatggatcgaagttcaaagacgagaactttatcaagaaacatacaggaccaggtattttgtctatggctaacgctggtgcgaacacgaatggatctcagttttttatttgtactgagaagacttcgtggctcgatgggaaacatgttgtgtttggtcaagttgttgagggattgaatgttgttagagatattgagaaggttggatctgactctggaagaacttctaagcctgttgtcattgctgattgtggtcagatttcttagatctgtctgagattgttgatgatgatgatgatgatcttgaggatccaatggtagctttgtgttgtttctctttgatgttttctggtttatgtttttggattttgatgtttattgctgttgtgaaactttgagtttggctaccattgaataagaagaatgagaataaaatcttgagatccaaatttttgttt

SEQ ID NO: 35582 - protein, 191 aa, Arabidopsis thaliana
  peptide (1)..(191): Ceres Seq. ID no. 12393434
TQSQNLIFFSNQSQRKKEMATNPKVYFDMTVGGKSAGRIVMELYADTTPETAENFRALCTGERGIGKQGKPLHYKGSSFHRVIPKFMCQGGDFTAGNGTGGESIYGSKFKDENFIKKHTGPGILSMANAGANTNGSQFFICTEKTSWLDGKHVVFGQVVEGLNVVRDIEKVGSDSGRTSKPVVIADCGQIS

SEQ ID NO: 35583 - protein, 173 aa, Arabidopsis thaliana
  peptide (1)..(173): Ceres Seq. ID no. 12393435
MATNPKVYFDMTVGGKSAGRIVMELYADTTPETAENFRALCTGERGIGKQGKPLHYKGSSFHRVIPKFMCQGGDFTAGNGTGGESIYGSKFKDENFIKKHTGPGILSMANAGANTNGSQFFICTEKTSWLDGKHVVFGQVVEGLNVVRDIEKVGSDSGRTSKPVVIADCGQIS

SEQ ID NO: 35584 - protein, 163 aa, Arabidopsis thaliana
  peptide (1)..(163): Ceres Seq. ID no. 12393436
MTVGGKSAGRIVMELYADTTPETAENFRALCTGERGIGKQGKPLHYKGSSFHRVIPKFMCQGGDFTAGNGTGGESIYGSKFKDENFIKKHTGPGILSMANAGANTNGSQFFICTEKTSWLDGKHVVFGQVVEGLNVVRDIEKVGSDSGRTSKPVVIADCGQIS

SEQ ID NO: 35585 - DNA, 953 bp, Arabidopsis thaliana
  misc_feature (1)..(953): Ceres Seq. ID no. 12680745
  misc_feature (1)..(953): Ortholog of  Ceres SEQ ID NO 14313644 as cited in SEQ ID NO 54334
ctctctcacacacccatagtcgtcttcctcgatcagtctctctctcaaattgcaaaggtttcttcgaggactttggcatactgcaggttgttggagctgtagtgcttaaaaaccctacctttatactgtttagagcagcagtccctccatgtcaggtcttgtggcgttatgcagagctcgagcttctgcttcgtcttctttattcaacagcgttattcgtccagcatttcgcaatttctctacaggttttgctgatacacagaacaaatcattggtagcacaaatgaaagaagagatgctccacatggacatcaactcaatgataggaagttccatgccactaggtatgatgcgtatcggaacaatcatccacaacatcgagatgaacccagggcaaggcgcaaagatggtccgagctgcaggaaccaacgccaagatcctaaaggagcctgctaaagggaaatgcttgataaagcttccgtcaggggacaccaagtggatcaatgccaaatgtcgtgctacgattggcacagtgtcgaacccgtctcatggaacgaagaagctatataaagcaggacagagtaggtggttagggataaggcccaaagttagaggagtggcgatgaatccgtgtgatcatccacacggtggaggtgaaggaaaaagcaaaagtagtggaagcagaggaaggacatcggttagtccgtggggaaaaccgtgtaaaggcggttacaaatcagctagtgtcaagaagaagaagaagcgtttggcagaagcagcagccaaaatgtgatatgggtgaacaagtttcgattttcttcaaacgtttctttcttttaaaaagcctccaatgttatttggttacgttattgaatctgttttttgagagttttttaggcttcatgaaactagaagatctttgatcagttgagaataaatatggttacgtgttt

SEQ ID NO: 35586 - protein, 214 aa, Arabidopsis thaliana; identical to SEQ ID NO: 35519
  peptide (1)..(214): Ceres Seq. ID no. 12680746

SEQ ID NO: 35587 - protein, 169 aa, Arabidopsis thaliana; identical to SEQ ID NO: 35520
  peptide (1)..(169): Ceres Seq. ID no. 12680747

SEQ ID NO: 35588 - protein, 165 aa, Arabidopsis thaliana; identical to SEQ ID NO: 35521
  peptide (1)..(165): Ceres Seq. ID no. 12680748

SEQ ID NO: 35589 - DNA, 641 bp, Arabidopsis thaliana
  misc_feature (1)..(641): Ceres Seq. ID no. 12332271
  misc_feature (1)..(641): Ortholog of  Ceres SEQ ID NO 15173118 as cited in SEQ ID NO 62952
  misc_feature (1)..(641): Ortholog of  Ceres SEQ ID NO 15180067 as cited in SEQ ID NO 0
acgattagaatatgagtagtgcaacgcaaaataacactgccgtttaagacgacggtcccttgacagaatcttcatcaacgctcgatttgacgtctgccgatttccttagctccgacgtaaaccactgatcgtcggtattcagctatattttgatttctcagctccaaaaattcccaacgaaatggagaaaatggccaaaggatggttttcgatgagcggcactagtagcagcggagatcagcagcagcaaccgctgcaaacaggaggaacgtctctgctagctgattggaattcttacgcagcatcgagagattttgaagaagacaccggaactttaggcttcgatatcgaatccgccgttagatctgccaacgacactgtttccggcacctttaatgttgtttcgaaaggagttagagataacctgcagtctgcaacaagtagtatgccttcaggaaaagctttgatgtatttcggtttacttctagcaagtggtgtattcttcatcttcattgccttcaccatgtttcttccagtcatggtgcttatgccacagaagtttgcaatttgttttacccttggatgtggatttatcatcggatctttcttcgctcttcgtggcccgcaaaatcaactcgctc

SEQ ID NO: 35590 - protein, 153 aa, Arabidopsis thaliana
  peptide (1)..(153): Ceres Seq. ID no. 12332272
MEKMAKGWFSMSGTSSSGDQQQQPLQTGGTSLLADWNSYAASRDFEEDTGTLGFDIESAVRSANDTVSGTFNVVSKGVRDNLQSATSSMPSGKALMYFGLLLASGVFFIFIAFTMFLPVMVLMPQKFAICFTLGCGFIIGSFFALRGPQNQLA

SEQ ID NO: 35591 - protein, 150 aa, Arabidopsis thaliana
  peptide (1)..(150): Ceres Seq. ID no. 12332273
MAKGWFSMSGTSSSGDQQQQPLQTGGTSLLADWNSYAASRDFEEDTGTLGFDIESAVRSANDTVSGTFNVVSKGVRDNLQSATSSMPSGKALMYFGLLLASGVFFIFIAFTMFLPVMVLMPQKFAICFTLGCGFIIGSFFALRGPQNQLA

SEQ ID NO: 35592 - protein, 143 aa, Arabidopsis thaliana
  peptide (1)..(143): Ceres Seq. ID no. 12332274
MSGTSSSGDQQQQPLQTGGTSLLADWNSYAASRDFEEDTGTLGFDIESAVRSANDTVSGTFNVVSKGVRDNLQSATSSMPSGKALMYFGLLLASGVFFIFIAFTMFLPVMVLMPQKFAICFTLGCGFIIGSFFALRGPQNQLA

SEQ ID NO: 35593 - DNA, 806 bp, Arabidopsis thaliana
  misc_feature (1)..(806): Ceres Seq. ID no. 12323510
  misc_feature (1)..(806): Ortholog of  Ceres SEQ ID NO 13594870 as cited in SEQ ID NO 51929
  misc_feature (1)..(806): Ortholog of  Ceres SEQ ID NO 12610679 as cited in SEQ ID NO 56077
  misc_feature (1)..(806): Ortholog of  Ceres SEQ ID NO 12635481 as cited in SEQ ID NO 0
atatcgcatctaaagccccccccaaaaaaaaaatcctattacacactcatacgctctctcgtcaaacaaaaaaaaaaaacctaaagaaacttcgacatgaaaggcggcgaatccaaagctgaagcaacgagcactgatcagagactcaaaaccagaggtagaaaggctgggaagaagacgaagaaggatccaaatcaacctaagagacctccaagtgctttcttcgtcttccttgaggatttccgaaaagagtttaacctagcgaatcctaataacaaatccgtcgctactgttggtaaggctgctggagctagatggaaggcaatgactgatgaagataaagctccttacgtcgctaaggctgagagcagaaagactgaatatattaagaatgtgcaacagtacaacttgaaactggctagtggaaccaatagagaagaggatgactctgacaaatccaagtctgaagttgatgaagcagtaagcgaagaggaggcagaagacgacgattgaagcatctaggtcttgctattgacttgactcagatttgagaatgtaaacttgcttaggtttatgaccaaaaacttttaaaaaactcttatttatgctttgtgtttgtgatatttgaacctcatttgctacatcaatgttgttttaggtcagtctgtagggataatatcacttgactgctatatttcccctatttccttatgttttactagtattcatatgttcttcaactttgtatgagttttagtatcagttttatttctacttatgcttatttgttgacttctgtttctacc

SEQ ID NO: 35594 - protein, 138 aa, Arabidopsis thaliana
  peptide (1)..(138): Ceres Seq. ID no. 12323511
MKGGESKAEATSTDQRLKTRGRKAGKKTKKDPNQPKRPPSAFFVFLEDFRKEFNLANPNNKSVATVGKAAGARWKAMTDEDKAPYVAKAESRKTEYIKNVQQYNLKLASGTNREEDDSDKSKSEVDEAVSEEEAEDDD

SEQ ID NO: 35595 - DNA, 896 bp, Arabidopsis thaliana
  misc_feature (1)..(896): Ceres Seq. ID no. 12332275
  misc_feature (1)..(896): Ortholog of  Ceres SEQ ID NO 13589868 as cited in SEQ ID NO 55521
  misc_feature (1)..(896): Ortholog of  Ceres SEQ ID NO 12617659 as cited in SEQ ID NO 65286
  misc_feature (1)..(896): Ortholog of  Ceres SEQ ID NO 12780566 as cited in SEQ ID NO 65822
gacattgtttcccgcatacttttcttcttcttcttctctccacccatctgctttaaggaaggaacctcaaaagcttacaaaatagtagaagaagaactttttttgatctccgattcttacctctgcaatcttcagattctagctgattcaaggatcttgtttgtgatagaaattggaggagatgggagcattcatgtcgaggttttggttcatgatgtttcctgcaaaagagtataagattgttgttgttggtttggataatgctggtaaaacgacgacgctttataaacttcatttgggtgaagttgttactactcatcctactgttggtagcaatgttgaagagcttgtctacaagaatattcgctttgaggtatgggatcttggtgggcaagataggctaagaacttcatgggcaacatactatcgtggaacacatgctgtgattgtggttatagatagcacagacagagccagaatctctttcatgaaagatgagctagccaggttacttggtcatgaggatcttcaaaactcggtcatactagtttttgcaaacaaacaggatctgaaagacgcaatgactcctgctgagatcacggatgcacttaaccttcacagtatcaagaaccatgattggcatattcaagcaagttgtgcggttactggagaaggattgtatgatgggctcggttggattgcccaaaaagttaccggtaaagccacgagttaaggggaaaccagaactgaatcagagagagtacgtactattcttctttgtttcttttgtctccttcatatgttctttaacattgtatcctcttgacttttatgtaacaagcttcaactattttggttgctctcattgaaactgtgtccagaattttcatatatgg

SEQ ID NO: 35596 - protein, 183 aa, Arabidopsis thaliana
  peptide (1)..(183): Ceres Seq. ID no. 12332276
MGAFMSRFWFMMFPAKEYKIVVVGLDNAGKTTTLYKLHLGEVVTTHPTVGSNVEELVYKNIRFEVWDLGGQDRLRTSWATYYRGTHAVIVVIDSTDRARISFMKDELARLLGHEDLQNSVILVFANKQDLKDAMTPAEITDALNLHSIKNHDWHIQASCAVTGEGLYDGLGWIAQKVTGKATS

SEQ ID NO: 35597 - protein, 179 aa, Arabidopsis thaliana
  peptide (1)..(179): Ceres Seq. ID no. 12332277
MSRFWFMMFPAKEYKIVVVGLDNAGKTTTLYKLHLGEVVTTHPTVGSNVEELVYKNIRFEVWDLGGQDRLRTSWATYYRGTHAVIVVIDSTDRARISFMKDELARLLGHEDLQNSVILVFANKQDLKDAMTPAEITDALNLHSIKNHDWHIQASCAVTGEGLYDGLGWIAQKVTGKATS

SEQ ID NO: 35598 - protein, 173 aa, Arabidopsis thaliana
  peptide (1)..(173): Ceres Seq. ID no. 12332278
MMFPAKEYKIVVVGLDNAGKTTTLYKLHLGEVVTTHPTVGSNVEELVYKNIRFEVWDLGGQDRLRTSWATYYRGTHAVIVVIDSTDRARISFMKDELARLLGHEDLQNSVILVFANKQDLKDAMTPAEITDALNLHSIKNHDWHIQASCAVTGEGLYDGLGWIAQKVTGKATS

SEQ ID NO: 35599 - DNA, 831 bp, Arabidopsis thaliana
  misc_feature (1)..(831): Ceres Seq. ID no. 12562523
  misc_feature (1)..(831): Ortholog of  Ceres SEQ ID NO 13594220 as cited in SEQ ID NO 57121
  misc_feature (1)..(831): Ortholog of  Ceres SEQ ID NO 12638425 as cited in SEQ ID NO 0
ctccgtaaacctgttattctcggagaaacgttgagagagggttttccattctctgtggccgtcaccgtcgccgtgaaatagctctcctctctctatctccgattatataactgcaagctcaaaggaattgtttgttgttaaaatgtttcttacgcgatttgtcgggaggagattcttggcggctgcatcggcgcgatcggagtccactacagcagcagcagctgcctcgacgattcggacgccaacaaatccactcgaagagttctttgagttcgacagaagccaagacgaagataaacctgttgtctatggtcgaggttggaaagcttcagagctgcgtctcaagtcatgggatgatcttcagaagctgtggtacgttcttctcaaagagaaaaacatgttgatgactcagcgtcagatgcttcaggctcagaacatgcagtttcctaaccctgaacgcattccaaaggtgaggagatcaatgtgccgcattaagcatgtgctgaccgagagagcgattgaagaaccagattctagaagatcagccgagatgaagagaatggtaaatggtatgtgatcccattggctcttgttttggcaacctagcagtaagcacgagtcaatccgcagaggtgttgagtttttcggagtaagaaataacgcatagctttcaagactttggaactggtccaatgattgtgactgtagtagtgtcggcagtagaaaaacgtttggttggtatctgtacgcacatttctgtaacttatggttgatgtttctttttgagacacatgttggtcagtgttgattcagagctttgtctttctctcc

SEQ ID NO: 35600 - protein, 144 aa, Arabidopsis thaliana
  peptide (1)..(144): Ceres Seq. ID no. 12562524
MFLTRFVGRRFLAAASARSESTTAAAAASTIRTPTNPLEEFFEFDRSQDEDKPVVYGRGWKASELRLKSWDDLQKLWYVLLKEKNMLMTQRQMLQAQNMQFPNPERIPKVRRSMCRIKHVLTERAIEEPDSRRSAEMKRMVNGM

SEQ ID NO: 35601 - DNA, 1359 bp, Arabidopsis thaliana
  misc_feature (1)..(1359): Ceres Seq. ID no. 12602450
  misc_feature (1)..(1359): Ortholog of  Ceres SEQ ID NO 15171297 as cited in SEQ ID NO 51458
gtattcctcgtgagcactaacttctcactcattcttcttcttcagctgaatccaaatacccatttccatttttaaccgtggttggattgttttgagagttgaaggaagaagatgacgtctgacggagcaacgtcgacgtcagctgcagctgcagcagcagcgatggcgacgaggaggaaaccgtcgtggagagagagggagaacaatcggagaagagagcggcggagaagagctgttgcggcgaagatttatactggtcttagagctcaaggtaactacaatcttccaaaacattgtgacaacaatgaggttcttaaggctctttgttctgaagctggttgggttgttgaagaagacggaactacttatcgcaagggacacaagcctctacctggtgacatggctggatcatcttctcgagcaactccttactcttcccataaccaaagtcctctttcttccacttttgatagccccatcttatcttaccaagtcagtccttcctcttcttcattcccgagtccttctcgagttggtgatccacacaatatctccacaatcttccctttcctcaggaatggtggtattccttcatcgcttcctccacttagaatctcaaacagtgctcctgtcactccaccagtgtcatccccaacttctagaaactccaaaccattgcctacttgggaatcttttaccaaacaatccatgtccatggctgctaaacagtcaatgacttctttgaactacccgttttatgcggtgtctgcacctgccagtcctactcatcatcgccagttccatgctccggctactatacctgaatgtgatgagtctgactcttccactgttgattctggtcattggataagctttcaaaagtttgcacaacaacagccattctctgcctctatggtgccaacctcgcctaccttcaatctcgtgaaacctgcaccacagcaattgtctccaaacacagcagcaatccaagagattggtcaaagctccgagtttaagtttgagaacagccaagttaagccatgggaaggggagaggatccatgatgtggctatggaggatctagagctcacgcttggaaatggtaaagctcatagttgagatgaagtatacatgaacctgttatgtcatgtcggaaggaaggattggagaatgagaattagtgtgttgttcattcagttcatggttttggttcttgttctagaatcgatattcattgtaccagtgagtttgtttcacaacgcattatttgtagatagaatgtttaagatgtatgtttctattatcattccttttaggtcttgaaaacattacaaatatattacatgattaagtggcttc

SEQ ID NO: 35602 - protein, 335 aa, Arabidopsis thaliana
  peptide (1)..(335): Ceres Seq. ID no. 12602451
MTSDGATSTSAAAAAAAMATRRKPSWRERENNRRRERRRRAVAAKIYTGLRAQGNYNLPKHCDNNEVLKALCSEAGWVVEEDGTTYRKGHKPLPGDMAGSSSRATPYSSHNQSPLSSTFDSPILSYQVSPSSSSFPSPSRVGDPHNISTIFPFLRNGGIPSSLPPLRISNSAPVTPPVSSPTSRNSKPLPTWESFTKQSMSMAAKQSMTSLNYPFYAVSAPASPTHHRQFHAPATIPECDESDSSTVDSGHWISFQKFAQQQPFSASMVPTSPTFNLVKPAPQQLSPNTAAIQEIGQSSEFKFENSQVKPWEGERIHDVAMEDLELTLGNGKAHS

SEQ ID NO: 35603 - protein, 318 aa, Arabidopsis thaliana
  peptide (1)..(318): Ceres Seq. ID no. 12602452
MATRRKPSWRERENNRRRERRRRAVAAKIYTGLRAQGNYNLPKHCDNNEVLKALCSEAGWVVEEDGTTYRKGHKPLPGDMAGSSSRATPYSSHNQSPLSSTFDSPILSYQVSPSSSSFPSPSRVGDPHNISTIFPFLRNGGIPSSLPPLRISNSAPVTPPVSSPTSRNSKPLPTWESFTKQSMSMAAKQSMTSLNYPFYAVSAPASPTHHRQFHAPATIPECDESDSSTVDSGHWISFQKFAQQQPFSASMVPTSPTFNLVKPAPQQLSPNTAAIQEIGQSSEFKFENSQVKPWEGERIHDVAMEDLELTLGNGKAHS

SEQ ID NO: 35604 - protein, 239 aa, Arabidopsis thaliana
  peptide (1)..(239): Ceres Seq. ID no. 12602453
MAGSSSRATPYSSHNQSPLSSTFDSPILSYQVSPSSSSFPSPSRVGDPHNISTIFPFLRNGGIPSSLPPLRISNSAPVTPPVSSPTSRNSKPLPTWESFTKQSMSMAAKQSMTSLNYPFYAVSAPASPTHHRQFHAPATIPECDESDSSTVDSGHWISFQKFAQQQPFSASMVPTSPTFNLVKPAPQQLSPNTAAIQEIGQSSEFKFENSQVKPWEGERIHDVAMEDLELTLGNGKAHS

SEQ ID NO: 35605 - DNA, 984 bp, Arabidopsis thaliana
  misc_feature (1)..(984): Ceres Seq. ID no. 12370505
  misc_feature (1)..(984): Ortholog of  Ceres SEQ ID NO 13597821 as cited in SEQ ID NO 64462
  misc_feature (1)..(984): Ortholog of  Ceres SEQ ID NO 12618069 as cited in SEQ ID NO 65387
agagctcaagagaagtaaagaaactgcgacaagagaaagaagattgactttggagaagagaggagtaacgatggaagatattcataatctcgatatagagaaaagtgatagatcgatttggttgatgaagtgtcctgtagttgtagacaaggcatggcacaagatagcagcttcgtcgtcttcttcttttgcttcctcggattctcctcccgacatggcaaagattgttcgcgaagttgatcctctacgggacgattctccccccgagttcaaaatgtatatggttggtgctgagtatgggaacatgccaaagtgctacgctttgaacatgttcacagactttgttccgatggggggcttttccgatgttaatcaaggttgtgcagctgctgaaggaaaggttgatcacaaattcgatatgaagccatatggtgaaaccattgaagaatatgctaggctttgtcgtgagagaacgagcaaagccatggttaaaaatcgacagattcaggttattgataatgaccgcggagttcatatgaggcccatgcctggaatgcttggtttagtttcctccaattccaaggaaaagaggaaacctcccccagtcaagcaaaccgaggtgaagaggacgaggagagatcgtggtgagcttgaagctataatgttcaagctatttgaaggccagcctaactggacattgaagcagcttgtacaagagacggaccagccagctcagttcctgaaagaaatactaaacgagctgtgcgtgtacaataagagaggatcgaaccaagggacatatgagcttaaacctgaatacaagaaatctgctgaagatgatacaggtgggcagtgaaatcaaccccttgtgtaattcactattatatacatgtgacatagtcataacattattataaaccctgagtcattattcatcagaagaaaaaaacaaaaaaaaaaaaaaaaaaaaaaaaaaaaaaacaa

SEQ ID NO: 35606 - protein, 284 aa, Arabidopsis thaliana
  peptide (1)..(284): Ceres Seq. ID no. 12370506
ELKRSKETATRERRLTLEKRGVTMEDIHNLDIEKSDRSIWLMKCPVVVDKAWHKIAASSSSSFASSDSPPDMAKIVREVDPLRDDSPPEFKMYMVGAEYGNMPKCYALNMFTDFVPMGGFSDVNQGCAAAEGKVDHKFDMKPYGETIEEYARLCRERTSKAMVKNRQIQVIDNDRGVHMRPMPGMLGLVSSNSKEKRKPPPVKQTEVKRTRRDRGELEAIMFKLFEGQPNWTLKQLVQETDQPAQFLKEILNELCVYNKRGSNQGTYELKPEYKKSAEDDTGGQ

SEQ ID NO: 35607 - protein, 261 aa, Arabidopsis thaliana
  peptide (1)..(261): Ceres Seq. ID no. 12370507
MEDIHNLDIEKSDRSIWLMKCPVVVDKAWHKIAASSSSSFASSDSPPDMAKIVREVDPLRDDSPPEFKMYMVGAEYGNMPKCYALNMFTDFVPMGGFSDVNQGCAAAEGKVDHKFDMKPYGETIEEYARLCRERTSKAMVKNRQIQVIDNDRGVHMRPMPGMLGLVSSNSKEKRKPPPVKQTEVKRTRRDRGELEAIMFKLFEGQPNWTLKQLVQETDQPAQFLKEILNELCVYNKRGSNQGTYELKPEYKKSAEDDTGGQ

SEQ ID NO: 35608 - protein, 243 aa, Arabidopsis thaliana
  peptide (1)..(243): Ceres Seq. ID no. 12370508
MKCPVVVDKAWHKIAASSSSSFASSDSPPDMAKIVREVDPLRDDSPPEFKMYMVGAEYGNMPKCYALNMFTDFVPMGGFSDVNQGCAAAEGKVDHKFDMKPYGETIEEYARLCRERTSKAMVKNRQIQVIDNDRGVHMRPMPGMLGLVSSNSKEKRKPPPVKQTEVKRTRRDRGELEAIMFKLFEGQPNWTLKQLVQETDQPAQFLKEILNELCVYNKRGSNQGTYELKPEYKKSAEDDTGGQ

SEQ ID NO: 35609 - DNA, 1122 bp, Arabidopsis thaliana
  misc_feature (1)..(1122): Ceres Seq. ID no. 12394435
  misc_feature (1)..(1122): Ortholog of  Ceres SEQ ID NO 12614670 as cited in SEQ ID NO 68565
caagattgagataagcaaagagttccataaactgaccgctgacattatagcaactactgcgtttggaagtagttatgccgaaggaatcgaattgtgtaggtcacaaacagagcttgagaagtattatattagttctctcactaacgttttcatccccggaactcaataccttcctacgcctaccaaccttaaactatgggagctccataagaaagtgaagaactcgatcaaaagaatcatagattcaaggctaaaatcaaaatgtaagacctatggctatggggacgatcttctaggggtcatgttgactgctgcgaaatctaacgagtatgagagaaagatgagaatggatgagatcatagaggaatgcaagaatttctactatgcagggcaaggaactacttcgattctattgacatggactacgatgttactaagcttgcaccaaggttggcaagagaaactcagagaagaggtttttaatgaatgtggtaaagataaaatcccagatacagacaccttctctaaactcaaattgatgaacatggtgttgatggagtcgcttcgtctgtacggacccgtgattaaaatttcccgagaggcaacacaagatatgaaggtaggacacttggagatcccaaagggcacaagcattatcataccgttactgaagatgcacagagacaaggccatatggggcgaagacgccgaacaattcaatcccttgagattcgaaaacggcatttctcaagccaccattcacccaaacgctctcctcccgttctcaatcggaccaagagcttgcattgccaaaaactttgccatggtcgaagccaagaccgttctcactatgatccttcaacagttccagcttagcctctcccccgagtataagcacacgccagttgatcacttcgatctcttcccgcaatacggcctacccgtaatgcttcaccctctcggatagtagttctgaatggtgaggaagagaaaaccaagaatctcaacggatatttggtcacgttatgttctatatttggccttggtcacaaataaagttcagatgatataattcaatagtggataagtcaaattcaaagtgaagtaaggaataaaaatctg

SEQ ID NO: 35610 - protein, 321 aa, Arabidopsis thaliana
  peptide (1)..(321): Ceres Seq. ID no. 12394436
KIEISKEFHKLTADIIATTAFGSSYAEGIELCRSQTELEKYYISSLTNVFIPGTQYLPTPTNLKLWELHKKVKNSIKRIIDSRLKSKCKTYGYGDDLLGVMLTAAKSNEYERKMRMDEIIEECKNFYYAGQGTTSILLTWTTMLLSLHQGWQEKLREEVFNECGKDKIPDTDTFSKLKLMNMVLMESLRLYGPVIKISREATQDMKVGHLEIPKGTSIIIPLLKMHRDKAIWGEDAEQFNPLRFENGISQATIHPNALLPFSIGPRACIAKNFAMVEAKTVLTMILQQFQLSLSPEYKHTPVDHFDLFPQYGLPVMLHPLG

SEQ ID NO: 35611 - protein, 221 aa, Arabidopsis thaliana
  peptide (1)..(221): Ceres Seq. ID no. 12394437
MLTAAKSNEYERKMRMDEIIEECKNFYYAGQGTTSILLTWTTMLLSLHQGWQEKLREEVFNECGKDKIPDTDTFSKLKLMNMVLMESLRLYGPVIKISREATQDMKVGHLEIPKGTSIIIPLLKMHRDKAIWGEDAEQFNPLRFENGISQATIHPNALLPFSIGPRACIAKNFAMVEAKTVLTMILQQFQLSLSPEYKHTPVDHFDLFPQYGLPVMLHPLG

SEQ ID NO: 35612 - protein, 208 aa, Arabidopsis thaliana
  peptide (1)..(208): Ceres Seq. ID no. 12394438
MRMDEIIEECKNFYYAGQGTTSILLTWTTMLLSLHQGWQEKLREEVFNECGKDKIPDTDTFSKLKLMNMVLMESLRLYGPVIKISREATQDMKVGHLEIPKGTSIIIPLLKMHRDKAIWGEDAEQFNPLRFENGISQATIHPNALLPFSIGPRACIAKNFAMVEAKTVLTMILQQFQLSLSPEYKHTPVDHFDLFPQYGLPVMLHPLG

SEQ ID NO: 35613 - DNA, 1045 bp, Arabidopsis thaliana
  misc_feature (1)..(1045): Ceres Seq. ID no. 13488473
  misc_feature (1)..(1045): Ortholog of  Ceres SEQ ID NO 12557432 as cited in SEQ ID NO 92
  misc_feature (1)..(1045): Ortholog of  Ceres SEQ ID NO 14305097 as cited in SEQ ID NO 0
aaaaagcttttgaagaacagaggaacaagaagaagaaagatgttcaggaaccagtacgacacagatgtgacaacatggagtcccacaggtcgactattccaagtcgaatacgccatggaagctgtgaaacaaggctccgcagcaataggactcagatctcgctctcatgtcgtcctcgcttgtgtcaacaaagcacaatcagagctctcttctcatcaaaggaagatctttaaagtcgatgatcatattggtgttgctattgctggtctcactgctgatggtcgtgttctctctcgatatatgagatctgagtctattaatcactcttttacttatgagtctcctcttcctgttggtcgtcttgttgttcatcttgctgataaagctcaggtatgtacccaacgatcatggaaacggccttatggtgtgggtttgctggtaggtggattggacgagtcaggagctcacctctactacaactgccctagcggaaactactttgaatatcaagcattcgctatcgggtctcgttcacaagctgcgaaaacctatctggagcgcaaattcgagagcttccaagaatcatcaaaagaagatctgataaaagatgctattatggccataagggaaactttgcaaggggaaacactgaagagctcgctctgcactgtttctgttctaggagtcgatgaaccattccatttcttggaccaggaaagcattcaaaaggtgattgatacgtttgagaaggttcctgaggaagaggaagatgctggtgagggtgaggccgaacccgaagctgctcctggtgctgctggaactggtgaacaaggtggttcaggtgatcaagatgttgcaccaatggaaatttgagcaagagggaatgagttcaaagttggattttctaaccaactttcttgtgtttagctctttgatgtgttccaacttccaagtattgttgttttaactcagctttgtttattttaacagcttgcaacaatgagttattgagtgccactagcttatatttagtcatacttaagtt

SEQ ID NO: 35614 - protein, 290 aa, Arabidopsis thaliana
  peptide (1)..(290): Ceres Seq. ID no. 13488474
KKLLKNRGTRRRKMFRNQYDTDVTTWSPTGRLFQVEYAMEAVKQGSAAIGLRSRSHVVLACVNKAQSELSSHQRKIFKVDDHIGVAIAGLTADGRVLSRYMRSESINHSFTYESPLPVGRLVVHLADKAQVCTQRSWKRPYGVGLLVGGLDESGAHLYYNCPSGNYFEYQAFAIGSRSQAAKTYLERKFESFQESSKEDLIKDAIMAIRETLQGETLKSSLCTVSVLGVDEPFHFLDQESIQKVIDTFEKVPEEEEDAGEGEAEPEAAPGAAGTGEQGGSGDQDVAPMEI

SEQ ID NO: 35615 - protein, 277 aa, Arabidopsis thaliana
  peptide (1)..(277): Ceres Seq. ID no. 13488475
MFRNQYDTDVTTWSPTGRLFQVEYAMEAVKQGSAAIGLRSRSHVVLACVNKAQSELSSHQRKIFKVDDHIGVAIAGLTADGRVLSRYMRSESINHSFTYESPLPVGRLVVHLADKAQVCTQRSWKRPYGVGLLVGGLDESGAHLYYNCPSGNYFEYQAFAIGSRSQAAKTYLERKFESFQESSKEDLIKDAIMAIRETLQGETLKSSLCTVSVLGVDEPFHFLDQESIQKVIDTFEKVPEEEEDAGEGEAEPEAAPGAAGTGEQGGSGDQDVAPMEI

SEQ ID NO: 35616 - protein, 252 aa, Arabidopsis thaliana
  peptide (1)..(252): Ceres Seq. ID no. 13488476
MEAVKQGSAAIGLRSRSHVVLACVNKAQSELSSHQRKIFKVDDHIGVAIAGLTADGRVLSRYMRSESINHSFTYESPLPVGRLVVHLADKAQVCTQRSWKRPYGVGLLVGGLDESGAHLYYNCPSGNYFEYQAFAIGSRSQAAKTYLERKFESFQESSKEDLIKDAIMAIRETLQGETLKSSLCTVSVLGVDEPFHFLDQESIQKVIDTFEKVPEEEEDAGEGEAEPEAAPGAAGTGEQGGSGDQDVAPMEI

SEQ ID NO: 35617 - DNA, 1354 bp, Arabidopsis thaliana
  misc_feature (1)..(1354): Ceres Seq. ID no. 13486811
  misc_feature (1)..(1354): Ortholog of  Ceres SEQ ID NO 15225493 as cited in SEQ ID NO 65438
  misc_feature (1)..(1354): Ortholog of  Ceres SEQ ID NO 14313344 as cited in SEQ ID NO 69148
tgggacaagaactgatagagtgggataagagacaaataaggagaatcaaacaagcaatccgatcgatctaccagatcgccatgattcttacaagatgcttacccttgatatggctatctctacttactgtgtgtgctgctgggaggacattgcaccctctccctgttaaaggacccaaaactgtcaagcttcaacttcagacttcacgtccttataacatcgcacacagaggttccaatggagagatcccagaagaaactacagctgcatacttgaaagcaattgaagaaggcacagacttcatagaaacagatatcttatcatccaaagatggtgtgctcatatgtttccatgattgtattctcgacgaaacaaccaatgttgcgagccacaaggagtttgcagatcgtaaaaggacatatgatgtccaaggattcaacattactggctttttcacttttgattttacacttaaagaactaaagcaactacgtataaagcagcgatatgcttttcgggatcagcaatacaacggaatgtaccctatcattacatttgaggaatttcttaccattgctcgggatgctccaagagttgttggaatatatcctgagattaaaaatccagttttaatgaaccagcatgtcaaatggcctggtggtaagaaatttgaggataaagttgtggagacacttaagaagtatgggtatggaggctcgtatttgtccaagaagtggttgaaaaaaccactatttattcagtcatttgccccaacttcactcgtgtacatatcaaacttgacagactcgccgaaagtccttctaatagacgatgttaccatgccaacgcaagacactaaccagacatatgcagagatcacatcagatgcgtatttcgaatacatcaagcaatatgttgtgggtatcggaccatggaaggatacaattgttccggtaaacaacaactatgtgctagcccccacagatttggtcaaaagagctcacgcacacaatctgcaggtgcatccctatacgtacaggaatgaacacgaattcttacactataactttagccaagacccgtataaggagtacgactactggatcaatgagattggagttgatggactcttcactgatttcacaggcagcctccataactttcaagaatggacatctccattacctgatacctccaagtctccacgacagcttcttagtcaaattgcctcattggtcctcccttatgcaaaggcttgaagttccacataaacacctatcagtaatcctattgtttgcaattaattgtattgaataaagttacaatgattattctgaagaagaacacagttgtc

SEQ ID NO: 35618 - protein, 418 aa, Arabidopsis thaliana
  peptide (1)..(418): Ceres Seq. ID no. 13486812
GQELIEWDKRQIRRIKQAIRSIYQIAMILTRCLPLIWLSLLTVCAAGRTLHPLPVKGPKTVKLQLQTSRPYNIAHRGSNGEIPEETTAAYLKAIEEGTDFIETDILSSKDGVLICFHDCILDETTNVASHKEFADRKRTYDVQGFNITGFFTFDFTLKELKQLRIKQRYAFRDQQYNGMYPIITFEEFLTIARDAPRVVGIYPEIKNPVLMNQHVKWPGGKKFEDKVVETLKKYGYGGSYLSKKWLKKPLFIQSFAPTSLVYISNLTDSPKVLLIDDVTMPTQDTNQTYAEITSDAYFEYIKQYVVGIGPWKDTIVPVNNNYVLAPTDLVKRAHAHNLQVHPYTYRNEHEFLHYNFSQDPYKEYDYWINEIGVDGLFTDFTGSLHNFQEWTSPLPDTSKSPRQLLSQIASLVLPYAKA

SEQ ID NO: 35619 - protein, 392 aa, Arabidopsis thaliana
  peptide (1)..(392): Ceres Seq. ID no. 13486813
MILTRCLPLIWLSLLTVCAAGRTLHPLPVKGPKTVKLQLQTSRPYNIAHRGSNGEIPEETTAAYLKAIEEGTDFIETDILSSKDGVLICFHDCILDETTNVASHKEFADRKRTYDVQGFNITGFFTFDFTLKELKQLRIKQRYAFRDQQYNGMYPIITFEEFLTIARDAPRVVGIYPEIKNPVLMNQHVKWPGGKKFEDKVVETLKKYGYGGSYLSKKWLKKPLFIQSFAPTSLVYISNLTDSPKVLLIDDVTMPTQDTNQTYAEITSDAYFEYIKQYVVGIGPWKDTIVPVNNNYVLAPTDLVKRAHAHNLQVHPYTYRNEHEFLHYNFSQDPYKEYDYWINEIGVDGLFTDFTGSLHNFQEWTSPLPDTSKSPRQLLSQIASLVLPYAKA

SEQ ID NO: 35620 - protein, 240 aa, Arabidopsis thaliana
  peptide (1)..(240): Ceres Seq. ID no. 13486814
MYPIITFEEFLTIARDAPRVVGIYPEIKNPVLMNQHVKWPGGKKFEDKVVETLKKYGYGGSYLSKKWLKKPLFIQSFAPTSLVYISNLTDSPKVLLIDDVTMPTQDTNQTYAEITSDAYFEYIKQYVVGIGPWKDTIVPVNNNYVLAPTDLVKRAHAHNLQVHPYTYRNEHEFLHYNFSQDPYKEYDYWINEIGVDGLFTDFTGSLHNFQEWTSPLPDTSKSPRQLLSQIASLVLPYAKA

SEQ ID NO: 35621 - DNA, 1045 bp, Arabidopsis thaliana; identical to SEQ ID NO: 25661
  misc_feature (1)..(1045): Ceres Seq. ID no. 13487337
  misc_feature (1)..(1045): Ortholog of  Ceres SEQ ID NO 13594474 as cited in SEQ ID NO 51277
  misc_feature (1)..(1045): Ortholog of  Ceres SEQ ID NO 12635560 as cited in SEQ ID NO 0

SEQ ID NO: 35622 - protein, 233 aa, Arabidopsis thaliana; identical to SEQ ID NO: 25662
  peptide (1)..(233): Ceres Seq. ID no. 13487338

SEQ ID NO: 35623 - protein, 223 aa, Arabidopsis thaliana; identical to SEQ ID NO: 25663
  peptide (1)..(223): Ceres Seq. ID no. 13487339

SEQ ID NO: 35624 - protein, 198 aa, Arabidopsis thaliana; identical to SEQ ID NO: 25664
  peptide (1)..(198): Ceres Seq. ID no. 13487340

SEQ ID NO: 35625 - DNA, 803 bp, Arabidopsis thaliana
  misc_feature (1)..(803): Ceres Seq. ID no. 12324009
  misc_feature (1)..(803): Ortholog of  Ceres SEQ ID NO 15172885 as cited in SEQ ID NO 51883
  misc_feature (1)..(803): Ortholog of  Ceres SEQ ID NO 13594663 as cited in SEQ ID NO 51894
  misc_feature (1)..(803): Ortholog of  Ceres SEQ ID NO 15226128 as cited in SEQ ID NO 60215
  misc_feature (1)..(803): Ortholog of  Ceres SEQ ID NO 14302271 as cited in SEQ ID NO 68360
  misc_feature (1)..(803): Ortholog of  Ceres SEQ ID NO 12635134 as cited in SEQ ID NO 0
  misc_feature (1)..(803): Ortholog of  Ceres SEQ ID NO 13623037 as cited in SEQ ID NO 0
  misc_feature (1)..(803): Ortholog of  Ceres SEQ ID NO 15175141 as cited in SEQ ID NO 0
aatttctgccttacatatcaaaagatagaacacacacacaaataaagcaaagaaacagaatatctttgagatctcctctttatttggagaagacaaaacacagaacaagaattagaaagaagggagagaaagcaaaaatggcactaagaatgtgggcttcttctacagcaaacgctctcaagctttcttcttctgtttccaagtctcatctctctcctttctccttctctagatgcttctccacagttttggagggtttgaagtatgcaaattcacatgagtgggttaaacatgaaggctctgttgccaccattggcatcactgcccatgctcaggaccatttaggtgaagtggtgtttgttgaactgccagaggacaatacttcagtgagcaaagagaaaagctttggagcagtggagagtgtgaaggcaacaagtgagatcttatcaccaatctcaggtgaaatcattgaggttaacaagaagctcacagaatcacctggcttgatcaactcaagcccctatgaagatggttggatgatcaaagtgaaaccaagtagccccgcggagttggaatctttgatgggtccaaaggaatacaccaagttctgcgaggaggaagatgctgctcactaggagggtttctctctgtcttttatgttccaagttctatcaattctcatgcttgttttctaaatttgcatacactctatgaccaacttcacaaaataagagttcaagaagatgaaacagagacctaacaaacacattaagattttttctttcatatatcttgttatcccc

SEQ ID NO: 35626 - protein, 210 aa, Arabidopsis thaliana
  peptide (1)..(210): Ceres Seq. ID no. 12324010
FLPYISKDRTHTQIKQRNRISLRSPLYLEKTKHRTRIRKKGEKAKMALRMWASSTANALKLSSSVSKSHLSPFSFSRCFSTVLEGLKYANSHEWVKHEGSVATIGITAHAQDHLGEVVFVELPEDNTSVSKEKSFGAVESVKATSEILSPISGEIIEVNKKLTESPGLINSSPYEDGWMIKVKPSSPAELESLMGPKEYTKFCEEEDAAH

SEQ ID NO: 35627 - protein, 165 aa, Arabidopsis thaliana
  peptide (1)..(165): Ceres Seq. ID no. 12324011
MALRMWASSTANALKLSSSVSKSHLSPFSFSRCFSTVLEGLKYANSHEWVKHEGSVATIGITAHAQDHLGEVVFVELPEDNTSVSKEKSFGAVESVKATSEILSPISGEIIEVNKKLTESPGLINSSPYEDGWMIKVKPSSPAELESLMGPKEYTKFCEEEDAAH

SEQ ID NO: 35628 - protein, 161 aa, Arabidopsis thaliana
  peptide (1)..(161): Ceres Seq. ID no. 12324012
MWASSTANALKLSSSVSKSHLSPFSFSRCFSTVLEGLKYANSHEWVKHEGSVATIGITAHAQDHLGEVVFVELPEDNTSVSKEKSFGAVESVKATSEILSPISGEIIEVNKKLTESPGLINSSPYEDGWMIKVKPSSPAELESLMGPKEYTKFCEEEDAAH

SEQ ID NO: 35629 - DNA, 600 bp, Arabidopsis thaliana
  misc_feature (1)..(600): Ceres Seq. ID no. 12396869
  misc_feature (1)..(600): Ortholog of  Ceres SEQ ID NO 12625251 as cited in SEQ ID NO 62125
  misc_feature (1)..(600): Ortholog of  Ceres SEQ ID NO 15179096 as cited in SEQ ID NO 0
acttgacaaatctgagcatttcctttttgcttacagcggaaatatctgaaccaacgcgatgccgtcgacgcagtccttgaccgtcgcagcgaagacgctacgaaatcggatcttctctaggtctggatctacatccgccggtccgagtcggtgggcgacgccaggtcacgaggagcgacctaagggttactttatgaaccgtactcctccggcaccaggacagtcgcgaaaatgggaagattgggagcttccttgttacatcaccagcttccttacaattgttatcctcggcgttggactcaatgccaaacctgatctttcaatcgagacttgggctcatcagaaagctttagagcgtcttgagatggagaagctcgcgaccgctggagattcatctgattaagcatcaccgttggatctccggttgcttgatttggtatgtccttattctccgggagttgaggagtttttttaccgtttaatgatgatgataacgaagactggagagttagggtttcgtttggcccttgaactttgtttcaattctcctttgttttgtcgataatgatgatgttcatgaaataagtgttcttttaactg

SEQ ID NO: 35630 - protein, 114 aa, Arabidopsis thaliana
  peptide (1)..(114): Ceres Seq. ID no. 12396870
MPSTQSLTVAAKTLRNRIFSRSGSTSAGPSRWATPGHEERPKGYFMNRTPPAPGQSRKWEDWELPCYITSFLTIVILGVGLNAKPDLSIETWAHQKALERLEMEKLATAGDSSD

SEQ ID NO: 35631 - protein, 69 aa, Arabidopsis thaliana
  peptide (1)..(69): Ceres Seq. ID no. 12396871
MNRTPPAPGQSRKWEDWELPCYITSFLTIVILGVGLNAKPDLSIETWAHQKALERLEMEKLATAGDSSD

SEQ ID NO: 35632 - DNA, 1399 bp, Arabidopsis thaliana
  misc_feature (1)..(1399): Ceres Seq. ID no. 13647068
  misc_feature (1)..(1399): Ortholog of  Ceres SEQ ID NO 14303955 as cited in SEQ ID NO 54594
aactattcatcatcttcgtttggatttggtttctttctgtttctgacaaaaaccaccggcaaaataaagcgactacgattccattttcaccggcgcttccgtgagacaacatctctccatcttggaactttttctaatggcattattactcctttctcactgctctatcttatcttttcaacctccattatcgtcttcttcttcatttcattcttcacatatccaatctctgagcaaaccagttttcgcttctccttccccaattcgaaattcaatttcttcgtccgtctcttcatcttcttcctccgttagtagctccaattcgattcctcaggtcgtcgtaacacgagaacgaggcaagaacaatcaaatcatcaaagctttggagaaaaatggcatatcatctttagagcttccgttgattcaacatgcgcgaggacctgatttcgatcggcttgcttctgtattaaatgataagagctttgactggatcatcataacatctccagaagcaggttctgtttttctcgaggcgtggaagacagctagctccccagaagtgcaaataggtgtagtaggagctggaacagccagggtatttgaagaggcaatgaaatcggcagatggattgcttcatgttgcctttacaccatcaaaagcaactggtaaagtcttggcttcggagcttccagagaaagttggcaaaaggtcctctgtcttatacccggcttctctaaaagcaggcaatgatattgtggaagggttgtccaaacgtgggtttgaagttgtcaggctgaatacatacacaacagttccggtgcagagtgttgatacggtgctcctgcaacaggcactatctgctcctgttctttctgtagcttctccttctgcagttcgcgcctggctgcatctgattcaaaatgaggagcaatggagcaattacgttgcctgcattggagagacaactgcatcagctgctagaagactaggattgaaaaacgtctactacccagagaaaccaggacttgaagggtgggtcgagagcataatggaagctctaggtgctcacgcagattcaagtaaccctagcagcaggaattgaattatacttgtgccatcctctcatagattttacttatggaggactttgagtttggtcagtgcctgtaatttagaggacagggaaaaagaaagcaaatgatgcttttgagaaaatactgaagcccttgtaagatatctcagatagcttttgtcgtacagtatatactcattaattattatgtgaatgctaagatcataaatgatcaaaaaacatgaacaaaaagcaatgttatgtagatgcaactaatccaaacttattatgtttgtttaataatttaataatataatgataagtcat

SEQ ID NO: 35633 - protein, 321 aa, Arabidopsis thaliana
  peptide (1)..(321): Ceres Seq. ID no. 13647069
MALLLLSHCSILSFQPPLSSSSSFHSSHIQSLSKPVFASPSPIRNSISSSVSSSSSSVSSSNSIPQVVVTRERGKNNQIIKALEKNGISSLELPLIQHARGPDFDRLASVLNDKSFDWIIITSPEAGSVFLEAWKTASSPEVQIGVVGAGTARVFEEAMKSADGLLHVAFTPSKATGKVLASELPEKVGKRSSVLYPASLKAGNDIVEGLSKRGFEVVRLNTYTTVPVQSVDTVLLQQALSAPVLSVASPSAVRAWLHLIQNEEQWSNYVACIGETTASAARRLGLKNVYYPEKPGLEGWVESIMEALGAHADSSNPSSRN

SEQ ID NO: 35634 - protein, 163 aa, Arabidopsis thaliana
  peptide (1)..(163): Ceres Seq. ID no. 13647070
MKSADGLLHVAFTPSKATGKVLASELPEKVGKRSSVLYPASLKAGNDIVEGLSKRGFEVVRLNTYTTVPVQSVDTVLLQQALSAPVLSVASPSAVRAWLHLIQNEEQWSNYVACIGETTASAARRLGLKNVYYPEKPGLEGWVESIMEALGAHADSSNPSSRN

SEQ ID NO: 35635 - DNA, 928 bp, Arabidopsis thaliana
  misc_feature (1)..(928): Ceres Seq. ID no. 13646019
  misc_feature (1)..(928): Ortholog of  Ceres SEQ ID NO 12610385 as cited in SEQ ID NO 55938
  misc_feature (1)..(928): Ortholog of  Ceres SEQ ID NO 13661939 as cited in SEQ ID NO 61170
  misc_feature (1)..(928): Ortholog of  Ceres SEQ ID NO 14309041 as cited in SEQ ID NO 0
  misc_feature (1)..(928): Ortholog of  Ceres SEQ ID NO 14309611 as cited in SEQ ID NO 0
tggttttctgttctgtcctaatttctctctggcgaaagctaagaggtttcggttacggtctccatctccgatcaaatcacgaagtttctatcggaaattttcagtgatacataccgtcagagattttctttacgagagaattgtcgccgacatactaaagcagagttttgggtgggaattagtaagatttcgactttagaattgggagatctttccattatgggttctgagcaaaacgacagcacaagcttctctccttcagagccaaagctctgcgtcaaaggatgtggcttcttcggatctccatcgaacatgaacctctgctctaaatgctacagagacatccgagccacggaggaacaaaccgcttccgctaaagccgccgtcgagaaatctctaaaccctaataaacccaaaactcaaccacaacagagccaagaaatcactcaaggcgtcctcggatctggatcgtcttcctcatcaacgagagggggtgattcggctgctgctccgttggatccaccgaaatcgacggctacgagatgcttgagctgtaacaagaaagttggcgtgacgggtttcaagtgtaggtgtggaagcactttctgtggaactcatagatatccagagagtcacgagtgccaattcgatttcaaaggagttgcgagagaagctattgctaaagctaatcctgtggtgaaggctgataaggttgataggatatgaattggtgaagaaactgttgtgttctcttttgtttttttattttcaagtctcgtgatgttggtggtttggctctctgttttctgctcttattatggttttatttgcttttagggtttcttaggaaaggccttagattctgctattatgtggtttcatgttttgcaacattggatttgttgttctgtaataaagtgttggttat

SEQ ID NO: 35636 - protein, 168 aa, Arabidopsis thaliana
  peptide (1)..(168): Ceres Seq. ID no. 13646020
MGSEQNDSTSFSPSEPKLCVKGCGFFGSPSNMNLCSKCYRDIRATEEQTASAKAAVEKSLNPNKPKTQPQQSQEITQGVLGSGSSSSSTRGGDSAAAPLDPPKSTATRCLSCNKKVGVTGFKCRCGSTFCGTHRYPESHECQFDFKGVAREAIAKANPVVKADKVDRI

SEQ ID NO: 35637 - protein, 137 aa, Arabidopsis thaliana
  peptide (1)..(137): Ceres Seq. ID no. 13646021
MNLCSKCYRDIRATEEQTASAKAAVEKSLNPNKPKTQPQQSQEITQGVLGSGSSSSSTRGGDSAAAPLDPPKSTATRCLSCNKKVGVTGFKCRCGSTFCGTHRYPESHECQFDFKGVAREAIAKANPVVKADKVDRI

SEQ ID NO: 35638 - DNA, 974 bp, Arabidopsis thaliana
  misc_feature (1)..(974): Ceres Seq. ID no. 12333496
  misc_feature (1)..(974): Ortholog of  Ceres SEQ ID NO 12610385 as cited in SEQ ID NO 55938
  misc_feature (1)..(974): Ortholog of  Ceres SEQ ID NO 13661939 as cited in SEQ ID NO 61170
  misc_feature (1)..(974): Ortholog of  Ceres SEQ ID NO 15178805 as cited in SEQ ID NO 0
aaacacatctctctctctctctctctctttctctctttttatatttttgtgtcccaatctcttcttcatttctgtttggttgccgagaaaacgcaggaaacttttctgcaaaaaaactcggtgaccatatttaaaactttcccacgttaattctctcttctttgttttgtttcagattcattacttttctccaaaaaactttcttcaagatctgctcttttaaataattatggcggaagaacatcgatgcgagacgcctgaaggtcaccgtctctgcgttaacaactgcggtttcttcggaagctcagcgacaatgaatctatgttcaaactgttacggcgatctctgtctcaaacaacaacaacaagcttccatgaaatcaaccgtcgaatcatctctctctccggtgatcgcacctgttctcgaaaactacgcggcggagttagagatcccgacgacgaagaagacagaggagaaaaaaccgattcaaattccgacggagcaaccgtctccgccgcaacggccgaatcgatgcaccgtatgtaggaaacgggtcgggttaaccgggtttatgtgtcggtgcgggacgactttttgtgggagtcataggtatccggaggttcatggttgtacgtttgatttcaaatcggcgggacgtgaagagatcgcgaaagctaatccgttggttattgcggcgaagcttcagaaaatatgaatcggagccgttgaccgatttctatctttaccctgagaaaatttcgattgtctcggtggatctcagccgttcattatgttattgtattacggacacgtgtcgcaagattaaggttgagatggtttcgtaactttttaattattttctttgtttatttccgaagaaattaaagtttttatgattgtgtggcttttgcttgtaaaaaaaaaaagggtttctctttgggaaaaagaaaagaaaatatatgaaattgtgtccc

SEQ ID NO: 35639 - protein, 161 aa, Arabidopsis thaliana
  peptide (1)..(161): Ceres Seq. ID no. 12333497
MAEEHRCETPEGHRLCVNNCGFFGSSATMNLCSNCYGDLCLKQQQQASMKSTVESSLSPVIAPVLENYAAELEIPTTKKTEEKKPIQIPTEQPSPPQRPNRCTVCRKRVGLTGFMCRCGTTFCGSHRYPEVHGCTFDFKSAGREEIAKANPLVIAAKLQKI

SEQ ID NO: 35640 - protein, 133 aa, Arabidopsis thaliana
  peptide (1)..(133): Ceres Seq. ID no. 12333498
MNLCSNCYGDLCLKQQQQASMKSTVESSLSPVIAPVLENYAAELEIPTTKKTEEKKPIQIPTEQPSPPQRPNRCTVCRKRVGLTGFMCRCGTTFCGSHRYPEVHGCTFDFKSAGREEIAKANPLVIAAKLQKI

SEQ ID NO: 35641 - protein, 113 aa, Arabidopsis thaliana
  peptide (1)..(113): Ceres Seq. ID no. 12333499
MKSTVESSLSPVIAPVLENYAAELEIPTTKKTEEKKPIQIPTEQPSPPQRPNRCTVCRKRVGLTGFMCRCGTTFCGSHRYPEVHGCTFDFKSAGREEIAKANPLVIAAKLQKI

SEQ ID NO: 35642 - DNA, 881 bp, Arabidopsis thaliana
  misc_feature (1)..(881): Ceres Seq. ID no. 12332332
  misc_feature (1)..(881): Ortholog of  Ceres SEQ ID NO 15224629 as cited in SEQ ID NO 56014
  misc_feature (1)..(881): Ortholog of  Ceres SEQ ID NO 13595484 as cited in SEQ ID NO 56583
  misc_feature (1)..(881): Ortholog of  Ceres SEQ ID NO 15173971 as cited in SEQ ID NO 63609
  misc_feature (1)..(881): Ortholog of  Ceres SEQ ID NO 15173400 as cited in SEQ ID NO 63712
aagtcgctttgatctaaaaagctcttaaactattcttccagcgaccggaagaaacgaataatcggaatcgaaaaattcgaaaaaggaactgagaagaaacagatctgaagatggagtgtgtatttggtctagttgggaatggattcgctatcgtggcggcggatacatcagcagttcacagtattcttcttcacaagaacaaagaggacaagatcatgactcttgactctcacaagctcgtcgccgctagtggtgagcctggtgaccgggttcagtttacggagtatgttcagaagaatgtgtcactgtatcagtttcgtaatgggattcctttgagtactgctgctgctgctaacttcactcgtggagaacttgccactgctttgagaaagaatccatattcggtgaacatcctgatggctggctatgacaaagaagccggcgcatctctatactacattgactacattgcaaccctccacaaggttgataagggagcatttggatacggctcatacttctctctctctacaatggacagacactaccgcagcgacatgtctgttgaagaagccattgaattggtggacaaatgcatactcgagatcaggtcaaggctggtcattgcaccaccaaactttgttatcaagattgttgacaaggacggagcccgtgagtacggatggcgtatcagcactgctgatgcctaagttgttttcattgtgtttattagtccatttatgttactcggctcacatttatattctctgttgaacttcaagctccctggatattaaagttcctagataatgatgatgatatgcatgtgttgaactttttctttccttattgcgtatatgaagcaaaagatagtgcaatgt

SEQ ID NO: 35643 - protein, 199 aa, Arabidopsis thaliana
  peptide (1)..(199): Ceres Seq. ID no. 12332333
MECVFGLVGNGFAIVAADTSAVHSILLHKNKEDKIMTLDSHKLVAASGEPGDRVQFTEYVQKNVSLYQFRNGIPLSTAAAANFTRGELATALRKNPYSVNILMAGYDKEAGASLYYIDYIATLHKVDKGAFGYGSYFSLSTMDRHYRSDMSVEEAIELVDKCILEIRSRLVIAPPNFVIKIVDKDGAREYGWRISTADA

SEQ ID NO: 35644 - protein, 164 aa, Arabidopsis thaliana
  peptide (1)..(164): Ceres Seq. ID no. 12332334
MTLDSHKLVAASGEPGDRVQFTEYVQKNVSLYQFRNGIPLSTAAAANFTRGELATALRKNPYSVNILMAGYDKEAGASLYYIDYIATLHKVDKGAFGYGSYFSLSTMDRHYRSDMSVEEAIELVDKCILEIRSRLVIAPPNFVIKIVDKDGAREYGWRISTADA

SEQ ID NO: 35645 - protein, 115 aa, Arabidopsis thaliana
  peptide (1)..(115): Ceres Seq. ID no. 12332335
MTKKPAHLYTTLTTLQPSTRLIREHLDTAHTSLSLQWTDTTAATCLLKKPLNWWTNAYSRSGQGWSLHHQTLLSRLLTRTEPVSTDGVSALLMPKLFSLCLLVHLCYSAHIYILC

SEQ ID NO: 35646 - DNA, 1020 bp, Arabidopsis thaliana
  misc_feature (1)..(1020): Ceres Seq. ID no. 12332327
  misc_feature (1)..(1020): Ortholog of  Ceres SEQ ID NO 15172862 as cited in SEQ ID NO 51943
  misc_feature (1)..(1020): Ortholog of  Ceres SEQ ID NO 12784852 as cited in SEQ ID NO 61543
ataaatagtgaaaacacaaaaccctaagagtcgctcttgctctcagccgtctgtcttacctccagaagtcgacgacaacaatggcaccgaagaagggagttaaagtggcttcaaagaagaagccggagaaagttaccaacccattgtttgagagacgcccaaagcaattcggtattggtggcgctttgcctcctaagaaggatctttctcgttacatcaaatggcctaagtcaatccgtcttcaaaggcagaagcgtatccttaagcagaggttgaaggttcctccagctcttaaccagttcaccaagacccttgataagaatctcgccaccagcctcttcaagattcttctgaagtataggccagaggacaaagccgcaaagaaggaacgccttttgaacaaggctcaagctgaggcagaaggaaagcctgctgaatccaagaagcccattgttgttaagtatggtctcaaccatgtgacttacctcatcgagcagaacaaggcacagcttgtggtcattgcacacgatgttgaccctatcgagttggtggtctggttacctgcactctgcaggaaaatggaagtcccttactgcattgttaagggaaaatctcgtcttggagcggtcgttcaccagaagactgctgctgccttgtgcttgaccactgtcaagaacgaggacaagcttgagttcagcaaaatcctcgaggccatcaaggctaacttcaacgacaagtacgaggagtacaggaagaagtggggaggtggcataatgggatccaagtctcaagccaagaccaaagctaaggagagggttattgctaaggaggctgcccagagaatgaactaggcatcataccttatgttctctgctatgaaacatatgataatggttttgttgtttagcgatattttgaaaccttgttttattttaatttctatgctctttcggatgttaccaccctcttcagaattttatgcagttttgttatcaatttcacatataaacttttatttgc

SEQ ID NO: 35647 - protein, 256 aa, Arabidopsis thaliana [sequence omitted]

SEQ ID NO: 35648 - DNA, 642 bp, Arabidopsis thaliana
  misc_feature (1)..(642): Ceres Seq. ID no. 12393562
  misc_feature (1)..(642): Ortholog of  Ceres SEQ ID NO 13638893 as cited in SEQ ID NO 55835
  misc_feature (1)..(642): Ortholog of  Ceres SEQ ID NO 13661656 as cited in SEQ ID NO 61607
  misc_feature (1)..(642): Ortholog of  Ceres SEQ ID NO 14309331 as cited in SEQ ID NO 0
atcattcacaatggcatatgcaactattctcatgatcttctcggtggtggcactaatgtccggcgagagagctcatgcagcagtggactgctcatcgttgatactaaacatggctgattgtttgtcttttgtgactagtggtagtacagttgtcaagccggaaggaacatgttgttcagggcttaagactgtggttaggacaggaccagaatgtctatgtgaggctttcaagaacagtggttctcttggtttaactcttgatctttctaaagctgcttctcttccttctgtttgtaaagttgctgctcctccttctgctcgttgtggcctttctgtctctggagatcctcctgctactgcccctggtttatctcctacggccggagcaggagcacccgcgttgtccagtggtgcaaatgcggcaactccagtttcgtccccgaggagttccgatgcgtccttgctctctgtatcttttgcatttgtcatcttcatggcactcatttcttctttctattgagtcttaaaatttaattgcttcttgttgagttatttttgtttgctatgtagctgaagagtttggtgttactgatcatatttacctttcatgtgtcaattttaatgagaaatctccttttagtt

SEQ ID NO: 35649 - protein, 172 aa, Arabidopsis thaliana
  peptide (1)..(172): Ceres Seq. ID no. 12393563
SFTMAYATILMIFSVVALMSGERAHAAVDCSSLILNMADCLSFVTSGSTVVKPEGTCCSGLKTVVRTGPECLCEAFKNSGSLGLTLDLSKAASLPSVCKVAAPPSARCGLSVSGDPPATAPGLSPTAGAGAPALSSGANAATPVSSPRSSDASLLSVSFAFVIFMALISSFY

SEQ ID NO: 35650 - protein, 169 aa, Arabidopsis thaliana
  peptide (1)..(169): Ceres Seq. ID no. 12393564
MAYATILMIFSVVALMSGERAHAAVDCSSLILNMADCLSFVTSGSTVVKPEGTCCSGLKTVVRTGPECLCEAFKNSGSLGLTLDLSKAASLPSVCKVAAPPSARCGLSVSGDPPATAPGLSPTAGAGAPALSSGANAATPVSSPRSSDASLLSVSFAFVIFMALISSFY

SEQ ID NO: 35651 - protein, 162 aa, Arabidopsis thaliana
  peptide (1)..(162): Ceres Seq. ID no. 12393565
MIFSVVALMSGERAHAAVDCSSLILNMADCLSFVTSGSTVVKPEGTCCSGLKTVVRTGPECLCEAFKNSGSLGLTLDLSKAASLPSVCKVAAPPSARCGLSVSGDPPATAPGLSPTAGAGAPALSSGANAATPVSSPRSSDASLLSVSFAFVIFMALISSFY

SEQ ID NO: 35652 - DNA, 887 bp, Arabidopsis thaliana
  misc_feature (1)..(887): Ceres Seq. ID no. 12332865
  misc_feature (1)..(887): Ortholog of  Ceres SEQ ID NO 15172729 as cited in SEQ ID NO 56037
  misc_feature (1)..(887): Ortholog of  Ceres SEQ ID NO 13584899 as cited in SEQ ID NO 64830
  misc_feature (1)..(887): Ortholog of  Ceres SEQ ID NO 13654441 as cited in SEQ ID NO 67814
  misc_feature (1)..(887): Ortholog of  Ceres SEQ ID NO 13596128 as cited in SEQ ID NO 67831
  misc_feature (1)..(887): Ortholog of  Ceres SEQ ID NO 12585194 as cited in SEQ ID NO 68878
  misc_feature (1)..(887): Ortholog of  Ceres SEQ ID NO 12589186 as cited in SEQ ID NO 0
ataaagaagaagaagctaacgaaaaataatggcggagagatcaaattcagaggaagtgaagcttttgggaatgtgggcgagtccttttagtcggaggattgagattgctcttacgcttaaaggtgtttcgtatgagttcctggagcaagatatcacaaacaagagctctttgttgcttcaattgaatccggttcataagatgattccggttcttgttcataatggtaaaccgatttctgaatcacttgtgattcttgagtatattgatgagacttggagagacaatccgattcttcctcaagatccgtatgagagaactatggctcgattctggtctaaattcgtcgatgaacagatttatgtgacggcgatgaaagttgtggggaagaccggaaaagagagagatgctgtggttgaagcgacgagagatttgttgatgtttttggagaaagagcttgttgggaaagattttctcggtgggaaaagtttagggtttgtggatattgtggcgactttggtggcgttttggctgatgagaacggaggagatcgtcggggtaaaggtggttccggtggagaagttcccggagatacatagatgggttaagaatttgttgggtaatgatgttatcaagaaatgtattcctcctgaagatgagcatcttaagtacattagagctcgtatggagaaactcaatatcaaatctgcttgataaggttttataaaaattctaatgctcacagtatgtctcttttgttcttgtctcagttgctatgttctgtcacttaatgtttgctatattgaaacacgaaaatttgaactttctttcttgttctacctaaagatgttcttaagcaaataatacagaagaaactctcttttgtgct

SEQ ID NO: 35653 - protein, 227 aa, Arabidopsis thaliana
  peptide (1)..(227): Ceres Seq. ID no. 12332866
MAERSNSEEVKLLGMWASPFSRRIEIALTLKGVSYEFLEQDITNKSSLLLQLNPVHKMIPVLVHNGKPISESLVILEYIDETWRDNPILPQDPYERTMARFWSKFVDEQIYVTAMKVVGKTGKERDAVVEATRDLLMFLEKELVGKDFLGGKSLGFVDIVATLVAFWLMRTEEIVGVKVVPVEKFPEIHRWVKNLLGNDVIKKCIPPEDEHLKYIRARMEKLNIKSA

SEQ ID NO: 35654 - protein, 213 aa, Arabidopsis thaliana
  peptide (1)..(213): Ceres Seq. ID no. 12332867
MWASPFSRRIEIALTLKGVSYEFLEQDITNKSSLLLQLNPVHKMIPVLVHNGKPISESLVILEYIDETWRDNPILPQDPYERTMARFWSKFVDEQIYVTAMKVVGKTGKERDAVVEATRDLLMFLEKELVGKDFLGGKSLGFVDIVATLVAFWLMRTEEIVGVKVVPVEKFPEIHRWVKNLLGNDVIKKCIPPEDEHLKYIRARMEKLNIKSA

SEQ ID NO: 35655 - protein, 170 aa, Arabidopsis thaliana
  peptide (1)..(170): Ceres Seq. ID no. 12332868
MIPVLVHNGKPISESLVILEYIDETWRDNPILPQDPYERTMARFWSKFVDEQIYVTAMKVVGKTGKERDAVVEATRDLLMFLEKELVGKDFLGGKSLGFVDIVATLVAFWLMRTEEIVGVKVVPVEKFPEIHRWVKNLLGNDVIKKCIPPEDEHLKYIRARMEKLNIKSA

SEQ ID NO: 35656 - DNA, 560 bp, Arabidopsis thaliana
  misc_feature (1)..(560): Ceres Seq. ID no. 12339222
  misc_feature (1)..(560): Ortholog of  Ceres SEQ ID NO 12582657 as cited in SEQ ID NO 51070
atttgatccgtttatacttgttattggcatttcatcatcgtctgggataaaaaaatgtcgacagttggagagcttgcttgcagctacgctgttatgatcctcgaggacgagggtatcgctatcacggctgacaaaatcgcgaccttggtgaaagctgctggtgttagtattgagtcatactggccaatgctattcgccaagatggctgagaaacgtaacgtgactgatctcatcatgaacgttggtgctggtggtggaggtagtgctccggttgcagctgctgctccagctgctggcggtggtgcggcagctgctcctgctgctgaggagaagaagaaggatgagccagcagaagagagtgacggagatttgggtttcggtttgtttgactaaacgcagtcacttgtctttcttctttgtagttggatattggagactatattttgtcgtatgagttattattacttgtttgatctggctaaaggactattagttggtttatgatgcgtatgttgtataactcaagtttcctagcaaaccaatcggctcgggcttttgtt

SEQ ID NO: 35657 - protein, 112 aa, Arabidopsis thaliana
  peptide (1)..(112): Ceres Seq. ID no. 12339223
MSTVGELACSYAVMILEDEGIAITADKIATLVKAAGVSIESYWPMLFAKMAEKRNVTDLIMNVGAGGGGSAPVAAAAPAAGGGAAAAPAAEEKKKDEPAEESDGDLGFGLFD

SEQ ID NO: 35658 - protein, 99 aa, Arabidopsis thaliana
  peptide (1)..(99): Ceres Seq. ID no. 12339224
MILEDEGIAITADKIATLVKAAGVSIESYWPMLFAKMAEKRNVTDLIMNVGAGGGGSAPVAAAAPAAGGGAAAAPAAEEKKKDEPAEESDGDLGFGLFD

SEQ ID NO: 35659 - protein, 68 aa, Arabidopsis thaliana
  peptide (1)..(68): Ceres Seq. ID no. 12339226
MLFAKMAEKRNVTDLIMNVGAGGGGSAPVAAAAPAAGGGAAAAPAAEEKKKDEPAEESDGDLGFGLFD

SEQ ID NO: 35660 - DNA, 1024 bp, Arabidopsis thaliana
  misc_feature (1)..(1024): Ceres Seq. ID no. 13504706
  misc_feature (1)..(1024): Ortholog of  Ceres SEQ ID NO 15178816 as cited in SEQ ID NO 405
acaactcgattaccaaaaagcagagccatccaaccataaaactcaaaacacacagattccactggcgtgtgctctcctcacttcactcgtccttgaaacttgagcttcaattacaaagaatggctgcttcaagtgctgtcaccgcaaactacgtcctcaagccacctccattcgcactggatgctttggagccgcatatgagcaaacaaactctggagtttcactggggaaaacatcacagagcttacgtggacaacctcaagaaacaggttcttggaaccgagcttgaaggcaagcccttagagcacattatccacagcacttacaacaatggtgatctcctccctgctttcaacaacgctgctcaggcgtggaaccacgagttcttctgggagtcaatgaaaccaggtggtggaggaaaaccatcaggagagcttcttgctttgcttgaaagagatttcacttcttatgagaagttctatgaagagttcaatgctgctgcagccactcagtttggagctggctgggcctggcttgcttattcaaatgaaaaactcaaagtagtgaaaactcccaatgctgtgaatccccttgtgctcggctctttcccattgcttaccattgatgtctgggagcatgcttactaccttgacttccagaaccgaagaccagattacataaagacattcatgaccaatcttgtgtcttgggaagctgtaagtgccagacttgaggccgccaaggctgcttctgcttaagcaaatttctgaacaatttgacttcagtgacagtgagttctgcatcaccgaagtctcttataaaatattggtcgctgtaataaggacacagctctcttgttgtgtatgtgtcacagagttcttcattttgcttgtgtaatgaacaattaaacatgctcttttctgagtgtgtgtgcgttttgtgtgtgtcaagtttttcatcgtctcctttattaaactcaaattggcacctaccatcagtaattcatagtttggcatggcccatt

SEQ ID NO: 35661 - protein, 251 aa, Arabidopsis thaliana
  peptide (1)..(251): Ceres Seq. ID no. 13504707
NSITKKQSHPTIKLKTHRFHWRVLSSLHSSLKLELQLQRMAASSAVTANYVLKPPPFALDALEPHMSKQTLEFHWGKHHRAYVDNLKKQVLGTELEGKPLEHIIHSTYNNGDLLPAFNNAAQAWNHEFFWESMKPGGGGKPSGELLALLERDFTSYEKFYEEFNAAAATQFGAGWAWLAYSNEKLKVVKTPNAVNPLVLGSFPLLTIDVWEHAYYLDFQNRRPDYIKTFMTNLVSWEAVSARLEAAKAASA

SEQ ID NO: 35662 - protein, 212 aa, Arabidopsis thaliana; identical to SEQ ID NO: 21185
  peptide (1)..(212): Ceres Seq. ID no. 13504708

SEQ ID NO: 35663 - protein, 186 aa, Arabidopsis thaliana; identical to SEQ ID NO: 21186
  peptide (1)..(186): Ceres Seq. ID no. 13504709

SEQ ID NO: 35664 - DNA, 925 bp, Arabidopsis thaliana
  misc_feature (1)..(925): Ceres Seq. ID no. 12384577
  misc_feature (1)..(925): Ortholog of  Ceres SEQ ID NO 15179445 as cited in SEQ ID NO 0
aaaaacattagttacagtcggaatttcgaaaaaccctaattcagctaaaggttgatcgttgatctaaaagctcgagtgatgaagggaaattggtcgatcgtacgaaaggttcttcatcgccagttctccactctccgttcctcgacaccatcgtcgcgattatctacttccatccgaccgcttgttctggccccaaactcgatatcgtcgctaatcgctagaaactcattgtttactgcctccaacattggtccatccatcgattttaacttctccaacacttcgcttcctcatcggagaagcctctgctcggaagctggaggtgaaaatggtgttgttctagtgaaatcagaggaagagttcatcaatgcaatgagcaaagctcaagatggatctttaccatcggtcttctatttcactgccgcctggtgtggaccatgcaggtttatctctcctgtaatcgtggagcttagtaaacaatatcccgatgtaactacgtataaagtcgacattgatgagggcgggatttcgaacactatcagcaagttgaatatcacggctgtgccaacactgcatttcttcaaaggaggctcgaagcaaggcgaggttgtgggtgcagatgtcacgaagctgaagaatctcatggaacagctctacaagtgaagacctaatccgtcctagtaaagaacgtgttgaatagttgcaagatagtttaagactgaaaatttgaaatcaatctaaaaataatgaatgcgctgaaccagtttcgtctttgttcccccctcgttgttcaggattgtaattgcccttttgttttgtttgttttctccatttcctttgggcttagtttcctgagatttgtttgtgtccgtcggtgacaacttcaaaaaatatcgacaagtcataactttttatcaaaattttg

SEQ ID NO: 35665 - protein, 194 aa, Arabidopsis thaliana
  peptide (1)..(194): Ceres Seq. ID no. 12384578
MKGNWSIVRKVLHRQFSTLRSSTPSSRLSTSIRPLVLAPNSISSLIARNSLFTASNIGPSIDFNFSNTSLPHRRSLCSEAGGENGVVLVKSEEEFINAMSKAQDGSLPSVFYFTAAWCGPCRFISPVIVELSKQYPDVTTYKVDIDEGGISNTISKLNITAVPTLHFFKGGSKQGEVVGADVTKLKNLMEQLYK

SEQ ID NO: 35666 - DNA, 1155 bp, Arabidopsis thaliana; identical to SEQ ID NO: 22188
  misc_feature (1)..(1155): Ceres Seq. ID no. 12377359
  misc_feature (1)..(1155): Ortholog of  Ceres SEQ ID NO 13655519 as cited in SEQ ID NO 63335

SEQ ID NO: 35667 - protein, 322 aa, Arabidopsis thaliana; identical to SEQ ID NO: 22189
  peptide (1)..(322): Ceres Seq. ID no. 12377360

SEQ ID NO: 35668 - protein, 320 aa, Arabidopsis thaliana; identical to SEQ ID NO: 22190
  peptide (1)..(320): Ceres Seq. ID no. 12377361

SEQ ID NO: 35669 - protein, 201 aa, Arabidopsis thaliana; identical to SEQ ID NO: 22191
  peptide (1)..(201): Ceres Seq. ID no. 12377362

SEQ ID NO: 35670 - DNA, 1284 bp, Arabidopsis thaliana
  misc_feature (1)..(1284): Ceres Seq. ID no. 13618547
  misc_feature (1)..(1284): Ortholog of  Ceres SEQ ID NO 13597380 as cited in SEQ ID NO 64054
  misc_feature (1)..(1284): Ortholog of  Ceres SEQ ID NO 12625474 as cited in SEQ ID NO 64169
actaattaaattctctataaaacataagagagtctaaacactgtggtagaaaaaaatatagacttttagatatgtgtagtaaaataacattagtgttaactttattttccagttatttcatatcaacagatgctgtgaatggatcatttcctgcgcttttggcttttggagattcaattctcgatactggcaacaacaattttctcctgacttttatgaaaggaaatatctggccatatggaaggagtttcagcatgagaagggcgacaggaagatttggaaatggaagagttttctctgatatagttgctgaaggtttagggatcaagaagattttaccagcttatcgtaagttgttcaattctccaagtgaccttagaactggtgtttgcttcgcatcaggtggtgcaggagttgaccctgttacatccaaattgctgagagttttaacgccaaaggatcaagtaaacgatttcaaagggtacataagaaagctaaaggccacagcaggtccttcaagagcaagtagtatagtttcaaatgcagtgattcttgtttctcaaggaaataatgatattggaatctcatattttggaactccaactgctgctttccgaggattaactcccaatagatataccactaaactagctggttggaacaaacagtttatgaaagaattatacgatcaaggagcgagaaaattcgcggtaatgggagtgataccgttgggatgtttgcctatgacaagaatcttccttggtgggttcgtcatcacgtgtaacttcttcgcgaatagagtcgcagaacagtacaacggaaaattgaggagcggaactaaaagttggggacgtgaagcaggttttaggggtgcaaaatttgtctatgtcgacatgtacaacactcttatggatgttattaaaaattatagaagatacggattttctaatgagaaaaatgggtgttgttgtatgattacggctataataccatgccccaacccagataaatacgtcttctacgacttcgttcatccatccgagaaagcttacagaacaatttctaaaaagcttgtccaggatatcaagaatggccttgcctgatttattatatatacaatgctttattttaattttaataacagccatcgttaataatagaaatgagaagacaaaaatcatacatggcgatctctctgtttttcttatgttaaagaatgtataatccagtttatgtattgttcactttatataatcccagaacaacaaaggagtttgtttacaa

SEQ ID NO: 35671 - protein, 343 aa, Arabidopsis thaliana
  peptide (1)..(343): Ceres Seq. ID no. 13618548
MCSKITLVLTLFSSYFISTDAVNGSFPALLAFGDSILDTGNNNFLLTFMKGNIWPYGRSFSMRRATGRFGNGRVFSDIVAEGLGIKKILPAYRKLFNSPSDLRTGVCFASGGAGVDPVTSKLLRVLTPKDQVNDFKGYIRKLKATAGPSRASSIVSNAVILVSQGNNDIGISYFGTPTAAFRGLTPNRYTTKLAGWNKQFMKELYDQGARKFAVMGVIPLGCLPMTRIFLGGFVITCNFFANRVAEQYNGKLRSGTKSWGREAGFRGAKFVYVDMYNTLMDVIKNYRRYGFSNEKNGCCCMITAIIPCPNPDKYVFYDFVHPSEKAYRTISKKLVQDIKNGLA

SEQ ID NO: 35672 - protein, 295 aa, Arabidopsis thaliana
  peptide (1)..(295): Ceres Seq. ID no. 13618549
MKGNIWPYGRSFSMRRATGRFGNGRVFSDIVAEGLGIKKILPAYRKLFNSPSDLRTGVCFASGGAGVDPVTSKLLRVLTPKDQVNDFKGYIRKLKATAGPSRASSIVSNAVILVSQGNNDIGISYFGTPTAAFRGLTPNRYTTKLAGWNKQFMKELYDQGARKFAVMGVIPLGCLPMTRIFLGGFVITCNFFANRVAEQYNGKLRSGTKSWGREAGFRGAKFVYVDMYNTLMDVIKNYRRYGFSNEKNGCCCMITAIIPCPNPDKYVFYDFVHPSEKAYRTISKKLVQDIKNGLA

SEQ ID NO: 35673 - protein, 282 aa, Arabidopsis thaliana
  peptide (1)..(282): Ceres Seq. ID no. 13618550
MRRATGRFGNGRVFSDIVAEGLGIKKILPAYRKLFNSPSDLRTGVCFASGGAGVDPVTSKLLRVLTPKDQVNDFKGYIRKLKATAGPSRASSIVSNAVILVSQGNNDIGISYFGTPTAAFRGLTPNRYTTKLAGWNKQFMKELYDQGARKFAVMGVIPLGCLPMTRIFLGGFVITCNFFANRVAEQYNGKLRSGTKSWGREAGFRGAKFVYVDMYNTLMDVIKNYRRYGFSNEKNGCCCMITAIIPCPNPDKYVFYDFVHPSEKAYRTISKKLVQDIKNGLA

SEQ ID NO: 35674 - DNA, 528 bp, Arabidopsis thaliana
  misc_feature (1)..(528): Ceres Seq. ID no. 12580481
  misc_feature (1)..(528): Ortholog of  Ceres SEQ ID NO 12608605 as cited in SEQ ID NO 58240
acgttggtattatctctggtttcacattttcttaaccctctttggtgaatgcgtcattgaaacgccattatccgccgtgctaatctgatctcctcccccgtcggaaaaaatggccactggtggaaaagtctccttcaaagtcactctgacttcggatcctaagcttcctttcaaagttttcagcgtaccagaaggagctccgttcacggcggttctgaaattcgcagcagaagagttcaaggttcctccacaaaccagcgccatcatcactaatgatgggatcgggatcaatcctcaacagagtgcaggaaacgtttttctgaagcacggatctgaactaagattgatcccgcgtgatagagttggagctgtgtttgtgatggatccatagatgatgtgtaagcaatgattaaaaactcagttccaaaaaaaacataataatatactgaaatgcttatgtatcaacttcgttgaataaatatgtaatcgtcacatccttttacggattgaagtgagttgaatttggtc

SEQ ID NO: 35675 - protein, 93 aa, Arabidopsis thaliana; identical to SEQ ID NO: 26059
  peptide (1)..(93): Ceres Seq. ID no. 12580482

SEQ ID NO: 35676 - DNA, 1180 bp, Arabidopsis thaliana; identical to SEQ ID NO: 30934
  misc_feature (1)..(1180): Ceres Seq. ID no. 13504734
  misc_feature (1)..(1180): Ortholog of  Ceres SEQ ID NO 15180043 as cited in SEQ ID NO 0

SEQ ID NO: 35677 - protein, 320 aa, Arabidopsis thaliana; identical to SEQ ID NO: 30935
  peptide (1)..(320): Ceres Seq. ID no. 13504735

SEQ ID NO: 35678 - protein, 266 aa, Arabidopsis thaliana; identical to SEQ ID NO: 26377
  peptide (1)..(266): Ceres Seq. ID no. 13504736

SEQ ID NO: 35679 - protein, 261 aa, Arabidopsis thaliana; identical to SEQ ID NO: 26378
  peptide (1)..(261): Ceres Seq. ID no. 13504737

SEQ ID NO: 35680 - DNA, 770 bp, Arabidopsis thaliana
  misc_feature (1)..(770): Ceres Seq. ID no. 12339783
  misc_feature (1)..(770): Ortholog of  Ceres SEQ ID NO 14303430 as cited in SEQ ID NO 54795
tagcgcaaggcgtttgttgaaaagcttgatgaggtgcaagattggctttacatggatggagaagatgctaatgccacagagtttgagaagcggcttgactcacttaaagccatcggcagtcccatatctttccgatcagaggagcttacagcacgaccagtagcaattgaatatgctaggaaatacctaactgaactcaaagagatcataaaagaatgggagacgaacaaaacttggcttccaaaagaaaaaatcgacgaggtctcaaaggaagcagagaaagtaaaaagctggttagataagaatgtggctgagcaagaaaagacttctctgtggagcaaaccggtgttcacgtccactgaagtgtacgctaaagtatttactctacaagacaaggtcacaaaggtgaataagatcccaaagccaaagccaaagatagagaaagtaaccaagacggagaacacaacaaaggaggaggaacaatcaaaatcctctgatgaagctgccaaagaagaagaaagtcacgacgagctttgattaaggatatataataaatagagttttcgttaatttttgtgtttttaagagggaaaataggattaaaagtaggcagctgagatgagcaaaaggattttattcctttctcctcaacttcttcacatcaccattagaaacggaatcttctgtgtttttgtttttcattatatcaagttttggtctctctatttctataactgaatcttcaatatatttagtagaagtttataatc

SEQ ID NO: 35681 - protein, 161 aa, Arabidopsis thaliana
  peptide (1)..(161): Ceres Seq. ID no. 12339784
MDGEDANATEFEKRLDSLKAIGSPISFRSEELTARPVAIEYARKYLTELKEIIKEWETNKTWLPKEKIDEVSKEAEKVKSWLDKNVAEQEKTSLWSKPVFTSTEVYAKVFTLQDKVTKVNKIPKPKPKIEKVTKTENTTKEEEQSKSSDEAAKEEESHDEL

SEQ ID NO: 35682 - DNA, 1250 bp, Arabidopsis thaliana
  misc_feature (1)..(1250): Ceres Seq. ID no. 13490630
  misc_feature (1)..(1250): Ortholog of  Ceres SEQ ID NO 14308359 as cited in SEQ ID NO 55097
  misc_feature (1)..(1250): Ortholog of  Ceres SEQ ID NO 15169195 as cited in SEQ ID NO 55200
  misc_feature (1)..(1250): Ortholog of  Ceres SEQ ID NO 13581611 as cited in SEQ ID NO 59028
  misc_feature (1)..(1250): Ortholog of  Ceres SEQ ID NO 14301693 as cited in SEQ ID NO 69246
aacaagaacacagtaacgcaatcacagactccacagtccaaggagttttgcatactcaccaagccacaatcatttctctcttctctatctctctggttttgaatcggcgacgactgagtcaactcggtgttgttactggtttcgtcgtatgtgttgtaactgattaagttgatggatccgagtgggatgatgaacgaaggaggaccgtttaatctagcggagatctggcagtttccgttgaacggagtttcaaccgccggagattcttctagaagaagcttcgttggaccgaatcagttcggtgatgctgatctaaccacagctgctaacggtgatccagcgcgtatgagtcacgcgttgtctcaggcggttattgaaggtatctccggcgcttggaaacggagggaagatgagtctaagtcggcgaagatcgtctccaccattggcgctagtgaaggtgagaacaaaagacagaagatagatgaagtgtgtgatgggaaagcagaagcagaatcgctaggaacagagacggaacaaaagaagcaacagatggaaccaacgaaagattatattcatgttcgagctagaagaggtcaagctactgatagtcacagtttagctgaaagagcgagaagagagaaaataagtgagcggatgaaaatcttgcaagatcttgttccgggatgtaacaaggttattggaaaagcacttgttctagatgagataattaactatatacaatcattgcaacgtcaagttgagttcttatcgatgaagcttgaagcagtcaactcaagaatgaaccctggtatcgaggtttttccacccaaagagtttggtcagcaagcgtttgaaaatccggagatacagttcgggtcgcagtctacgagggaatacagtagaggagcatcaccagagtggttgcacatgcagataggatcaggtggtttcgaaagaacgtcttgataaagaaacaacacttggtcatcatcttactacaaataagatctaaaagctctaatatcccgagaagaaaaagcatacatacatataaatctcattctcattataggtttaaatatatggatgtgaatatacacatcatattgttgttctgaagaaagcaaaatagaaaagaagatatagttagtttcgacatcaagaaaaaacaagctgggaagggtttaaagtagaagaaacctcttgtaaaagaaaaaacgtttgttgttataaaattgtatctcattctt

SEQ ID NO: 35683 - protein, 264 aa, Arabidopsis thaliana
  peptide (1)..(264): Ceres Seq. ID no. 13490631
MDPSGMMNEGGPFNLAEIWQFPLNGVSTAGDSSRRSFVGPNQFGDADLTTAANGDPARMSHALSQAVIEGISGAWKRREDESKSAKIVSTIGASEGENKRQKIDEVCDGKAEAESLGTETEQKKQQMEPTKDYIHVRARRGQATDSHSLAERARREKISERMKILQDLVPGCNKVIGKALVLDEIINYIQSLQRQVEFLSMKLEAVNSRMNPGIEVFPPKEFGQQAFENPEIQFGSQSTREYSRGASPEWLHMQIGSGGFERTS

SEQ ID NO: 35684 - protein, 259 aa, Arabidopsis thaliana
  peptide (1)..(259): Ceres Seq. ID no. 13490632
MMNEGGPFNLAEIWQFPLNGVSTAGDSSRRSFVGPNQFGDADLTTAANGDPARMSHALSQAVIEGISGAWKRREDESKSAKIVSTIGASEGENKRQKIDEVCDGKAEAESLGTETEQKKQQMEPTKDYIHVRARRGQATDSHSLAERARREKISERMKILQDLVPGCNKVIGKALVLDEIINYIQSLQRQVEFLSMKLEAVNSRMNPGIEVFPPKEFGQQAFENPEIQFGSQSTREYSRGASPEWLHMQIGSGGFERTS

SEQ ID NO: 35685 - protein, 258 aa, Arabidopsis thaliana
  peptide (1)..(258): Ceres Seq. ID no. 13490633
MNEGGPFNLAEIWQFPLNGVSTAGDSSRRSFVGPNQFGDADLTTAANGDPARMSHALSQAVIEGISGAWKRREDESKSAKIVSTIGASEGENKRQKIDEVCDGKAEAESLGTETEQKKQQMEPTKDYIHVRARRGQATDSHSLAERARREKISERMKILQDLVPGCNKVIGKALVLDEIINYIQSLQRQVEFLSMKLEAVNSRMNPGIEVFPPKEFGQQAFENPEIQFGSQSTREYSRGASPEWLHMQIGSGGFERTS

SEQ ID NO: 35686 - DNA, 1090 bp, Arabidopsis thaliana
  misc_feature (1)..(1090): Ceres Seq. ID no. 13490166
  misc_feature (1)..(1090): Ortholog of  Ceres SEQ ID NO 14304202 as cited in SEQ ID NO 56346
  misc_feature (1)..(1090): Ortholog of  Ceres SEQ ID NO 14304159 as cited in SEQ ID NO 56494
  misc_feature (1)..(1090): Ortholog of  Ceres SEQ ID NO 14314198 as cited in SEQ ID NO 57472
  misc_feature (1)..(1090): Ortholog of  Ceres SEQ ID NO 12613472 as cited in SEQ ID NO 60611
  misc_feature (1)..(1090): Ortholog of  Ceres SEQ ID NO 12623915 as cited in SEQ ID NO 61013
cttcacaatcctcataatcactttcgaaattacatttacgctttcttgcaatcaaattttccgatcttaagttcagaagacgatgtcagaggtggaaatagagaacgctgctacgatcgaaggaaacaccgctgcggatgcgccggtgacggatgcggccgttgagaagaagcctgcagcgaaaggacgaaagacgaagaatgttaaggaagtgaaggagaagaagactgttgctgccgctccgaagaagagaactgtttcatctcatcctacttacgaagagatgattaaggatgcgattgttacgttgaaagagagaactggatctagccaatacgcgattcagaagttcatcgaggagaagcgtaaggagcttcctccaacattcagaaagctgttgcttctcaatctgaagagactcgttgcttctgggaagcttgtgaaggtcaaagcctcgtttaaactcccatcggcgtcggctaaagcatcatcccctaaggcggcagcggagaaatctgctcctgcgaagaagaaaccggcgactgtggcggttaccaaggcgaagagaaaggtcgctgcggcttccaaggctaagaaaacaatcgccgttaaacctaagactgctgctgctaagaaagtgaccgcgaaggctaaggctaagcccgttcctcgtgccactgctgctgcaactaagaggaaagctgttgatgcgaagcccaaggctaaggctagaccagccaaggcagccaaaacggccaaggttacatctccggctaagaaagctgttgctgccacgaagaaagttgctacggtggccacaaagaagaagactccggttaagaaggttgtgaagccaaagacggttaagtctccagcaaagagggcttcttctagggttaagaagtgaagttagggtttgtaggtagaagaatggttaacgatagtttagacttgtataattcaatcatctttatgcgactttgtttgcttttcttctttcagtgttcttgttattcacagttcctttggactaccccttaaatcatatatagatttcatcaatgaagcaaactcgagtttctttgcagct

SEQ ID NO: 35687 - protein, 274 aa, Arabidopsis thaliana; identical to SEQ ID NO: 30943
  peptide (1)..(274): Ceres Seq. ID no. 13490167

SEQ ID NO: 35688 - protein, 207 aa, Arabidopsis thaliana; identical to SEQ ID NO: 30944
  peptide (1)..(207): Ceres Seq. ID no. 13490168

SEQ ID NO: 35689 - DNA, 1291 bp, Arabidopsis thaliana; identical to SEQ ID NO: 27363
  misc_feature (1)..(1291): Ceres Seq. ID no. 12337912
  misc_feature (1)..(1291): Ortholog of  Ceres SEQ ID NO 14312711 as cited in SEQ ID NO 1401
  misc_feature (1)..(1291): Ortholog of  Ceres SEQ ID NO 13586635 as cited in SEQ ID NO 14217
  misc_feature (1)..(1291): Ortholog of  Ceres SEQ ID NO 15170220 as cited in SEQ ID NO 55383
  misc_feature (1)..(1291): Ortholog of  Ceres SEQ ID NO 14304198 as cited in SEQ ID NO 56479
  misc_feature (1)..(1291): Ortholog of  Ceres SEQ ID NO 14316543 as cited in SEQ ID NO 57118
  misc_feature (1)..(1291): Ortholog of  Ceres SEQ ID NO 12616285 as cited in SEQ ID NO 63483

SEQ ID NO: 35690 - protein, 350 aa, Arabidopsis thaliana; identical to SEQ ID NO: 27364
  peptide (1)..(350): Ceres Seq. ID no. 12337913

SEQ ID NO: 35691 - protein, 331 aa, Arabidopsis thaliana; identical to SEQ ID NO: 21476
  peptide (1)..(331): Ceres Seq. ID no. 12337914

SEQ ID NO: 35692 - protein, 324 aa, Arabidopsis thaliana; identical to SEQ ID NO: 21477
  peptide (1)..(324): Ceres Seq. ID no. 12337915

SEQ ID NO: 35693 - DNA, 1918 bp, Arabidopsis thaliana
  misc_feature (1)..(1918): Ceres Seq. ID no. 13487554
  misc_feature (1)..(1918): Ortholog of  Ceres SEQ ID NO 14307896 as cited in SEQ ID NO 66915
  misc_feature (1)..(1918): Ortholog of  Ceres SEQ ID NO 13657008 as cited in SEQ ID NO 69164
acactgtgagattcaagtgtaaagtgctctctccccaatggctaatcaccaccgacttttacgcggcggcggatctccggccataatcggtggcagaatcacactcacagctttcgcttccactatcgcactcttcctcttcactctctccttcttcttcgcttcagattctaacgattctcctgatctccttcttcccggtgttgagtactctaatggagtcggatctagaagatccatgttggatatcaaatcggatccgcttaagccacggttgattcagatccggaaacaagctgatgatcatcggtcattagcattagcttatgcttcttacgcgagaaagcttaagctcgagaattcgaaactcgtcaggatcttcgctgatctttcgaggaattacacggatctgattaacaaaccgacgtatcgagctttgtatgattctgatggagcctcgattgaagaatctgtgcttaggcaatttgagaaagaagttaaggaacggattaaaatgactcgtcaagtgattgctgaagctaaagagtcttttgataatcagttgaagattcagaagctgaaagatacgattttcgctgttaacgaacagttaactaatgctaagaagcaaggtgcgttttcgagtttgatcgctgcgaaatcgattccgaaaggattgcattgtcttgctatgaggctgatggaagagaggattgctcaccctgagaagtatactgatgaagggaaagatagaccgcgggagctcgaggatccgaatctttaccattacgctatattttcggataatgtgattgcggcttcggtggttgtgaactctgctgtgaagaatgctaaggagccgtggaagcatgtttttcacgttgtgactgataagatgaatcttggagctatgcaggttatgtttaaactgaaggagtataaaggagctcatgtagaagttaaagctgttgaggattatacgtttttgaactcttcgtatgtgcctgtgttgaagcagttagaatctgcgaatcttcagaagttttatttcgagaataagctcgagaatgcgacgaaagataccacgaatatgaagttcaggaaccccaagtatttatctatattgaatcacttgaggttttatttacccgagatgtacccgaaactacataggatactgtttttggacgatgatgtggttgtgcagaaggatttaacgggtctgtgggagattgatatggatgggaaagtgaatggagctgtagagacttgttttgggtcgtttcatcggtacgctcaatacatgaatttctcacatcctttgatcaaagagaagtttaatcccaaagcatgtgcgtgggcgtatggaatgaacttctttgatcttgatgcttggagaagagagaagtgcacagaagaatatcactactggcaaaatctgaacgagaacagggctctatggaaactggggacgttaccaccgggactgatcaccttttactcaaccacaaagccgctggacaaatcatggcatgtgcttgggctgggttacaatccgagcattagcatggatgagatccgcaacgctgcagtggtacacttcaacggtaacatgaagccatggcttgacatagctatgaaccagtttcgaccactttggaccaaacacgtcgactatgacctcgagtttgttcaggcttgcaattttggcctctgaactatgaaaattttctttatcatcaaaatctgaaagcatatgttgtttgttacttcagctctacgaagttttaaccttagtttttgtttgtgtttatttatatatttttgggggtttagtagaacacttgtattttgttcatagctatctttgttctatggcaacctataatcaaagcttaattataaagtcacattatgc

SEQ ID NO: 35694 - protein, 559 aa, Arabidopsis thaliana
  peptide (1)..(559): Ceres Seq. ID no. 13487555
MANHHRLLRGGGSPAIIGGRITLTAFASTIALFLFTLSFFFASDSNDSPDLLLPGVEYSNGVGSRRSMLDIKSDPLKPRLIQIRKQADDHRSLALAYASYARKLKLENSKLVRIFADLSRNYTDLINKPTYRALYDSDGASIEESVLRQFEKEVKERIKMTRQVIAEAKESFDNQLKIQKLKDTIFAVNEQLTNAKKQGAFSSLIAAKSIPKGLHCLAMRLMEERIAHPEKYTDEGKDRPRELEDPNLYHYAIFSDNVIAASVVVNSAVKNAKEPWKHVFHVVTDKMNLGAMQVMFKLKEYKGAHVEVKAVEDYTFLNSSYVPVLKQLESANLQKFYFENKLENATKDTTNMKFRNPKYLSILNHLRFYLPEMYPKLHRILFLDDDVVVQKDLTGLWEIDMDGKVNGAVETCFGSFHRYAQYMNFSHPLIKEKFNPKACAWAYGMNFFDLDAWRREKCTEEYHYWQNLNENRALWKLGTLPPGLITFYSTTKPLDKSWHVLGLGYNPSISMDEIRNAAVVHFNGNMKPWLDIAMNQFRPLWTKHVDYDLEFVQACNFGL

SEQ ID NO: 35695 - protein, 492 aa, Arabidopsis thaliana
  peptide (1)..(492): Ceres Seq. ID no. 13487556
MLDIKSDPLKPRLIQIRKQADDHRSLALAYASYARKLKLENSKLVRIFADLSRNYTDLINKPTYRALYDSDGASIEESVLRQFEKEVKERIKMTRQVIAEAKESFDNQLKIQKLKDTIFAVNEQLTNAKKQGAFSSLIAAKSIPKGLHCLAMRLMEERIAHPEKYTDEGKDRPRELEDPNLYHYAIFSDNVIAASVVVNSAVKNAKEPWKHVFHVVTDKMNLGAMQVMFKLKEYKGAHVEVKAVEDYTFLNSSYVPVLKQLESANLQKFYFENKLENATKDTTNMKFRNPKYLSILNHLRFYLPEMYPKLHRILFLDDDVVVQKDLTGLWEIDMDGKVNGAVETCFGSFHRYAQYMNFSHPLIKEKFNPKACAWAYGMNFFDLDAWRREKCTEEYHYWQNLNENRALWKLGTLPPGLITFYSTTKPLDKSWHVLGLGYNPSISMDEIRNAAVVHFNGNMKPWLDIAMNQFRPLWTKHVDYDLEFVQACNFGL

SEQ ID NO: 35696 - protein, 400 aa, Arabidopsis thaliana
  peptide (1)..(400): Ceres Seq. ID no. 13487557
MTRQVIAEAKESFDNQLKIQKLKDTIFAVNEQLTNAKKQGAFSSLIAAKSIPKGLHCLAMRLMEERIAHPEKYTDEGKDRPRELEDPNLYHYAIFSDNVIAASVVVNSAVKNAKEPWKHVFHVVTDKMNLGAMQVMFKLKEYKGAHVEVKAVEDYTFLNSSYVPVLKQLESANLQKFYFENKLENATKDTTNMKFRNPKYLSILNHLRFYLPEMYPKLHRILFLDDDVVVQKDLTGLWEIDMDGKVNGAVETCFGSFHRYAQYMNFSHPLIKEKFNPKACAWAYGMNFFDLDAWRREKCTEEYHYWQNLNENRALWKLGTLPPGLITFYSTTKPLDKSWHVLGLGYNPSISMDEIRNAAVVHFNGNMKPWLDIAMNQFRPLWTKHVDYDLEFVQACNFGL

SEQ ID NO: 35697 - DNA, 1525 bp, Arabidopsis thaliana
  misc_feature (1)..(1525): Ceres Seq. ID no. 12481850
  misc_feature (1)..(1525): Ortholog of  Ceres SEQ ID NO 13660024 as cited in SEQ ID NO 67241
aattctttgtaataaatatcttcaattcgtaaatgtcttggcctttgtcgttttcaaacttcaacatcagcatcacgtgattggctaatacaaataaaattttctctttattttattattttgccacaagccgtgaaaagatggagaaaatgaatgtccgttttatgattgtgttgatggtaatgtctctggttctgggtttttcgtcggcagttgatttcagatggaggaaaactgcaggattctcagatagattcaccagagctgtttcttcagtcgtgttcccagttcatggcaacgtttatcctcttgggtactataatgtaaccatcaacataggacaaccaccaagaccttattatcttgatcttgatactggtagtgatctcacttggctccaatgtgatgctccttgtgttcgttgcttggaggcgcctcatccactgtatcagcctagtagtgatcttattccttgcaatgatccactgtgtaaggctttgcatttgaatagtaatcagagatgtgagactccagagcaatgtgactatgaggttgagtatgctgatggaggatcttctctcggtgttcttgttagagatgtcttctctatgaactatacacagggtctccggctcactccccgtcttgctctaggttgtggatacgatcaaatcccaggggcttcgagtcatcatcctctagatggagtattagggcttggtagggggaaagtaagcattctgtcacagcttcatagccaaggttatgtaaagaatgttatcggtcattgcctaagcagtttaggtggaggaattctcttttttggcgacgatctttatgattcttcaagagtctcatggacaccaatgtctcgtgaatactcaaaacactactctcctgcaatgggaggggaacttctattcgggggaagaacaacaggattgaagaatctattaacagtatttgacagtggaagttcttacacatacttcaattccaaggcataccaagccgtaacatatttgctaaagagagaactaagcggaaaaccgttgaaagaagcacgggatgaccacacgctgcctctatgctggcaaggacgtagaccattcatgagcattgaagaagtcaagaagtatttcaagcctctagctcttagcttcaaaacaggctggagatcaaaaactctgtttgagatacccccagaagcttatctaatcatttctatgaaggggaatgtatgtttgggaatcttgaatggcacagaaataggtctccagaacctaaacctcatcggcgatatatcgatgcaagatcagatgataatctacgataacgagaaacaatcaatcgggtggatgccagtggattgcgatgaacttgcttcactaaaagcagctcaagtatatgaatactgagaatgttatatatagttgggacaagcaagagctcatagttgtaattagatatttgtatgtactgattggatcaaatcctatgacaattgagttacatgatgatactt

SEQ ID NO: 35698 - protein, 425 aa, Arabidopsis thaliana
  peptide (1)..(425): Ceres Seq. ID no. 12481851
MEKMNVRFMIVLMVMSLVLGFSSAVDFRWRKTAGFSDRFTRAVSSVVFPVHGNVYPLGYYNVTINIGQPPRPYYLDLDTGSDLTWLQCDAPCVRCLEAPHPLYQPSSDLIPCNDPLCKALHLNSNQRCETPEQCDYEVEYADGGSSLGVLVRDVFSMNYTQGLRLTPRLALGCGYDQIPGASSHHPLDGVLGLGRGKVSILSQLHSQGYVKNVIGHCLSSLGGGILFFGDDLYDSSRVSWTPMSREYSKHYSPAMGGELLFGGRTTGLKNLLTVFDSGSSYTYFNSKAYQAVTYLLKRELSGKPLKEARDDHTLPLCWQGRRPFMSIEEVKKYFKPLALSFKTGWRSKTLFEIPPEAYLIISMKGNVCLGILNGTEIGLQNLNLIGDISMQDQMIIYDNEKQSIGWMPVDCDELASLKAAQVYEY

SEQ ID NO: 35699 - protein, 422 aa, Arabidopsis thaliana
  peptide (1)..(422): Ceres Seq. ID no. 12481852
MNVRFMIVLMVMSLVLGFSSAVDFRWRKTAGFSDRFTRAVSSVVFPVHGNVYPLGYYNVTINIGQPPRPYYLDLDTGSDLTWLQCDAPCVRCLEAPHPLYQPSSDLIPCNDPLCKALHLNSNQRCETPEQCDYEVEYADGGSSLGVLVRDVFSMNYTQGLRLTPRLALGCGYDQIPGASSHHPLDGVLGLGRGKVSILSQLHSQGYVKNVIGHCLSSLGGGILFFGDDLYDSSRVSWTPMSREYSKHYSPAMGGELLFGGRTTGLKNLLTVFDSGSSYTYFNSKAYQAVTYLLKRELSGKPLKEARDDHTLPLCWQGRRPFMSIEEVKKYFKPLALSFKTGWRSKTLFEIPPEAYLIISMKGNVCLGILNGTEIGLQNLNLIGDISMQDQMIIYDNEKQSIGWMPVDCDELASLKAAQVYEY

SEQ ID NO: 35700 - protein, 417 aa, Arabidopsis thaliana
  peptide (1)..(417): Ceres Seq. ID no. 12481853
MIVLMVMSLVLGFSSAVDFRWRKTAGFSDRFTRAVSSVVFPVHGNVYPLGYYNVTINIGQPPRPYYLDLDTGSDLTWLQCDAPCVRCLEAPHPLYQPSSDLIPCNDPLCKALHLNSNQRCETPEQCDYEVEYADGGSSLGVLVRDVFSMNYTQGLRLTPRLALGCGYDQIPGASSHHPLDGVLGLGRGKVSILSQLHSQGYVKNVIGHCLSSLGGGILFFGDDLYDSSRVSWTPMSREYSKHYSPAMGGELLFGGRTTGLKNLLTVFDSGSSYTYFNSKAYQAVTYLLKRELSGKPLKEARDDHTLPLCWQGRRPFMSIEEVKKYFKPLALSFKTGWRSKTLFEIPPEAYLIISMKGNVCLGILNGTEIGLQNLNLIGDISMQDQMIIYDNEKQSIGWMPVDCDELASLKAAQVYEY

SEQ ID NO: 35701 - DNA, 1873 bp, Arabidopsis thaliana
  misc_feature (1)..(1873): Ceres Seq. ID no. 12370436
  misc_feature (1)..(1873): Ortholog of  Ceres SEQ ID NO 15174547 as cited in SEQ ID NO 59586
  misc_feature (1)..(1873): Ortholog of  Ceres SEQ ID NO 15169470 as cited in SEQ ID NO 66036
acatcaaaaccgcctccatttctcattctctctctctctaaaaaaccaaatccagagtcagagaaaatctgtgatggctctttccaacgcctcctctctctccaccagatctatctacggcggtgatctttctcaccgtccaagcaaccgtcaatcatccttcacatttcatccggccgtcaacaccaagcctaaatccgctaacctcgtcacggcggtacacgcggctgagccagctagaaacgctgtttcagtcaaggaatccgttgcgtcttcttcgtctggtgcattgaaatggactccagagagctggaaactgaagaaggctctgcaacttcctgattatcctaacgccaatgagcttgagtctgtgcttaaaacgatagaggcttttcctccgattgttttcgccggagaagctaggaatcttgaagagagattggctgatgctgctgttggtaaagcttttcttctccaaggaggtgattgtgctgagagtttcaaggagttcaatgctactaatatcagagacaccttcagggttctgcttcagatgagtattgttcttacattcggtggccaggttccggtcattaaggttgggaggatggctggtcaatttgcaaagcctagatctgatgcatttgaggagaaggatggagtgaaattaccaagctacaagggagataacatcaatggtgatacttttgatgagaaatccaggattcctgatcctaataggatgattcgagcttacactcaatctgcagctactttgaatcttcttagagcctttgccactggaggttacgctgctattcaaagagttactcaatggaaccttgattttgttgaacaaagtgagcaagctgacaggtaccaggaattagctaatagggttgatgaggccttggggttcatgtctgcatgtggacttggcacggatcatccacttatgactacaactgatttctacacatcccatgagtgtttgcttctgccttatgaacagtcccttacaaggttggattcaacttctggtctctactatgattgttctgcacacatggtctggtgcggagagcgtaccagacaattggatggcgctcatgtcgagtttctcagggggattgctaatcctctgggcattaaggtgagcaacaaaatggatcccaatgagctggttaagctagtagaaatcctgaatcctaataacaagcctggaagaatcactgtaattgtgagaatgggtgctgagaacatgagagttaagcttccccacctgatcagagcagtccgcagatcaggccagattgtgacatgggtctgcgatccaatgcatggaaacaccatcaaagcaccttgcggtcttaaaacacgtgcctttgactcaatactggctgaagtccgagcattccttgatgtgcacgagcaagaaggaagccacgcgggcggtatccatctcgagatgacaggtcagaacgtgacagaatgcattggagggtcccgcactgtgacctacgatgacctcagttctcgctaccacacacactgtgacccaaggctgaacgcgtcacagtctcttgaacttgccttcattgttgcagaacggctcaggaagagaagaacgggtagccagcgtgtgtcttgagtccggttcttcccttttatacactttttgattccaaacaactcttttctctttgtcctgtgactgtgagttggtgtctttatgacctaagttaaaagccccaaaagcctctctaggaggagtaaacctgtttctgctgtggacagaccatgtcatgtcattgttctttatgttaactttaatgtcaaaccgtgtcacttacactagtgtatatttcttttc

SEQ ID NO: 35702 - protein, 549 aa, Arabidopsis thaliana
  peptide (1)..(549): Ceres Seq. ID no. 12370437
HQNRLHFSFSLSLKNQIQSQRKSVMALSNASSLSTRSIYGGDLSHRPSNRQSSFTFHPAVNTKPKSANLVTAVHAAEPARNAVSVKESVASSSSGALKWTPESWKLKKALQLPDYPNANELESVLKTIEAFPPIVFAGEARNLEERLADAAVGKAFLLQGGDCAESFKEFNATNIRDTFRVLLQMSIVLTFGGQVPVIKVGRMAGQFAKPRSDAFEEKDGVKLPSYKGDNINGDTFDEKSRIPDPNRMIRAYTQSAATLNLLRAFATGGYAAIQRVTQWNLDFVEQSEQADRYQELANRVDEALGFMSACGLGTDHPLMTTTDFYTSHECLLLPYEQSLTRLDSTSGLYYDCSAHMVWCGERTRQLDGAHVEFLRGIANPLGIKVSNKMDPNELVKLVEILNPNNKPGRITVIVRMGAENMRVKLPHLIRAVRRSGQIVTWVCDPMHGNTIKAPCGLKTRAFDSILAEVRAFLDVHEQEGSHAGGIHLEMTGQNVTECIGGSRTVTYDDLSSRYHTHCDPRLNASQSLELAFIVAERLRKRRTGSQRVS

SEQ ID NO: 35703 - protein, 525 aa, Arabidopsis thaliana
  peptide (1)..(525): Ceres Seq. ID no. 12370438
MALSNASSLSTRSIYGGDLSHRPSNRQSSFTFHPAVNTKPKSANLVTAVHAAEPARNAVSVKESVASSSSGALKWTPESWKLKKALQLPDYPNANELESVLKTIEAFPPIVFAGEARNLEERLADAAVGKAFLLQGGDCAESFKEFNATNIRDTFRVLLQMSIVLTFGGQVPVIKVGRMAGQFAKPRSDAFEEKDGVKLPSYKGDNINGDTFDEKSRIPDPNRMIRAYTQSAATLNLLRAFATGGYAAIQRVTQWNLDFVEQSEQADRYQELANRVDEALGFMSACGLGTDHPLMTTTDFYTSHECLLLPYEQSLTRLDSTSGLYYDCSAHMVWCGERTRQLDGAHVEFLRGIANPLGIKVSNKMDPNELVKLVEILNPNNKPGRITVIVRMGAENMRVKLPHLIRAVRRSGQIVTWVCDPMHGNTIKAPCGLKTRAFDSILAEVRAFLDVHEQEGSHAGGIHLEMTGQNVTECIGGSRTVTYDDLSSRYHTHCDPRLNASQSLELAFIVAERLRKRRTGSQRVS

SEQ ID NO: 35704 - protein, 365 aa, Arabidopsis thaliana
  peptide (1)..(365): Ceres Seq. ID no. 12370439
MSIVLTFGGQVPVIKVGRMAGQFAKPRSDAFEEKDGVKLPSYKGDNINGDTFDEKSRIPDPNRMIRAYTQSAATLNLLRAFATGGYAAIQRVTQWNLDFVEQSEQADRYQELANRVDEALGFMSACGLGTDHPLMTTTDFYTSHECLLLPYEQSLTRLDSTSGLYYDCSAHMVWCGERTRQLDGAHVEFLRGIANPLGIKVSNKMDPNELVKLVEILNPNNKPGRITVIVRMGAENMRVKLPHLIRAVRRSGQIVTWVCDPMHGNTIKAPCGLKTRAFDSILAEVRAFLDVHEQEGSHAGGIHLEMTGQNVTECIGGSRTVTYDDLSSRYHTHCDPRLNASQSLELAFIVAERLRKRRTGSQRVS

SEQ ID NO: 35705 - DNA, 1235 bp, Arabidopsis thaliana
  misc_feature (1)..(1235): Ceres Seq. ID no. 12328499
  misc_feature (1)..(1235): Ortholog of  Ceres SEQ ID NO 12635446 as cited in SEQ ID NO 0
aatttagggttttcattttacccatttcctctctttgtacgaacaaagtgcttcgagtttttgttaacctttttctctgatctaatggcgatggaagatcaatcggcggcgagatctatcggaaaagttagttggtttagcgatggaaaaggctacggtttcattactcccgatgatggcggcgaagagctttttgttcatcaatcctcaattgtctccgatggattccgtagcttgactcttggtgaatcggttgaatacgaaatcgcgcttggaagcgacggaaagactaaggccattgaagttactgctcccggcggcggttcacttaataagaaggaaaacagctcccgtggatccggaggtaattgttttaattgcggtgaggttggtcatatggctaaggattgtgacggtggaagtggtgggaaaagctttggaggtggtggtggtcgtagatctggcggcgaaggtgaatgttacatgtgtggtgatgtgggacacttcgctagggattgtaggcaaagcggtggtggaaacagcggcggaggaggaggaggtggtcgtccgtgttacagttgcggtgaggttggtcatttggcaaaggattgtcgtggtggttctggtggaaacagatacggaggaggtggtggtcgtggatctggcggtgatggatgctacatgtgtggtggtgtgggacatttcgctagggattgtaggcaaaacggcggtggaaacgttggaggtggtggaagcacttgttatacctgtggcggagttggccacattgcgaaagtttgcaccagcaagataccttctggtggtggtggtggtggtcgtgcttgttacgaatgtggaggaactggccatttggctcgtgactgtgatcggagaggaagtggaagcagcggaggtggcggtggcagtaacaagtgcttcatctgcggcaaggaaggtcactttgcgagggaatgtacttcggttgcttaacaaaaagatgcaaagaagaagagtaatgttcataaacctcttttgttttctattaaaatctacctaatgctcctttttggtgactataatgtgattgctaaagtcgtttaggatgtttaagaatggttgttttgggagtttttgatctctctatattactcttttgactggtttatgcaacctgttcgttcactgcttttgttgatgccataagtttgagatcttgaatgatatgtgtgcttgcg

SEQ ID NO: 35706 - protein, 329 aa, Arabidopsis thaliana
  peptide (1)..(329): Ceres Seq. ID no. 12328500
NLGFSFYPFPLFVRTKCFEFLLTFFSDLMAMEDQSAARSIGKVSWFSDGKGYGFITPDDGGEELFVHQSSIVSDGFRSLTLGESVEYEIALGSDGKTKAIEVTAPGGGSLNKKENSSRGSGGNCFNCGEVGHMAKDCDGGSGGKSFGGGGGRRSGGEGECYMCGDVGHFARDCRQSGGGNSGGGGGGGRPCYSCGEVGHLAKDCRGGSGGNRYGGGGGRGSGGDGCYMCGGVGHFARDCRQNGGGNVGGGGSTCYTCGGVGHIAKVCTSKIPSGGGGGGRACYECGGTGHLARDCDRRGSGSSGGGGGSNKCFICGKEGHFARECTSVA

SEQ ID NO: 35707 - protein, 301 aa, Arabidopsis thaliana
  peptide (1)..(301): Ceres Seq. ID no. 12328501
MAMEDQSAARSIGKVSWFSDGKGYGFITPDDGGEELFVHQSSIVSDGFRSLTLGESVEYEIALGSDGKTKAIEVTAPGGGSLNKKENSSRGSGGNCFNCGEVGHMAKDCDGGSGGKSFGGGGGRRSGGEGECYMCGDVGHFARDCRQSGGGNSGGGGGGGRPCYSCGEVGHLAKDCRGGSGGNRYGGGGGRGSGGDGCYMCGGVGHFARDCRQNGGGNVGGGGSTCYTCGGVGHIAKVCTSKIPSGGGGGGRACYECGGTGHLARDCDRRGSGSSGGGGGSNKCFICGKEGHFARECTSVA

SEQ ID NO: 35708 - protein, 299 aa, Arabidopsis thaliana
  peptide (1)..(299): Ceres Seq. ID no. 12328502
MEDQSAARSIGKVSWFSDGKGYGFITPDDGGEELFVHQSSIVSDGFRSLTLGESVEYEIALGSDGKTKAIEVTAPGGGSLNKKENSSRGSGGNCFNCGEVGHMAKDCDGGSGGKSFGGGGGRRSGGEGECYMCGDVGHFARDCRQSGGGNSGGGGGGGRPCYSCGEVGHLAKDCRGGSGGNRYGGGGGRGSGGDGCYMCGGVGHFARDCRQNGGGNVGGGGSTCYTCGGVGHIAKVCTSKIPSGGGGGGRACYECGGTGHLARDCDRRGSGSSGGGGGSNKCFICGKEGHFARECTSVA

SEQ ID NO: 35709 - DNA, 1335 bp, Arabidopsis thaliana
  misc_feature (1)..(1335): Ceres Seq. ID no. 13490502
  misc_feature (1)..(1335): Ortholog of  Ceres SEQ ID NO 12578784 as cited in SEQ ID NO 20729
  misc_feature (1)..(1335): Ortholog of  Ceres SEQ ID NO 13658847 as cited in SEQ ID NO 66674
acatcttccttgtttcttctctctctctctctcccctcaaacttaaattcacattttaatacttgttacttcaactataataataataataatctttcttcattatatattttcctctcctctcagatcttctctctcaccatcttctcttgagatcaagattgagtattcttgtctcaagaatcgatactcgagagctcttatggaccaaaatggtcataacgacgaagcagaaacagtttcatgcggcaacggcaactgcaaaagcaagatcgtgcctggagatgatcacggtggagatgagagtagtggtaccaagagaaggaagaagagaaaaacgcaacaaaagacaatgaaacgacgtgaattaatgtcgtattgtgagctaccggagtacatgaaagacaacgaatacatattgaattattacagagctgattggtccattagagatgctttcttcagcgtatttagtttccacaatgagtccctcaatgtttggacacatttgattggttttatcttctttgtggcactaaccgtcgccaatattattcatcacgacggattcttccccgtggatgcaaagagtccagggaatgtaacaagatggcccttcttcgttttcttaggaggctcaatgttctgcctactcgcaagcagcatttgtcacctcttctgttgccactcaaaagagcttaatgtcttccttctccgaatagactatgccggtatcaccgccatgatcatcacttccttcttcccaccaatcttctacatcttccagtgcactcctcggtggtacttcatctacctcgcaggcatcacatccatgggaatcttcacaatcatcacacttttcaccccatcactttccgctcccaagtaccgagctttccgcgctttgctctttgcctccatggggctgtttgggattgtcccagctgcccacgcgctagtggtcaattggggaaacccgcaaaggaacgtgacgctcgtgtacgagttgcttatggcagtgttctatcttgttggaacaggattctacgtagggagagtgccagaaaggcttaaaccgggatggtttgatcgtgtgggacatagtcatcagatcttccatgtgttcgttttgttgggtgctttgtctcactatgcagctgctctcttgttcttggactggcgtgaccacgttggttgttaaaccatatatttgtaattcttttaaatataatattattaatttgttgtatcgtggtgaacaaaattgtaataacccatttgttttaaattgaattgtaattcaacttgtgttaattgttatgtttgttgaatacg

SEQ ID NO: 35710 - protein, 332 aa, Arabidopsis thaliana
  peptide (1)..(332): Ceres Seq. ID no. 13490503
MDQNGHNDEAETVSCGNGNCKSKIVPGDDHGGDESSGTKRRKKRKTQQKTMKRRELMSYCELPEYMKDNEYILNYYRADWSIRDAFFSVFSFHNESLNVWTHLIGFIFFVALTVANIIHHDGFFPVDAKSPGNVTRWPFFVFLGGSMFCLLASSICHLFCCHSKELNVFLLRIDYAGITAMIITSFFPPIFYIFQCTPRWYFIYLAGITSMGIFTIITLFTPSLSAPKYRAFRALLFASMGLFGIVPAAHALVVNWGNPQRNVTLVYELLMAVFYLVGTGFYVGRVPERLKPGWFDRVGHSHQIFHVFVLLGALSHYAAALLFLDWRDHVGC

SEQ ID NO: 35711 - protein, 282 aa, Arabidopsis thaliana
  peptide (1)..(282): Ceres Seq. ID no. 13490504
MKRRELMSYCELPEYMKDNEYILNYYRADWSIRDAFFSVFSFHNESLNVWTHLIGFIFFVALTVANIIHHDGFFPVDAKSPGNVTRWPFFVFLGGSMFCLLASSICHLFCCHSKELNVFLLRIDYAGITAMIITSFFPPIFYIFQCTPRWYFIYLAGITSMGIFTIITLFTPSLSAPKYRAFRALLFASMGLFGIVPAAHALVVNWGNPQRNVTLVYELLMAVFYLVGTGFYVGRVPERLKPGWFDRVGHSHQIFHVFVLLGALSHYAAALLFLDWRDHVGC

SEQ ID NO: 35712 - protein, 276 aa, Arabidopsis thaliana
  peptide (1)..(276): Ceres Seq. ID no. 13490505
MSYCELPEYMKDNEYILNYYRADWSIRDAFFSVFSFHNESLNVWTHLIGFIFFVALTVANIIHHDGFFPVDAKSPGNVTRWPFFVFLGGSMFCLLASSICHLFCCHSKELNVFLLRIDYAGITAMIITSFFPPIFYIFQCTPRWYFIYLAGITSMGIFTIITLFTPSLSAPKYRAFRALLFASMGLFGIVPAAHALVVNWGNPQRNVTLVYELLMAVFYLVGTGFYVGRVPERLKPGWFDRVGHSHQIFHVFVLLGALSHYAAALLFLDWRDHVGC

SEQ ID NO: 35713 - DNA, 1217 bp, Arabidopsis thaliana
  misc_feature (1)..(1217): Ceres Seq. ID no. 12338444
  misc_feature (1)..(1217): Ortholog of  Ceres SEQ ID NO 14316124 as cited in SEQ ID NO 50904
  misc_feature (1)..(1217): Ortholog of  Ceres SEQ ID NO 13585382 as cited in SEQ ID NO 63889
attatatccaaaacaaaatctctttaactctctctattttgctcaatcttaatcgtccaatcaaaacactccgactaaaaatggctgcatctaacggcgagaaaagcttgatcgtgagcttcggtgaaatgctcatcgatttcgtcccaaccgtctccggtgtatccctcgccgatgctcctggcttcatcaaagcccctggtggtgcacctgccaacgttgccatcgccatttcccgtcttggcggtcgtgccgctttcgttggaaaactcggtgacgacgagttcggtcacatgctcgccggaatcttgaaacagaacggtgtctctgctgaaggtatcaatttcgacaccggagccaggactgcacttgcgttcgtgacactaagatctgatggagaacgtgagttcatgttctaccggaaccctagtgccgatatgctcctccgtcccgacgagctcaatcttgatgtcatcagatctgctaaggtgttccactacggatccataagcttgatcgttgagccatgtcgatctgctcacttgaaagccatggaggtggctaaggaagctggtgcgttgctttcatatgatccgaacttgaggcttcctttgtggccctcgaaggaggaggctcagaagcagattcttagcatctgggacaaagctgaagtgatcaaagtcagcgatgaagagcttatgttcttgactggatctgataaggttgatgatgagactgctttgtctctgtggcactctaatctgaaacttctcttggtcactctaggtgaaaagggttgtagttactacaccaagagcttccgtggatctgttgatcccttccatgtggatgcagtagatacaactggtgctggtgattcatttgttggtgcattgctttgcaagattgttgatgaccgtgctgtgcttgaggacgaagctcgtctgagagaagtgcttaggtttgcgaatgcttgtggagccatcacaacaacaaagaaaggagctattccagctctccctacagagtctgaagttcagagcctcctgaaaggaaactgatttcacaatgtctggatttttaggatttcaagttttaccttttcttggctttgttttttattttcccctgcttttggctctgtgttcttgtagaaccgttctattctgttatgaatctcgttttattccaattgcaaggttttttgtcgtttgagc

SEQ ID NO: 35714 - protein, 352 aa, Arabidopsis thaliana
  peptide (1)..(352): Ceres Seq. ID no. 12338445
YIQNKISLTLSILLNLNRPIKTLRLKMAASNGEKSLIVSFGEMLIDFVPTVSGVSLADAPGFIKAPGGAPANVAIAISRLGGRAAFVGKLGDDEFGHMLAGILKQNGVSAEGINFDTGARTALAFVTLRSDGEREFMFYRNPSADMLLRPDELNLDVIRSAKVFHYGSISLIVEPCRSAHLKAMEVAKEAGALLSYDPNLRLPLWPSKEEAQKQILSIWDKAEVIKVSDEELMFLTGSDKVDDETALSLWHSNLKLLLVTLGEKGCSYYTKSFRGSVDPFHVDAVDTTGAGDSFVGALLCKIVDDRAVLEDEARLREVLRFANACGAITTTKKGAIPALPTESEVQSLLKGN

SEQ ID NO: 35715 - protein, 326 aa, Arabidopsis thaliana
  peptide (1)..(326): Ceres Seq. ID no. 12338447
MAASNGEKSLIVSFGEMLIDFVPTVSGVSLADAPGFIKAPGGAPANVAIAISRLGGRAAFVGKLGDDEFGHMLAGILKQNGVSAEGINFDTGARTALAFVTLRSDGEREFMFYRNPSADMLLRPDELNLDVIRSAKVFHYGSISLIVEPCRSAHLKAMEVAKEAGALLSYDPNLRLPLWPSKEEAQKQILSIWDKAEVIKVSDEELMFLTGSDKVDDETALSLWHSNLKLLLVTLGEKGCSYYTKSFRGSVDPFHVDAVDTTGAGDSFVGALLCKIVDDRAVLEDEARLREVLRFANACGAITTTKKGAIPALPTESEVQSLLKGN

SEQ ID NO: 35716 - protein, 310 aa, Arabidopsis thaliana
  peptide (1)..(310): Ceres Seq. ID no. 12338448
MLIDFVPTVSGVSLADAPGFIKAPGGAPANVAIAISRLGGRAAFVGKLGDDEFGHMLAGILKQNGVSAEGINFDTGARTALAFVTLRSDGEREFMFYRNPSADMLLRPDELNLDVIRSAKVFHYGSISLIVEPCRSAHLKAMEVAKEAGALLSYDPNLRLPLWPSKEEAQKQILSIWDKAEVIKVSDEELMFLTGSDKVDDETALSLWHSNLKLLLVTLGEKGCSYYTKSFRGSVDPFHVDAVDTTGAGDSFVGALLCKIVDDRAVLEDEARLREVLRFANACGAITTTKKGAIPALPTESEVQSLLKGN

SEQ ID NO: 35717 - DNA, 1100 bp, Arabidopsis thaliana
  misc_feature (1)..(1100): Ceres Seq. ID no. 12394844
  misc_feature (1)..(1100): Ortholog of  Ceres SEQ ID NO 12562983 as cited in SEQ ID NO 53309
  misc_feature (1)..(1100): Ortholog of  Ceres SEQ ID NO 14309224 as cited in SEQ ID NO 0
aaacacaacacaacacaatatctttcaactcaaaatctttttcatttctctgtatcctcctcatatttttattcttttgtaatgacaggttgctttagcttgtctgaagcattagaacgaacttacaaatccgggttcaaaagatccggtctacgacccgtaaccatcgacttgaaagatggaaccgtagtcaacttttgggtatccaaaaccaaacccgaatccaaacccaaacctaatctcctcctcatccacggcctcggagctactgccatctggcaatggtacgacgtagctcgccgtctctcacgttatttcaacctctacatccccgacctagtcttcttcggcggatcttccacgacccgacccgaaagatccgatattttccaagcccaaacactcatgcgggccttagaagcccaatccgtcaaaaagtttagcctcgtcggtcttagctacggcggattcgttggttatcgaatggcgtcgatgtacgcagacgcggtggagaaggtggtgatatgctgcgccgccgtgtgcgtggaggagaaagatatgaaagccggtgttttcaaggtgtcggatcttgatgaagcttcgaagattcttgtgccggagtctgtgaaaaagctccgggaacttatgggttacatattttacaaaccggcgttggcaagactggttcctacttgtcttctccatgatttcatcgaacatgctttgacaagagataatatggaagagaagagagaactgatcaaagccataccaaaagacagaataatctcagagattccaaagctcaaacagccaacattgataatatggggagagcatgatcaagtgttcccattggagatgggcaagagacttgagaagcatgtaggagataatgggaaactcgttatcatcaagagaactggtcatatctttaacttcgagaaacctaaaaagtttatcaaacttctcaaatcttttcttctagagactagtaaaccacagattcctgtctctaatgtttgattcttagtcatcgttttgaagatcctctcataagtaatttccaaggattaataacatatatatcattttcacat

SEQ ID NO: 35718 - protein, 341 aa, Arabidopsis thaliana
  peptide (1)..(341): Ceres Seq. ID no. 12394845
KHNTTQYLSTQNLFHFSVSSSYFYSFVMTGCFSLSEALERTYKSGFKRSGLRPVTIDLKDGTVVNFWVSKTKPESKPKPNLLLIHGLGATAIWQWYDVARRLSRYFNLYIPDLVFFGGSSTTRPERSDIFQAQTLMRALEAQSVKKFSLVGLSYGGFVGYRMASMYADAVEKVVICCAAVCVEEKDMKAGVFKVSDLDEASKILVPESVKKLRELMGYIFYKPALARLVPTCLLHDFIEHALTRDNMEEKRELIKAIPKDRIISEIPKLKQPTLIIWGEHDQVFPLEMGKRLEKHVGDNGKLVIIKRTGHIFNFEKPKKFIKLLKSFLLETSKPQIPVSNV

SEQ ID NO: 35719 - protein, 314 aa, Arabidopsis thaliana
  peptide (1)..(314): Ceres Seq. ID no. 12394846
MTGCFSLSEALERTYKSGFKRSGLRPVTIDLKDGTVVNFWVSKTKPESKPKPNLLLIHGLGATAIWQWYDVARRLSRYFNLYIPDLVFFGGSSTTRPERSDIFQAQTLMRALEAQSVKKFSLVGLSYGGFVGYRMASMYADAVEKVVICCAAVCVEEKDMKAGVFKVSDLDEASKILVPESVKKLRELMGYIFYKPALARLVPTCLLHDFIEHALTRDNMEEKRELIKAIPKDRIISEIPKLKQPTLIIWGEHDQVFPLEMGKRLEKHVGDNGKLVIIKRTGHIFNFEKPKKFIKLLKSFLLETSKPQIPVSNV

SEQ ID NO: 35720 - protein, 206 aa, Arabidopsis thaliana
  peptide (1)..(206): Ceres Seq. ID no. 12394847
MRALEAQSVKKFSLVGLSYGGFVGYRMASMYADAVEKVVICCAAVCVEEKDMKAGVFKVSDLDEASKILVPESVKKLRELMGYIFYKPALARLVPTCLLHDFIEHALTRDNMEEKRELIKAIPKDRIISEIPKLKQPTLIIWGEHDQVFPLEMGKRLEKHVGDNGKLVIIKRTGHIFNFEKPKKFIKLLKSFLLETSKPQIPVSNV

SEQ ID NO: 35721 - DNA, 802 bp, Arabidopsis thaliana
  misc_feature (1)..(802): Ceres Seq. ID no. 12393581
  misc_feature (1)..(802): Ortholog of  Ceres SEQ ID NO 14303993 as cited in SEQ ID NO 53511
aagcatcactatgctcgaaaatctctctttgttcgctttgtggggaacgaactatggccgagagatggaggaacacggctctactcgtcatcgacatgcagaacgatttcatagaggaaggtgctgtgacgcaagtgaaaggaggaaaatctatagttcctaatgttatcagagtcgtcgaactcgcgaggcagcgtggtattctcgtaatttgggttgttcgagaacatgatcgtcaaggaagagatgttgaattattcaggcgccataactacagttctgagaaagtcgggccagttattaaaggcaccgtaggagcagaattggttgatggattgatgatcaacgaagaagatgactataagattgtgaaaactcgtttcagtgctttctttagtaccaatcttcattccttcttgcaaacttcaggggttaccaagttagtgattgctggtgtgcaaacgccgaactgtatccggcaaacggtgtttgatgcagtggcgctggattatcccaatgtgactgttattacagatgccacagctgctgcaacaccagagatccatactgcgaatattcttgacatgaagaatattggagtcaagactcctacattacacgagtggtccgaagaacttgcttgacaaagaccatcttaagcccttcttttatcttgttttcttgtttgtacatgtaataaagaaaatgttaatcttgttgttgtaagttacaaaatctccacctattgttgtatacttttcttgtaatcccgtccaaaaaaataaaatgtattacgtttaat

SEQ ID NO: 35722 - protein, 213 aa, Arabidopsis thaliana
  peptide (1)..(213): Ceres Seq. ID no. 12393582
ASLCSKISLCSLCGERTMAERWRNTALLVIDMQNDFIEEGAVTQVKGGKSIVPNVIRVVELARQRGILVIWVVREHDRQGRDVELFRRHNYSSEKVGPVIKGTVGAELVDGLMINEEDDYKIVKTRFSAFFSTNLHSFLQTSGVTKLVIAGVQTPNCIRQTVFDAVALDYPNVTVITDATAAATPEIHTANILDMKNIGVKTPTLHEWSEELA

SEQ ID NO: 35723 - protein, 196 aa, Arabidopsis thaliana
  peptide (1)..(196): Ceres Seq. ID no. 12393583
MAERWRNTALLVIDMQNDFIEEGAVTQVKGGKSIVPNVIRVVELARQRGILVIWVVREHDRQGRDVELFRRHNYSSEKVGPVIKGTVGAELVDGLMINEEDDYKIVKTRFSAFFSTNLHSFLQTSGVTKLVIAGVQTPNCIRQTVFDAVALDYPNVTVITDATAAATPEIHTANILDMKNIGVKTPTLHEWSEELA

SEQ ID NO: 35724 - protein, 182 aa, Arabidopsis thaliana
  peptide (1)..(182): Ceres Seq. ID no. 12393584
MQNDFIEEGAVTQVKGGKSIVPNVIRVVELARQRGILVIWVVREHDRQGRDVELFRRHNYSSEKVGPVIKGTVGAELVDGLMINEEDDYKIVKTRFSAFFSTNLHSFLQTSGVTKLVIAGVQTPNCIRQTVFDAVALDYPNVTVITDATAAATPEIHTANILDMKNIGVKTPTLHEWSEELA

SEQ ID NO: 35725 - DNA, 815 bp, Arabidopsis thaliana
  misc_feature (1)..(815): Ceres Seq. ID no. 12337498
  misc_feature (1)..(815): Ortholog of  Ceres SEQ ID NO 14304132 as cited in SEQ ID NO 56475
  misc_feature (1)..(815): Ortholog of  Ceres SEQ ID NO 13664228 as cited in SEQ ID NO 61166
  misc_feature (1)..(815): Ortholog of  Ceres SEQ ID NO 15179439 as cited in SEQ ID NO 0
aaagaagagaagaagaactctctctctatctctatctctcttctccttcttcttcagtttcgatcattcttgaatctgattcttctcgagaaaaaagcgtttcaatttcagaaatttcgactacgattgttgctttgttcaattagaagaggcgaaaaaggatggcgacggttaatgggtacacagggaatactccggcggcgactacaccggcagccaccggatcaaagcaatctgctcctccgactaagaccgtcgatagccactccgttctaaaaaggctgcaatctgaactaatgggattgatgatgggagctgatccggggatatctgcgtttccagaggaagacaacatattttgctggaaaggaacaattacaggaagcaaagatactgtgttcgaaggaactgagtacagactctcactcactttctctaacgattatccttttaagtctcccaaagttaagtttgagacatgctgcttccaccccaatgtggatctctatggcaatatttgcttggacattcttcaggataaatggtcatctgcttatgatgtgaggacgatattactctcaattcaaagccttctcggaaccgaacatcagctcaccattgaacaatcaagcggctcagctttggagcaatcaagaagagtacaggaagatggttgagaagctctacaagcctttaaacgcatgattctcaaaaatcactgtaactgattttaaaatctcaactgtattggatcatatctcttttacttttataatctcaatttgagccaatattagcaatcaaactctaccttt

SEQ ID NO: 35726 - protein, 171 aa, Arabidopsis thaliana
  peptide (1)..(171): Ceres Seq. ID no. 12337499
MATVNGYTGNTPAATTPAATGSKQSAPPTKTVDSHSVLKRLQSELMGLMMGADPGISAFPEEDNIFCWKGTITGSKDTVFEGTEYRLSLTFSNDYPFKSPKVKFETCCFHPNVDLYGNICLDILQDKWSSAYDVRTILLSIQSLLGTEHQLTIEQSSGSALEQSRRVQEDG

SEQ ID NO: 35727 - protein, 126 aa, Arabidopsis thaliana
  peptide (1)..(126): Ceres Seq. ID no. 12337500
MGLMMGADPGISAFPEEDNIFCWKGTITGSKDTVFEGTEYRLSLTFSNDYPFKSPKVKFETCCFHPNVDLYGNICLDILQDKWSSAYDVRTILLSIQSLLGTEHQLTIEQSSGSALEQSRRVQEDG

SEQ ID NO: 35728 - protein, 123 aa, Arabidopsis thaliana
  peptide (1)..(123): Ceres Seq. ID no. 12337501
MMGADPGISAFPEEDNIFCWKGTITGSKDTVFEGTEYRLSLTFSNDYPFKSPKVKFETCCFHPNVDLYGNICLDILQDKWSSAYDVRTILLSIQSLLGTEHQLTIEQSSGSALEQSRRVQEDG

SEQ ID NO: 35729 - DNA, 590 bp, Arabidopsis thaliana
  misc_feature (1)..(590): Ceres Seq. ID no. 12420569
  misc_feature (1)..(590): Ortholog of  Ceres SEQ ID NO 14304353 as cited in SEQ ID NO 20380
  misc_feature (1)..(590): Ortholog of  Ceres SEQ ID NO 12562293 as cited in SEQ ID NO 20690
aactcatcacttacttaacatactaagagagttattagaacttgcaaaaaatggcttccaaggctttgattctgttaggtctcttctcagttcttctcgtcgtctccgaagtgtctgccgcaaggcaatcgggcatggtgaagccagagagtgaggaaactgtgcaacctgaaggttatggcggtggccacggaggacatggtggtcacggagggggaggaggccacggacatggaggacacaacggaggagggggccacggacttgacggatacggaggaggtggaggacactatggaggaggtggaggacactacggaggaggtggaggacactacggaggaggtggaggacactacggaggaggtggtggaggacacggaggtggaggacactacggaggtggtggaggaggatacggaggtggaggaggacaccacggaggaggaggccacgggctaaacgaacctgttcagactaagccgggtgtttaaaactatataatatcttcactaccatgcatgattgcatatatatatatacgcttatgtattatctatatgcctataaataaaccatggtgagtttgt

SEQ ID NO: 35730 - protein, 147 aa, Arabidopsis thaliana
  peptide (1)..(147): Ceres Seq. ID no. 12420570
MASKALILLGLFSVLLVVSEVSAARQSGMVKPESEETVQPEGYGGGHGGHGGHGGGGGHGHGGHNGGGGHGLDGYGGGGGHYGGGGGHYGGGGGHYGGGGGHYGGGGGGHGGGGHYGGGGGGYGGGGGHHGGGGHGLNEPVQTKPGV

SEQ ID NO: 35731 - protein, 119 aa, Arabidopsis thaliana
  peptide (1)..(119): Ceres Seq. ID no. 12420571
MVKPESEETVQPEGYGGGHGGHGGHGGGGGHGHGGHNGGGGHGLDGYGGGGGHYGGGGGHYGGGGGHYGGGGGHYGGGGGGHGGGGHYGGGGGGYGGGGGHHGGGGHGLNEPVQTKPGV

SEQ ID NO: 35732 - protein, 94 aa, Arabidopsis thaliana
  peptide (1)..(94): Ceres Seq. ID no. 12420572
MAVATEDMVVTEGEEATDMEDTTEEGATDLTDTEEVEDTMEEVEDTTEEVEDTTEEVEDTTEEVVEDTEVEDTTEVVEEDTEVEEDTTEEEATG

SEQ ID NO: 35733 - DNA, 1527 bp, Arabidopsis thaliana
  misc_feature (1)..(1527): Ceres Seq. ID no. 13496848
  misc_feature (1)..(1527): Ortholog of  Ceres SEQ ID NO 13599520 as cited in SEQ ID NO 633
  misc_feature (1)..(1527): Ortholog of  Ceres SEQ ID NO 13595142 as cited in SEQ ID NO 56671
  misc_feature (1)..(1527): Ortholog of  Ceres SEQ ID NO 15168569 as cited in SEQ ID NO 58123
  misc_feature (1)..(1527): Ortholog of  Ceres SEQ ID NO 15226382 as cited in SEQ ID NO 63295
  misc_feature (1)..(1527): Ortholog of  Ceres SEQ ID NO 13598460 as cited in SEQ ID NO 63382
atgtcaaagctaatgaccagaaccagcggatcatcaagccccaacacgattccagaccaaatcgaatcaccaacaagctcaagatcggtgacgcagacgacaaacggatcgcaccaattcgtgatacaaggatacagtttagctaaaggaattggtgtagggaaacacatagcaagtgataatttctccgtaggaggttatcaatggactatcttcgtctaccctgacggtaaaaatccagaggataactcttcttacgtctctgtgttcatcgttttggctagtgaatgtactgaagttagagcgctttttgagctttctcttgttgatcaaagtggtaaagggaagcataaggttcatagccattttaatcgttcacttgatggtggtccttatacgcttaagtacagaggaagtatgtggggatacaagcgtttcttcagacggtccttgcttgagacatctgactatcttaaagacgattgcttgaaaattaattgtacagttggagttgtcgtttcagaaatgcattgcccacggttactctcgattcatgtcccagactcagaacttggatcacattttggaaagttgctggatactttacaaggctcggatgtcacatttgacgttgccggtgagaagtttcaagctcataaattggttttggctgcacgatctcagtttttcagatcaatgttttacaatactctagcagagaacaacagcgacgtagtgatcagcgatttggaacctaaggttttcaaggccttgttacacttcatgtataaagattccctcccaggagatgtggaaccattaacggctcattcatttgacctattaaggccgtccgaaatagatgatacactgattgtaaagcttctggcagctgcggaaatgtacaatctgagtaggctcagattattgtgtgaatctcacatctgcaaaggcatatctatcagctccgtgtccaagatcttagctttatccgacaaatataatgcatccgaactaaaaagcgtttccttaaaattcactgcagaaaacctagcagctgttctgcagacaaaagcatatgaagatctgaaggatgactgtccaaacctccagtctgagctactaaaggcggtcgctggttatgacgacacaagtagcagcggaggaggaaagtctcagagtgtttgggctcaactctctaacggtggtgagaccagtagccgaagggtcaggcagcgaaccacttagaagagcttcttcacatgttgttaacaaactacttttgcttaccactcgtaaacagattaaccggtttatctagtatgtaccgaatgaaagggaagcggagccagaaatcttgtaccacaagagaagagctatgcggctgtgcactagtgattaaccggtgcttcacctttcagttccttcacgtctctgtggatttttgttgttgagtctttttttcaaattcttttcccagcttcaaattactagaaacttatgatgatataatagaaagagttaact

SEQ ID NO: 35734 - protein, 415 aa, Arabidopsis thaliana
  peptide (1)..(415): Ceres Seq. ID no. 13496849
MSKLMTRTSGSSSPNTIPDQIESPTSSRSVTQTTNGSHQFVIQGYSLAKGIGVGKHIASDNFSVGGYQWTIFVYPDGKNPEDNSSYVSVFIVLASECTEVRALFELSLVDQSGKGKHKVHSHFNRSLDGGPYTLKYRGSMWGYKRFFRRSLLETSDYLKDDCLKINCTVGVVVSEMHCPRLLSIHVPDSELGSHFGKLLDTLQGSDVTFDVAGEKFQAHKLVLAARSQFFRSMFYNTLAENNSDVVISDLEPKVFKALLHFMYKDSLPGDVEPLTAHSFDLLRPSEIDDTLIVKLLAAAEMYNLSRLRLLCESHICKGISISSVSKILALSDKYNASELKSVSLKFTAENLAAVLQTKAYEDLKDDCPNLQSELLKAVAGYDDTSSSGGGKSQSVWAQLSNGGETSSRRVRQRTT

SEQ ID NO: 35735 - protein, 411 aa, Arabidopsis thaliana
  peptide (1)..(411): Ceres Seq. ID no. 13496850
MTRTSGSSSPNTIPDQIESPTSSRSVTQTTNGSHQFVIQGYSLAKGIGVGKHIASDNFSVGGYQWTIFVYPDGKNPEDNSSYVSVFIVLASECTEVRALFELSLVDQSGKGKHKVHSHFNRSLDGGPYTLKYRGSMWGYKRFFRRSLLETSDYLKDDCLKINCTVGVVVSEMHCPRLLSIHVPDSELGSHFGKLLDTLQGSDVTFDVAGEKFQAHKLVLAARSQFFRSMFYNTLAENNSDVVISDLEPKVFKALLHFMYKDSLPGDVEPLTAHSFDLLRPSEIDDTLIVKLLAAAEMYNLSRLRLLCESHICKGISISSVSKILALSDKYNASELKSVSLKFTAENLAAVLQTKAYEDLKDDCPNLQSELLKAVAGYDDTSSSGGGKSQSVWAQLSNGGETSSRRVRQRTT

SEQ ID NO: 35736 - protein, 276 aa, Arabidopsis thaliana
  peptide (1)..(276): Ceres Seq. ID no. 13496851
MWGYKRFFRRSLLETSDYLKDDCLKINCTVGVVVSEMHCPRLLSIHVPDSELGSHFGKLLDTLQGSDVTFDVAGEKFQAHKLVLAARSQFFRSMFYNTLAENNSDVVISDLEPKVFKALLHFMYKDSLPGDVEPLTAHSFDLLRPSEIDDTLIVKLLAAAEMYNLSRLRLLCESHICKGISISSVSKILALSDKYNASELKSVSLKFTAENLAAVLQTKAYEDLKDDCPNLQSELLKAVAGYDDTSSSGGGKSQSVWAQLSNGGETSSRRVRQRTT

SEQ ID NO: 35737 - DNA, 1191 bp, Arabidopsis thaliana
  misc_feature (1)..(1191): Ceres Seq. ID no. 12328954
  misc_feature (1)..(1191): Ortholog of  Ceres SEQ ID NO 12609770 as cited in SEQ ID NO 51477
  misc_feature (1)..(1191): Ortholog of  Ceres SEQ ID NO 15177764 as cited in SEQ ID NO 57561
ccgaaagagagaaatcaatttgaccaatcaaataattgcggtggtgaaaatggctcgaaacgactcgcgatctaggtcgccgtctcaccgccgacggtactctcgctcgcctgtgactcatcgtagcagccgtcgtaccaggcgcgaccgcagccgctcaccctacacatcaaggcataagaagagcagatctcctgcaccaaggcaacaccaaagggatagaagtagttcattgtctccttccgagcatagaattgcgattgaagtgaagaaagaacaggaagacaaggcaagattgcagcatgaggcggagctcaagcgactagaagaagagactgcacagcggattgaggaagcagtaaggaaaaatgtagaggaaaggatgaaaaccgaagaagttaaagaagaaattgaaagacggacaaaggaagcttatgagaagatgtttcttgacgtggaaatacagctgaagaaagaaaaagaagctgctctaaacgaggcaagaagaaaagaagaacaagctaggagagaaagagaagagctggataagatgttagaagaaaatagtaggagggttgaagaatctcaaaggcgagaagcaatggaacttcaacgtaaagaagaggaaaggtatcgagaattggagctcctgcagagacagaaggaggaggctgcaaggagaaagaagctggaagaagaagaagagattagaaactccagcaagctatcaaatggaaacagatcacgatccaagctgcatttcggcatgggtttataattaaagaaacattgatgaaggcaaagtctgaagaaacttttgacttcttgtatcagagaataggaagatacagttgaggagttgactcatccaagtaagcacagacaacattctctagctgacccttcatagagcttgttgcttcactatgttagttaatctttggaaagaagcatctatcagtttggtaaagtttgataatagctctggcgggctttgggctggcgggttgggccggacctgatcaaaagcctgttttaacatgtgaggaataattgtaatttcttttttttgttagtttacttagaaaaagttgcatgttgttaaaaatctgataatatgatttgttttatcgatttttttgttttataataccagaagtttagaaaatgcacagtatatatactttctag

SEQ ID NO: 35738 - protein, 258 aa, Arabidopsis thaliana
  peptide (1)..(258): Ceres Seq. ID no. 12328955
RKREINLTNQIIAVVKMARNDSRSRSPSHRRRYSRSPVTHRSSRRTRRDRSRSPYTSRHKKSRSPAPRQHQRDRSSSLSPSEHRIAIEVKKEQEDKARLQHEAELKRLEEETAQRIEEAVRKNVEERMKTEEVKEEIERRTKEAYEKMFLDVEIQLKKEKEAALNEARRKEEQARREREELDKMLEENSRRVEESQRREAMELQRKEEERYRELELLQRQKEEAARRKKLEEEEEIRNSSKLSNGNRSRSKLHFGMGL

SEQ ID NO: 35739 - protein, 242 aa, Arabidopsis thaliana
  peptide (1)..(242): Ceres Seq. ID no. 12328956
MARNDSRSRSPSHRRRYSRSPVTHRSSRRTRRDRSRSPYTSRHKKSRSPAPRQHQRDRSSSLSPSEHRIAIEVKKEQEDKARLQHEAELKRLEEETAQRIEEAVRKNVEERMKTEEVKEEIERRTKEAYEKMFLDVEIQLKKEKEAALNEARRKEEQARREREELDKMLEENSRRVEESQRREAMELQRKEEERYRELELLQRQKEEAARRKKLEEEEEIRNSSKLSNGNRSRSKLHFGMGL

SEQ ID NO: 35740 - protein, 131 aa, Arabidopsis thaliana
  peptide (1)..(131): Ceres Seq. ID no. 12328957
MKTEEVKEEIERRTKEAYEKMFLDVEIQLKKEKEAALNEARRKEEQARREREELDKMLEENSRRVEESQRREAMELQRKEEERYRELELLQRQKEEAARRKKLEEEEEIRNSSKLSNGNRSRSKLHFGMGL

SEQ ID NO: 35741 - DNA, 865 bp, Arabidopsis thaliana
  misc_feature (1)..(865): Ceres Seq. ID no. 12559367
  misc_feature (1)..(865): Ortholog of  Ceres SEQ ID NO 14316176 as cited in SEQ ID NO 57814
  misc_feature (1)..(865): Ortholog of  Ceres SEQ ID NO 13660037 as cited in SEQ ID NO 66990
atagagattggagagcgagcgagacaaatcagaagagagagatttagatattgtagagtgagattctaaagagagagagagagagagatatggctagtggaatcgctcgtggtcgtttagctgaagagaggaaatcgtggaggaagaatcatcctcatggttttgtggcaaagccggagacggggcaggatggaactgtgaatctaatggtgtggcattgcactatacctggtaaagctgggactgattgggaaggtggattctttccattaacgatgcacttcagtgaggattatccgagcaaacctccgaaatgtaaatttccacaagggtttttccaccctaatgtctatccatctggaactgtctgtctctctatccttaacgaggattatggatggagaccagccatcaccgtgaagcagattcttgttggtattcaggatttacttgacacaccgaatcccgctgaccctgcacagacagatggttatcatctcttctgtcaggatccagttgagtacaagaaaagggtgaagctgcagtccaagcagtatcctgctcttgtctaaaacctcaaaaaagagaacgcaccaaaactgatgacaagctctgaatattttctcgtcttgtgtcattatgtttagatgtcattgggtgattgaaaactcctcattttggcaccttaagacactggaatctatttattttcgaaaaaaaactcttctttctctatttaactgttaatattcttggtactgattcagttggtgttgcttctatataatacataattatgttctctggtcgttcatgagtgttgtccaaattctactaagtgaaatatgaagtcttcattccatag

SEQ ID NO: 35742 - protein, 160 aa, Arabidopsis thaliana
  peptide (1)..(160): Ceres Seq. ID no. 12559368
MASGIARGRLAEERKSWRKNHPHGFVAKPETGQDGTVNLMVWHCTIPGKAGTDWEGGFFPLTMHFSEDYPSKPPKCKFPQGFFHPNVYPSGTVCLSILNEDYGWRPAITVKQILVGIQDLLDTPNPADPAQTDGYHLFCQDPVEYKKRVKLQSKQYPALV

SEQ ID NO: 35743 - protein, 121 aa, Arabidopsis thaliana
  peptide (1)..(121): Ceres Seq. ID no. 12559369
MVWHCTIPGKAGTDWEGGFFPLTMHFSEDYPSKPPKCKFPQGFFHPNVYPSGTVCLSILNEDYGWRPAITVKQILVGIQDLLDTPNPADPAQTDGYHLFCQDPVEYKKRVKLQSKQYPALV

SEQ ID NO: 35744 - protein, 98 aa, Arabidopsis thaliana
  peptide (1)..(98): Ceres Seq. ID no. 12559370
MHFSEDYPSKPPKCKFPQGFFHPNVYPSGTVCLSILNEDYGWRPAITVKQILVGIQDLLDTPNPADPAQTDGYHLFCQDPVEYKKRVKLQSKQYPALV

SEQ ID NO: 35745 - DNA, 533 bp, Arabidopsis thaliana
  misc_feature (1)..(533): Ceres Seq. ID no. 12738178
  misc_feature (1)..(533): Ortholog of  Ceres SEQ ID NO 13659394 as cited in SEQ ID NO 67049
cacggtttgtggaaacactggattactacacagcgatgtttgagtcgatagatgcagcacggccacgggatgataagcagagaatcagcgcagaacaacactgtgtagcaagagacatagtgaacatgatagcatgtgaggagtcagagagagtagagagacacgaggtactggggaaatggagggtcagaatgatgatggctgggttcacgggttggccggtcagcacatctgcagcgtttgcagcgagtgagatgctgaaagcttatgacaaaaactacaaactgggaggccatgaaggagcgctctacctcttctggaagagacgacccatggctacatgttccgtgtggaagccaaacccaaactagattgggtaagttatagtgatgatggttacttgagtggataaagaagagcacaacaaaaacacatctgtcgctgtaaattttttaggatgtgcaatgatgttttaagttgtaacacaacctaagttatatatgtatacaaaccaaacctggtggttgttttcc

SEQ ID NO: 35746 - protein, 122 aa, Arabidopsis thaliana
  peptide (1)..(122): Ceres Seq. ID no. 12738179
RFVETLDYYTAMFESIDAARPRDDKQRISAEQHCVARDIVNMIACEESERVERHEVLGKWRVRMMMAGFTGWPVSTSAAFAASEMLKAYDKNYKLGGHEGALYLFWKRRPMATCSVWKPNPN

SEQ ID NO: 35747 - protein, 111 aa, Arabidopsis thaliana
  peptide (1)..(111): Ceres Seq. ID no. 12738180
MFESIDAARPRDDKQRISAEQHCVARDIVNMIACEESERVERHEVLGKWRVRMMMAGFTGWPVSTSAAFAASEMLKAYDKNYKLGGHEGALYLFWKRRPMATCSVWKPNPN

SEQ ID NO: 35748 - protein, 81 aa, Arabidopsis thaliana
  peptide (1)..(81): Ceres Seq. ID no. 12738181
MIACEESERVERHEVLGKWRVRMMMAGFTGWPVSTSAAFAASEMLKAYDKNYKLGGHEGALYLFWKRRPMATCSVWKPNPN

SEQ ID NO: 35749 - DNA, 987 bp, Arabidopsis thaliana
  misc_feature (1)..(987): Ceres Seq. ID no. 12332248
  misc_feature (1)..(987): Ortholog of  Ceres SEQ ID NO 14307801 as cited in SEQ ID NO 59512
  misc_feature (1)..(987): Ortholog of  Ceres SEQ ID NO 14309110 as cited in SEQ ID NO 0
  misc_feature (1)..(987): Ortholog of  Ceres SEQ ID NO 15225903 as cited in SEQ ID NO 0
aattggagagacatgatgagagaaatatcactggaatctgaaccagacagtttctgatcttcttctccttagaggatctctcggagaagattcaaaaccaagaacaatctcagtctctatctctctctctgggtgcatttagatggctggagttgtgcgattaacgacgacgtcggttcaagccattcgtgtctcctcgtccttcagctcctttgccaccgctcttaatcctctgcaaccttgcttacctccaaactcgaatctgaattccgacaagagattgcgtcttctctcatcttctccttcctgctcgtcttctcattaccacccatcttctggtctcggaagccatctcccccttagacgacccaagagccaagtggttcgtgtcaagttagatgaaaatgtagccgagacagagccaccgaaatggtgggagaggaatgctccaaacatggtcgatattcattctactgaagagttcttgagcgctttaagcggtgcgggtgaaagattagttattgtagagttttatggaacttggtgtgcttcttgcagagcattgttcccaaagctttgcaagacagcggtggaacatcccgatatagtgttccttaaagtaaactttgatgagaataaaccgatgtgcaagagtttgaacgtgagagtgcttccttttttccacttttaccgtggagctgatggtcagcttgagtcattctcatgttctcttgctaagtttcagaagataaaagatgcaatccaactgcacaataccgatcgttgcagcctcggtccagccaaggtacctgaaggcttaacattagccaaaccagctgcatcaagttgaagtgccagatttttagatatattactaaggcaacaatctttggttgctcaagcaaatactcagcttaaaattctgtatatcgtcatatttttgggtgtaaaagaatacttcctaaagccagttacgattcttctgcc

SEQ ID NO: 35750 - protein, 235 aa, Arabidopsis thaliana
  peptide (1)..(235): Ceres Seq. ID no. 12332249
MAGVVRLTTTSVQAIRVSSSFSSFATALNPLQPCLPPNSNLNSDKRLRLLSSSPSCSSSHYHPSSGLGSHLPLRRPKSQVVRVKLDENVAETEPPKWWERNAPNMVDIHSTEEFLSALSGAGERLVIVEFYGTWCASCRALFPKLCKTAVEHPDIVFLKVNFDENKPMCKSLNVRVLPFFHFYRGADGQLESFSCSLAKFQKIKDAIQLHNTDRCSLGPAKVPEGLTLAKPAASS

SEQ ID NO: 35751 - protein, 131 aa, Arabidopsis thaliana
  peptide (1)..(131): Ceres Seq. ID no. 12332250
MVDIHSTEEFLSALSGAGERLVIVEFYGTWCASCRALFPKLCKTAVEHPDIVFLKVNFDENKPMCKSLNVRVLPFFHFYRGADGQLESFSCSLAKFQKIKDAIQLHNTDRCSLGPAKVPEGLTLAKPAASS

SEQ ID NO: 35752 - DNA, 818 bp, Arabidopsis thaliana
  misc_feature (1)..(818): Ceres Seq. ID no. 12332246
  misc_feature (1)..(818): Ortholog of  Ceres SEQ ID NO 14314867 as cited in SEQ ID NO 58301
  misc_feature (1)..(818): Ortholog of  Ceres SEQ ID NO 14308084 as cited in SEQ ID NO 58549
ggagacggaagaaaattcgaatcatcagtgtttgtttcctcctctcttaaagcttagcccttctcaggtcattgttcttcaatggcttcgagcaacacgactactggggttgataatacgtttagaaagaagtttgatgtggaagagtttaaggagcgtgctcgtgaacgcgaaaagaaggaatcggatcggtctaaatctcggtccaaaggtcctcctgtgcaaagagcccctttgaagcatagagattatcatgtagacctagaatctcgtctgggcaagacacaggtcgttacaccggtagcgcctctaagtcagcaggctggttatttctgtcgcgtttgtgattgtgttgttaaagattcggcaaactacttggatcacataaatgggaaaaaacatcaaagggcattggggatgtctatgcgggtggagagatcgtcacttgaacaagtccaagagcggttcgaggttttaaagaagcggaaagcgccaggaactttcacagaacaagatctggacgaacgcatccgaaaacagcaagaagaagaggaagaactaaaaaggcagcgtagagagaaaaagaaagagaagaagaaagggaaggtggtggaagaagagcctgagatggatcctgaggttgcagagatgatgggatttgggggctttggatcttcaaaaaaatcatgatgattatatgatcacttgtatctttgtcttgtagcgtttttgatccaaagtttgcaactttgtaatctgacacatcataacgatatttttctcattgtgcaagaagaggaatttgatggcaatttacc

SEQ ID NO: 35753 - protein, 202 aa, Arabidopsis thaliana
  peptide (1)..(202): Ceres Seq. ID no. 12332247
MASSNTTTGVDNTFRKKFDVEEFKERAREREKKESDRSKSRSKGPPVQRAPLKHRDYHVDLESRLGKTQVVTPVAPLSQQAGYFCRVCDCVVKDSANYLDHINGKKHQRALGMSMRVERSSLEQVQERFEVLKKRKAPGTFTEQDLDERIRKQQEEEEELKRQRREKKKEKKKGKVVEEEPEMDPEVAEMMGFGGFGSSKKS

SEQ ID NO: 35754 - DNA, 1631 bp, Arabidopsis thaliana
  misc_feature (1)..(1631): Ceres Seq. ID no. 12321799
  misc_feature (1)..(1631): Ortholog of  Ceres SEQ ID NO 14310419 as cited in SEQ ID NO 55050
  misc_feature (1)..(1631): Ortholog of  Ceres SEQ ID NO 13657789 as cited in SEQ ID NO 66154
aacaaacaaacaaaaacacaccaattccttcattcatcttctccatttcgtaattcgtacacttcactctcaagtctctctaagccacaaaccactgaagaagaatccatctaagagctgttaaaaattgatgaagcttcgaatatgaagaaattgaaaagctattacatgcaagttcgtaaccagcaacaatctcttgaccgaaaatggattcttccattagcaatcggatccatttgttctctctttctcttgttgctaacgaacttagcttcttcttctggtcaaactcgtttgattccattttcagtttacggatttagatcctccgtcttcgtcgaatccaagataaatccagtatccgtctcactcaccgtctccgtctctcctcctccgccgccacgtctcgcttatctaatctccggctcctctggtgacggtcagatgctgaaacgaactctaatggcgctttatcatcccaacaaccagtacgttgttcatctcgatcgggaatcttcaccggaggaacgattggatctcagtggttttgtggcgaatcatactctgtttcagagatttcaaaatgttcggatgattgttaaggctaatttcgttacgtatcgtggtccaactatggtggctaatacacttcacgctgcagcgattttgcttcgtgaaggtggtgattgggattggttcatcaatctcagtgcctctgattatcctctcgtaacacaagatgatctgttgcatacgttttcgtatcttcctcgagatctcaatttcatcgatcatacaagcaacattggctggaaagagtctcatagagcaaagcctataattattgatcctggtttgtatatgtcaaagaaagctgatgttttctgggtttcacagaagagaagtatgcctacagctttcaaactcttcacaggatctgcgtggatgatgttatctagaccttttgtggattatttcatatggggatgggataatcttcctcgaattgtgttaatgtattacgcaaacttcctttcatcgccagaaggttacttccacactgtgatttgcaatgctcgagagtttaccaacacaacggttaacagtgacttacatttcatctcatgggacaatcctccaaagcaacatcctcaccatcttacattagatgatttccagagaatggtggacagtaacgctccttttgctaggaaattccgtagagatgagcctgttctcgataagattgattcggaactattgtttcggagtcacgggatggtcactccgggtggttggtgtattggtacgagggaaaacgggagcgatccgtgtgcggtgattggtgatacgtcggttattaaacctggtcttggagctaaacggatcgagaaactcataacttatttgttatctactgagaatttcagaccacggcaatgccggtaatggcaaattagagttttgtcatagagatggttacgtggtttttcacacaaatgaactgtattgattatccgatactttgatatggttgtatagagatctttttggactttcttcatttgagaaagtgcagaaatttcgggaaagatcattgattattggaatttgtcttctattgccgaccg

SEQ ID NO: 35755 - protein, 434 aa, Arabidopsis thaliana
  peptide (1)..(434): Ceres Seq. ID no. 12321800
MKKLKSYYMQVRNQQQSLDRKWILPLAIGSICSLFLLLLTNLASSSGQTRLIPFSVYGFRSSVFVESKINPVSVSLTVSVSPPPPPRLAYLISGSSGDGQMLKRTLMALYHPNNQYVVHLDRESSPEERLDLSGFVANHTLFQRFQNVRMIVKANFVTYRGPTMVANTLHAAAILLREGGDWDWFINLSASDYPLVTQDDLLHTFSYLPRDLNFIDHTSNIGWKESHRAKPIIIDPGLYMSKKADVFWVSQKRSMPTAFKLFTGSAWMMLSRPFVDYFIWGWDNLPRIVLMYYANFLSSPEGYFHTVICNAREFTNTTVNSDLHFISWDNPPKQHPHHLTLDDFQRMVDSNAPFARKFRRDEPVLDKIDSELLFRSHGMVTPGGWCIGTRENGSDPCAVIGDTSVIKPGLGAKRIEKLITYLLSTENFRPRQCR

SEQ ID NO: 35756 - protein, 426 aa, Arabidopsis thaliana
  peptide (1)..(426): Ceres Seq. ID no. 12321801
MQVRNQQQSLDRKWILPLAIGSICSLFLLLLTNLASSSGQTRLIPFSVYGFRSSVFVESKINPVSVSLTVSVSPPPPPRLAYLISGSSGDGQMLKRTLMALYHPNNQYVVHLDRESSPEERLDLSGFVANHTLFQRFQNVRMIVKANFVTYRGPTMVANTLHAAAILLREGGDWDWFINLSASDYPLVTQDDLLHTFSYLPRDLNFIDHTSNIGWKESHRAKPIIIDPGLYMSKKADVFWVSQKRSMPTAFKLFTGSAWMMLSRPFVDYFIWGWDNLPRIVLMYYANFLSSPEGYFHTVICNAREFTNTTVNSDLHFISWDNPPKQHPHHLTLDDFQRMVDSNAPFARKFRRDEPVLDKIDSELLFRSHGMVTPGGWCIGTRENGSDPCAVIGDTSVIKPGLGAKRIEKLITYLLSTENFRPRQCR

SEQ ID NO: 35757 - protein, 334 aa, Arabidopsis thaliana
  peptide (1)..(334): Ceres Seq. ID no. 12321802
MLKRTLMALYHPNNQYVVHLDRESSPEERLDLSGFVANHTLFQRFQNVRMIVKANFVTYRGPTMVANTLHAAAILLREGGDWDWFINLSASDYPLVTQDDLLHTFSYLPRDLNFIDHTSNIGWKESHRAKPIIIDPGLYMSKKADVFWVSQKRSMPTAFKLFTGSAWMMLSRPFVDYFIWGWDNLPRIVLMYYANFLSSPEGYFHTVICNAREFTNTTVNSDLHFISWDNPPKQHPHHLTLDDFQRMVDSNAPFARKFRRDEPVLDKIDSELLFRSHGMVTPGGWCIGTRENGSDPCAVIGDTSVIKPGLGAKRIEKLITYLLSTENFRPRQCR

SEQ ID NO: 35758 - DNA, 1113 bp, Arabidopsis thaliana
  misc_feature (1)..(1113): Ceres Seq. ID no. 13580802
  misc_feature (1)..(1113): Ortholog of  Ceres SEQ ID NO 14310460 as cited in SEQ ID NO 55105
  misc_feature (1)..(1113): Ortholog of  Ceres SEQ ID NO 15179888 as cited in SEQ ID NO 66879
  misc_feature (1)..(1113): Ortholog of  Ceres SEQ ID NO 13596056 as cited in SEQ ID NO 68307
  misc_feature (1)..(1113): Ortholog of  Ceres SEQ ID NO 12388689 as cited in SEQ ID NO 0
acgttctcattcatgactctatatatttcgcatttcttctcctcaacgctctcataaaaagtagtactcgtgtcttactcgtgccagccactcgcatttctccagattttattatccttcctcgaaacaagagcttagctaagatgacgaagaactacccaaccgtgagcgaagattacaagaaggctgttgagaagtgcaggaggaagctcagaggtttgatcgctgagaagaactgtgcacccatcatggtccgactcgcatggcactctgctggaactttcgattgtcaatcaaggactggaggtccattcggaacaatgaggtttgacgctgagcaagctcatggagccaacagtggtatccacattgctcttaggttgttggaccccatcagggagcaattccctaccatctcttttgctgatttccatcagcttgctggtgttgtggccgttgaagttactggtggccctgacattcctttccaccctggaagagaggacaagccccaaccacctccagagggtcgtcttcctgatgctaccaagggttgtgaccatttgagagatgtctttgctaagcagatgggcttatctgacaaagacattgtcgctttatctggtgcccacactctgggacgatgccacaaggataggtctggcttcgaaggtgcatggacatcaaaccctctaatcttcgacaactcttacttcaaggaactcttgagcggagagaaggaaggccttcttcagcttgtctctgacaaagcactattggacgaccctgttttccgtcctttggtcgagaaatacgctgctgatgaagatgcctttttcgctgattacgctgaggcccacatgaagctttctgagcttgggtttgctgatgcttaagctgtgacgtatgctctgtgtgtgtgtgtgtgtctccccgagagtcatggctgtttttggttgggggctggaggggtcgcattgcatttgaactttgtcatatgattgcttaatgtactctcggatttacgtatctgtttttttcggtgggttgcgatttgaacacatccgttgcgcttttgctgcttagacacattaataaaattaatttctctcg

SEQ ID NO: 35759 - protein, 297 aa, Arabidopsis thaliana
  peptide (1)..(297): Ceres Seq. ID no. 13580803
VLIHDSIYFAFLLLNALIKSSTRVLLVPATRISPDFIILPRNKSLAKMTKNYPTVSEDYKKAVEKCRRKLRGLIAEKNCAPIMVRLAWHSAGTFDCQSRTGGPFGTMRFDAEQAHGANSGIHIALRLLDPIREQFPTISFADFHQLAGVVAVEVTGGPDIPFHPGREDKPQPPPEGRLPDATKGCDHLRDVFAKQMGLSDKDIVALSGAHTLGRCHKDRSGFEGAWTSNPLIFDNSYFKELLSGEKEGLLQLVSDKALLDDPVFRPLVEKYAADEDAFFADYAEAHMKLSELGFADA

SEQ ID NO: 35760 - protein, 250 aa, Arabidopsis thaliana; identical to SEQ ID NO: 22608
  peptide (1)..(250): Ceres Seq. ID no. 13580804

SEQ ID NO: 35761 - protein, 215 aa, Arabidopsis thaliana; identical to SEQ ID NO: 22609
  peptide (1)..(215): Ceres Seq. ID no. 13580805

SEQ ID NO: 35762 - DNA, 767 bp, Arabidopsis thaliana
  misc_feature (1)..(767): Ceres Seq. ID no. 12481796
  misc_feature (1)..(767): Ortholog of  Ceres SEQ ID NO 12583413 as cited in SEQ ID NO 56816
  misc_feature (1)..(767): Ortholog of  Ceres SEQ ID NO 15168480 as cited in SEQ ID NO 57927
acaatagtctccttctgtttctctttatatttgtctctataactctctttcgttaaagtttcataaaacctcaacgaactccttccatggcagcaggactatcaacaatcgccgtaacactcaaaccactcaaccgctcttctttctccgcaaaccaccctatatccaccgcagttttccctccatctctaagattcaacggcttccgacgtcgaaagattctcaccgtttgtttcgtcgtggaagaacggaaacaaagctctcccatggacgatgacaacaaaccagaaagcacgacaagctcttctgagatcttgatgacgtcgcggcttctcaagaaagcggagaagaagaaatcagagaggttcacttatttaatagcagctgtgatgtcgagctttggtatcacttctatggctataatggctgtttattaccgattttcttggcaaatgaagggaggtgaagtgtctgtgttagagatgtttggtacatttgctctttccgttggtgctgccggactgggaataacgatgtttggaatggcttacatgttcgttcacgatggacttgtgcacaagagattccctgtaggtcccattgccaacgttccttaccttcgaaaggtcgccgccgctcaccagctacaccacacagacaaattcaaaggtgtaccatatgggctgtttcttggaccaaaggaagtagaagaagtgggaggaaaagaagagttggagaaagagataagccggagaatcaaattatac

SEQ ID NO: 35763 - protein, 227 aa, Arabidopsis thaliana
  peptide (1)..(227): Ceres Seq. ID no. 12481797
MAAGLSTIAVTLKPLNRSSFSANHPISTAVFPPSLRFNGFRRRKILTVCFVVEERKQSSPMDDDNKPESTTSSSEILMTSRLLKKAEKKKSERFTYLIAAVMSSFGITSMAIMAVYYRFSWQMKGGEVSVLEMFGTFALSVGAAGLGITMFGMAYMFVHDGLVHKRFPVGPIANVPYLRKVAAAHQLHHTDKFKGVPYGLFLGPKEVEEVGGKEELEKEISRRIKLY

SEQ ID NO: 35764 - protein, 167 aa, Arabidopsis thaliana
  peptide (1)..(167): Ceres Seq. ID no. 12481798
MDDDNKPESTTSSSEILMTSRLLKKAEKKKSERFTYLIAAVMSSFGITSMAIMAVYYRFSWQMKGGEVSVLEMFGTFALSVGAAGLGITMFGMAYMFVHDGLVHKRFPVGPIANVPYLRKVAAAHQLHHTDKFKGVPYGLFLGPKEVEEVGGKEELEKEISRRIKLY

SEQ ID NO: 35765 - protein, 150 aa, Arabidopsis thaliana
  peptide (1)..(150): Ceres Seq. ID no. 12481799
MTSRLLKKAEKKKSERFTYLIAAVMSSFGITSMAIMAVYYRFSWQMKGGEVSVLEMFGTFALSVGAAGLGITMFGMAYMFVHDGLVHKRFPVGPIANVPYLRKVAAAHQLHHTDKFKGVPYGLFLGPKEVEEVGGKEELEKEISRRIKLY

SEQ ID NO: 35766 - DNA, 474 bp, Arabidopsis thaliana
  misc_feature (1)..(474): Ceres Seq. ID no. 13495933
  misc_feature (1)..(474): Ortholog of  Ceres SEQ ID NO 14309158 as cited in SEQ ID NO 0
aatatagaatataaccatattccggacatgaagatcgtgacattggtactcgtcgtcttcgtcatactttcgacatcattcccggctgccatcaaagccgaagacacgggagatacaggaaatgtgggagtgacatgtgacgcaaggcagcttcagccttgccttgccgcgattacgggaggaggacaaccctcaggtgcatgttgtgcaaagcttacagagcaacagtcatgcctctgtggtttcgctaagaaccctgcgttcgcacagtacattagctctccaaacgctcgcaaagtgctccttgcttgcaatgttgcttatcccacttgttgaaacttatctagagattttataaataaataaacgaaaggaaataaattacattatatcaaacgttatgatacaattcaaccgtttgtgttaatgtactggcttacatggttaaataaagtttattttcttggttgtttt

SEQ ID NO: 35767 - protein, 111 aa, Arabidopsis thaliana
  peptide (1)..(111): Ceres Seq. ID no. 13495934
NIEYNHIPDMKIVTLVLVVFVILSTSFPAAIKAEDTGDTGNVGVTCDARQLQPCLAAITGGGQPSGACCAKLTEQQSCLCGFAKNPAFAQYISSPNARKVLLACNVAYPTC

SEQ ID NO: 35768 - protein, 102 aa, Arabidopsis thaliana; identical to SEQ ID NO: 24515
  peptide (1)..(102): Ceres Seq. ID no. 13495935

SEQ ID NO: 35769 - DNA, 1293 bp, Arabidopsis thaliana
  misc_feature (1)..(1293): Ceres Seq. ID no. 12370494
  misc_feature (1)..(1293): Ortholog of  Ceres SEQ ID NO 14312328 as cited in SEQ ID NO 59022
gttaaatcttttccctttttgatcctttcttcctttcttcttcttcttcgcattgatttggtcctccttcctcttctattctattcattaagaacctaatcttcatcttctccatcttcttcttcacggactccacttcgctcatccaggaaggtttattagtagtaaccaatccaagtgttccttttgtttgaagcaacaagctttgtgatattatcctgagagacaatgtttggtttaaggaaatcaccggcaaatcttcccaagcataactcagtcgacctcaagtcttccaagccaaatcctttcgattcagatgatgaatctgacaacaaacatacccttaacccttctaagaggactacctctgaaccctctttggctgatatgacaaacccttttggtggtgagagagttcagaaaggagatagtagttcatccaaacagtcattgttttcgaactccaaataccagtacaagaacaatttccgtgattctggtggtattgaaaaccagtcggttcaggagcttgaaggttatgctgtgtacaaggctgaagagactacgaaatctgtacaaggttgtttgaaggtagcagaagatataaggtctgatgctaccagaactttggtcatgttacacgatcagggcgagcaaatcactaggacgcaccataaagccgttgaaatcgaccatgatctcagtcgtggtgagaagcttcttggaagccttggaggcatgttttcaaagacttggaaaccaaagaagactcgtcctataaatggtcccgtcgtaaccagagatgactcaccaacgagaagagttaaccacttagagaaaagggaaaaactgggactgaactcagcacccagaggacaatcaagaacccgagaaccactccccgaatcagctgatgcttatcagagagtggagatggaaaaagctaagcaagacgatgggctttcagacttgagtgatatactcggcgagctaaagaacatggctgttgacatgggaagcgaaatcgagaagcagaacaaaggacttgaccatcttcatgatgatgttgacgaactcaacttcagagtgcaacaatcaaaccaacgtggtcgccgtttgcttggaaagtagatgaacagagggtttatatgttcattacactcattcctcgtttgttttattctctatgaagttgttctttaaaactggaaagattcttatcatgttaaatacattattgctatctgtgtttgtatttgatcttgtgacaaaaaaccaaaaaacttattgacc

SEQ ID NO: 35770 - protein, 300 aa, Arabidopsis thaliana; identical to SEQ ID NO: 29602
  peptide (1)..(300): Ceres Seq. ID no. 12370495

SEQ ID NO: 35771 - protein, 247 aa, Arabidopsis thaliana; identical to SEQ ID NO: 29603
  peptide (1)..(247): Ceres Seq. ID no. 12370496

SEQ ID NO: 35772 - protein, 165 aa, Arabidopsis thaliana; identical to SEQ ID NO: 29604
  peptide (1)..(165): Ceres Seq. ID no. 12370497

SEQ ID NO: 35773 - DNA, 1317 bp, Arabidopsis thaliana
  misc_feature (1)..(1317): Ceres Seq. ID no. 12339040
  misc_feature (1)..(1317): Ortholog of  Ceres SEQ ID NO 14303263 as cited in SEQ ID NO 1224
  misc_feature (1)..(1317): Ortholog of  Ceres SEQ ID NO 13593955 as cited in SEQ ID NO 54278
  misc_feature (1)..(1317): Ortholog of  Ceres SEQ ID NO 13597380 as cited in SEQ ID NO 64054
  misc_feature (1)..(1317): Ortholog of  Ceres SEQ ID NO 12625474 as cited in SEQ ID NO 64169
  misc_feature (1)..(1317): Ortholog of  Ceres SEQ ID NO 13597502 as cited in SEQ ID NO 64681
aagttgatttagcctctgtttgtccttgttatgttgttgtaaaacttgaaactttggaagcaaactcatttttataacaaaaggaaatcttattttatacattacattaaagcaacatgaaagacaattcaagctggtcttgttcttgttcttggtcttcgtggaaaatatgtttgttgtctgttctctttctcaccgagacgatcaccgccgtgaagctgccgccaaaattgattattccggctgtaatcgctttcggagactccatcgtcgacacaggaatgaacaacaatgtcaaaaccgtggttaagtgtgattttcttccttatggtatcaatttccaaagcggagttgccacggggagattctgcgatggacgagtccctgccgatttgctagccgaagaactgggaataaaatcaattgtaccagcatacctagatccgaatctaaaatcgaaagatcttttaaccggtgtatcgtttgcgtccggaggttctggttatgatcctataacaccgaaacttgtggcagtaatatcattagaagatcaattgagttatttcgaggagtacatagagaaagtgaagaatatagttggggaagcaagaaaagacttcatagtagccaacagcttattcttattggtcgcaggcagcgacgacatagccaatacatactatactctacgtgcaagacctgaatacgacgtcgattcatacactactcttatgtctgactctgcctcagaatttgtgactaaactatatggatatggagtgagaagagtagctgtgtttggtgcaccaccaattgggtgtgtaccatcacagagaacgttaggaggaggtatcttgagagattgtgctgataattacaacgaagcagcaaaactttttaattcaaagctctccccaaaattggattcgttgcgtaaaaccctaccgggcatcaaaccgatctacattaatatctatgatcctctttttgacatcatccagaatcctgcaaattatgggtttgaagtgtctaataaaggatgctgtggaacaggagccatagaagttgctgtgttgtgcaataaaatcacatcttctgtatgtcccgacgtgtctactcatgtgttttgggacagttatcatcctacagagaaaacttacaaagtattagtctcactgttgattaacaaatttgttaatcagttcgtctgaattaaaaactattttcacggcataatgattgattatattttatctcatcttgtttgtattatttgataattgtattcgatttaaataaaattaatattttcttgtt

SEQ ID NO: 35774 - protein, 364 aa, Arabidopsis thaliana
  peptide (1)..(364): Ceres Seq. ID no. 12339041
MKDNSSWSCSCSWSSWKICLLSVLFLTETITAVKLPPKLIIPAVIAFGDSIVDTGMNNNVKTVVKCDFLPYGINFQSGVATGRFCDGRVPADLLAEELGIKSIVPAYLDPNLKSKDLLTGVSFASGGSGYDPITPKLVAVISLEDQLSYFEEYIEKVKNIVGEARKDFIVANSLFLLVAGSDDIANTYYTLRARPEYDVDSYTTLMSDSASEFVTKLYGYGVRRVAVFGAPPIGCVPSQRTLGGGILRDCADNYNEAAKLFNSKLSPKLDSLRKTLPGIKPIYINIYDPLFDIIQNPANYGFEVSNKGCCGTGAIEVAVLCNKITSSVCPDVSTHVFWDSYHPTEKTYKVLVSLLINKFVNQFV

SEQ ID NO: 35775 - protein, 309 aa, Arabidopsis thaliana; identical to SEQ ID NO: 21461
  peptide (1)..(309): Ceres Seq. ID no. 12339042

SEQ ID NO: 35776 - DNA, 1251 bp, Arabidopsis thaliana; identical to SEQ ID NO: 21293
  misc_feature (1)..(1251): Ceres Seq. ID no. 12391659
  misc_feature (1)..(1251): Ortholog of  Ceres SEQ ID NO 13659759 as cited in SEQ ID NO 67663

SEQ ID NO: 35777 - protein, 325 aa, Arabidopsis thaliana; identical to SEQ ID NO: 21294
  peptide (1)..(325): Ceres Seq. ID no. 12391660

SEQ ID NO: 35778 - protein, 320 aa, Arabidopsis thaliana; identical to SEQ ID NO: 21295
  peptide (1)..(320): Ceres Seq. ID no. 12391661

SEQ ID NO: 35779 - protein, 290 aa, Arabidopsis thaliana; identical to SEQ ID NO: 21296
  peptide (1)..(290): Ceres Seq. ID no. 12391662

SEQ ID NO: 35780 - DNA, 1127 bp, Arabidopsis thaliana; identical to SEQ ID NO: 21963
  misc_feature (1)..(1127): Ceres Seq. ID no. 12385171
  misc_feature (1)..(1127): Ortholog of  Ceres SEQ ID NO 13600601 as cited in SEQ ID NO 497
  misc_feature (1)..(1127): Ortholog of  Ceres SEQ ID NO 13664283 as cited in SEQ ID NO 61283
  misc_feature (1)..(1127): Ortholog of  Ceres SEQ ID NO 12635513 as cited in SEQ ID NO 0
  misc_feature (1)..(1127): Ortholog of  Ceres SEQ ID NO 15179044 as cited in SEQ ID NO 0
  misc_feature (1)..(1127): Ortholog of  Ceres SEQ ID NO 15179333 as cited in SEQ ID NO 0

SEQ ID NO: 35781 - protein, 273 aa, Arabidopsis thaliana; identical to SEQ ID NO: 21964
  peptide (1)..(273): Ceres Seq. ID no. 12385172

SEQ ID NO: 35782 - protein, 166 aa, Arabidopsis thaliana; identical to SEQ ID NO: 21965
  peptide (1)..(166): Ceres Seq. ID no. 12385173

SEQ ID NO: 35783 - DNA, 636 bp, Arabidopsis thaliana
  misc_feature (1)..(636): Ceres Seq. ID no. 12423268
  misc_feature (1)..(636): Ortholog of  Ceres SEQ ID NO 13646254 as cited in SEQ ID NO 20314
  misc_feature (1)..(636): Ortholog of  Ceres SEQ ID NO 12323993 as cited in SEQ ID NO 20720
aaaaaacatcacatacactatttttntcctctccttattgtctatatatttttcctctttagctttttcatttcgaaatggccaccgttgaggttgaacaagtcactccagtagcagtagagaacgttgaggtaccaacaaagacagtggaggagacagtggtggagacagaggtgacccaacagccggaagaatccgtccccgccgtgacagaacaaaaatccgaagcaccaattgtagaaacaaacgaagaagtggttgtggaagaggcagagaagaaagatgaagaaaccgagaagaaaacagaggagaaagacgagaagacagaagtgatcacggaaactccggtagttgaggaggaggagaagaaagctgaggaagtgaccgaaactccggcggttgtggaggaggagaagaagacagaggtggttgaggagaaacagactgaggttgcggctgctgaggaagtcgccgttgagaaggccgaggagtaaagaggaaggaagaagctatatatgaccttttttggtctcatatcgttttctgtttattttattttatcaacatttcataagtattttctatgtttgttgggtttgttatgatgaaatcagatgtttggatcttttaatggtc

SEQ ID NO: 35784 - protein, 138 aa, Arabidopsis thaliana; identical to SEQ ID NO: 26162
  peptide (1)..(138): Ceres Seq. ID no. 12423269

SEQ ID NO: 35785 - DNA, 1221 bp, Arabidopsis thaliana; identical to SEQ ID NO: 20489
  misc_feature (1)..(1221): Ceres Seq. ID no. 12562215
  misc_feature (1)..(1221): Ortholog of  Ceres SEQ ID NO 13595548 as cited in SEQ ID NO 51024
  misc_feature (1)..(1221): Ortholog of  Ceres SEQ ID NO 13582350 as cited in SEQ ID NO 56734
  misc_feature (1)..(1221): Ortholog of  Ceres SEQ ID NO 12476493 as cited in SEQ ID NO 58163
  misc_feature (1)..(1221): Ortholog of  Ceres SEQ ID NO 13597295 as cited in SEQ ID NO 63743
  misc_feature (1)..(1221): Ortholog of  Ceres SEQ ID NO 12617090 as cited in SEQ ID NO 64005
  misc_feature (1)..(1221): Ortholog of  Ceres SEQ ID NO 13597439 as cited in SEQ ID NO 64081
  misc_feature (1)..(1221): Ortholog of  Ceres SEQ ID NO 13597233 as cited in SEQ ID NO 64370
  misc_feature (1)..(1221): Ortholog of  Ceres SEQ ID NO 13623850 as cited in SEQ ID NO 0
  misc_feature (1)..(1221): Ortholog of  Ceres SEQ ID NO 14309162 as cited in SEQ ID NO 0

SEQ ID NO: 35786 - protein, 148 aa, Arabidopsis thaliana; identical to SEQ ID NO: 20490
  peptide (1)..(148): Ceres Seq. ID no. 12562216

SEQ ID NO: 35787 - protein, 148 aa, Arabidopsis thaliana; identical to SEQ ID NO: 20491
  peptide (1)..(148): Ceres Seq. ID no. 12562217

SEQ ID NO: 35788 - protein, 144 aa, Arabidopsis thaliana; identical to SEQ ID NO: 20492
  peptide (1)..(144): Ceres Seq. ID no. 12562218

SEQ ID NO: 35789 - DNA, 611 bp, Arabidopsis thaliana
  misc_feature (1)..(611): Ceres Seq. ID no. 12332262
  misc_feature (1)..(611): Ortholog of  Ceres SEQ ID NO 13598758 as cited in SEQ ID NO 61555
agctaaaaccctaaagccctaaaatcaaaattacgctaaacagagaaggcgacaatggatcacatcgctgcggcggaagagcaaatcgtatcggagagacttcgaagaaagcttgaagaagttaatgtagctgctcagactcagctttctcctatccaagatcacatcaatttcacccttcagcaagcttatttcaaatgtgcatatgagtgctttgacagaagaagaaagcaagaggagataagtaactgcgtcgagcactgcagtgttcccgttgtcaaatctcaacagtatttcgagaacgaaatggctcagtttcaggaaagattgaacagatcactggtggtgtgtcaagacaagtttgaggcctcaaagctccagaagataaggcctgaagcggttaacgagatggagagttgtgtgcacaaatccattgaggaaaatctcaatacattaccacatattgtgcagagaatgaagacagcatttaacataaccaactaaaagctctcgtgaaaaaccttggattccagaacttgactagccatattgtttgaaaagaccttttcttttgtcttaatatgatctataaatttgttttcctttttctt

SEQ ID NO: 35790 - protein, 149 aa, Arabidopsis thaliana
  peptide (1)..(149): Ceres Seq. ID no. 12332263
MDHIAAAEEQIVSERLRRKLEEVNVAAQTQLSPIQDHINFTLQQAYFKCAYECFDRRRKQEEISNCVEHCSVPVVKSQQYFENEMAQFQERLNRSLVVCQDKFEASKLQKIRPEAVNEMESCVHKSIEENLNTLPHIVQRMKTAFNITN

SEQ ID NO: 35791 - DNA, 756 bp, Arabidopsis thaliana
  misc_feature (1)..(756): Ceres Seq. ID no. 13499510
  misc_feature (1)..(756): Ortholog of  Ceres SEQ ID NO 13598227 as cited in SEQ ID NO 61591
  misc_feature (1)..(756): Ortholog of  Ceres SEQ ID NO 12584790 as cited in SEQ ID NO 62648
  misc_feature (1)..(756): Ortholog of  Ceres SEQ ID NO 15178116 as cited in SEQ ID NO 0
ctttcccctaagtcttggttcttcttctctctaatacgagaagaaaaaggcgaaaacctcgccaatccgattacgcgaaaaatcaaaggtttttggatatggcgtcgaagcggatcttgaaggaattgaaggatctccagaaggatccacctacatcatgtagcgcaggtcctgttgctgaagacatgtttcactggcaggcaacgataatgggtccttcagagagtccttatgctggaggtgttttccttgtaaccatccatttccctccggattacccattcaagcctcctaaggtggcctttaggaccaaggtgttccatcccaacattaacagcaacggtagcatttgcctcgacatcttgaaggagcagtggagtcctgcgctcaccatttccaaggtgctgctatcgatctgttctttgttaaccgatccaaacccggatgatcctttggtgcccgagatagctcacatgtacaagactgacaagaacaagtacgagtccactgcacgaagctggactcagaagtatgccatgggctaaatggaaaatcccacctactaaattatctctttatgaagaaaaaaatctgccttaatttctatgtatgattcgatagacatctctttgtgtccttttaactttctgaagacaggaccaaatgaagtgggtcttgttttaaacgaaacaaaaaaaaacatcatctttgtgaaaactagaatctgatcatcttctgttgtttcttcttgtggtg

SEQ ID NO: 35792 - protein, 148 aa, Arabidopsis thaliana; identical to SEQ ID NO: 24844
  peptide (1)..(148): Ceres Seq. ID no. 13499511

SEQ ID NO: 35793 - protein, 119 aa, Arabidopsis thaliana; identical to SEQ ID NO: 24845
  peptide (1)..(119): Ceres Seq. ID no. 13499512

SEQ ID NO: 35794 - protein, 111 aa, Arabidopsis thaliana; identical to SEQ ID NO: 24846
  peptide (1)..(111): Ceres Seq. ID no. 13499513

SEQ ID NO: 35795 - DNA, 979 bp, Arabidopsis thaliana
  misc_feature (1)..(979): Ceres Seq. ID no. 13493781
  misc_feature (1)..(979): Ortholog of  Ceres SEQ ID NO 15172878 as cited in SEQ ID NO 51924
  misc_feature (1)..(979): Ortholog of  Ceres SEQ ID NO 13662000 as cited in SEQ ID NO 61553
gaaccgtctctgaatctgaccgaccaccattcttctcgcgccggcgatttcactgtttacagagaaatctcgagaaccctaacctgggtctctctagatttctttgaaatttcgagaatctagggtttcaaactaaaatcgagtccttgagttttcccaatttaaatcgttatgagctctatcaatatcactaacgtcaccgtcttggacaatcctgctccgtttgtgaatccattccagttcgagatttcttacgaatgcttgacctctctcaaagacgatttggaatggaagcttatatacgtagggtcagctgaagacgaaacgtatgatcaagttttggaaagtgttcttgttggtcctgttaacgttgggaactatcgatttgtgttgcaggctgactctccagatccgttaaagattcgtgaggaagatattattggtgttactgtgttattgttgacttgctcatacatggatcaagagtttataagagttggctattatgtgaacaatgactatgatgatgaacagctcagggaagagcctcctaccaaggttttgattgataaggtccaaaggaacatactcacagacaaacctagagtaactaagttccctatcaactttcatcctgagaatgagcagactcttggtgatgggcctgcacctactgaaccatttgctgattctgttgtaaatggagaagctccggtgtttcttgagcagccacaaaagcttcaggagatagaacaatttgatgattctgatgtaaatggagaagctatagcgttgcttgatcagccacaaaatctccaggagacatgattcttgtttgactcaagcttaactggaaactggattagaactatcatctcaattctaatcgaaagatttgtatttttgtttcttttatctggaacttgaactccagttgtgttactgtttgtagaaatttaagttcttcttgcaacatccc

SEQ ID NO: 35796 - protein, 218 aa, Arabidopsis thaliana
  peptide (1)..(218): Ceres Seq. ID no. 13493782
MSSINITNVTVLDNPAPFVNPFQFEISYECLTSLKDDLEWKLIYVGSAEDETYDQVLESVLVGPVNVGNYRFVLQADSPDPLKIREEDIIGVTVLLLTCSYMDQEFIRVGYYVNNDYDDEQLREEPPTKVLIDKVQRNILTDKPRVTKFPINFHPENEQTLGDGPAPTEPFADSVVNGEAPVFLEQPQKLQEIEQFDDSDVNGEAIALLDQPQNLQET

SEQ ID NO: 35797 - protein, 117 aa, Arabidopsis thaliana
  peptide (1)..(117): Ceres Seq. ID no. 13493783
MDQEFIRVGYYVNNDYDDEQLREEPPTKVLIDKVQRNILTDKPRVTKFPINFHPENEQTLGDGPAPTEPFADSVVNGEAPVFLEQPQKLQEIEQFDDSDVNGEAIALLDQPQNLQET

SEQ ID NO: 35798 - DNA, 989 bp, Arabidopsis thaliana
  misc_feature (1)..(989): Ceres Seq. ID no. 12332944
  misc_feature (1)..(989): Ortholog of  Ceres SEQ ID NO 15168573 as cited in SEQ ID NO 57822
  misc_feature (1)..(989): Ortholog of  Ceres SEQ ID NO 12592883 as cited in SEQ ID NO 67862
atttttcggatcggaccaattcgactaatcggttccggtttctttcccggggcaaggtagagctagagatttcgaagaagaaacgaaagggagagagagagatagacaagttccgcgatgaacgaaggctcgagcgaagaagtaacgaggacggtaatggaagagaaaccagaacagcaacaaagaggatctctggagaaaggaagatcgtgcaaaggctatttatattactcttccactctcaaatccaagtctaagaaccctcgctgcgtcggaatccctcgtactctccgtcaagttcctgattatgttgttggacaatctgaagctgaagcttctaaagacggaaggaccttagctgatttttactatggatgtttgggttattccgtctacatgactgataaagactcatctgccatcaagcaacatacgaagactcaacttcccgtttgtgtcggtcttgagatattagcagatagaagagcagcttctggcaatacttcatctgttccagcccgtgttcaaaatagaaaagattcccgggaggtgcctgtgcctcagcaccagaacaataaaccagccactgccacaaacacagaaaacggcttcttaaccaggttcacaagaaacgcaaacctggtagcagcaggggtgatgaagaacatgaagagagttggtaactatgtgaaagaaactgtggatgattccttggacccatatcgcaagcgaccaaaataaagaaactttttacattagatgtggagacaacaaacccaaaaaaaatgaccgacagacgacaggatatgaatcttatttgacacttttttggattctcttgaatcatcaaaaaataaaatcaaccaaaaaaaatggctgtatgatttgtttaagcaggccatgtcccaaagaccaaagtaatgtgtacaccttcctcagttttggtttactgatattatacatatgccaatgaggttcacttttattgc

SEQ ID NO: 35799 - protein, 207 aa, Arabidopsis thaliana
  peptide (1)..(207): Ceres Seq. ID no. 12332945
MNEGSSEEVTRTVMEEKPEQQQRGSLEKGRSCKGYLYYSSTLKSKSKNPRCVGIPRTLRQVPDYVVGQSEAEASKDGRTLADFYYGCLGYSVYMTDKDSSAIKQHTKTQLPVCVGLEILADRRAASGNTSSVPARVQNRKDSREVPVPQHQNNKPATATNTENGFLTRFTRNANLVAAGVMKNMKRVGNYVKETVDDSLDPYRKRPK

SEQ ID NO: 35800 - protein, 194 aa, Arabidopsis thaliana
  peptide (1)..(194): Ceres Seq. ID no. 12332946
MEEKPEQQQRGSLEKGRSCKGYLYYSSTLKSKSKNPRCVGIPRTLRQVPDYVVGQSEAEASKDGRTLADFYYGCLGYSVYMTDKDSSAIKQHTKTQLPVCVGLEILADRRAASGNTSSVPARVQNRKDSREVPVPQHQNNKPATATNTENGFLTRFTRNANLVAAGVMKNMKRVGNYVKETVDDSLDPYRKRPK

SEQ ID NO: 35801 - protein, 114 aa, Arabidopsis thaliana
  peptide (1)..(114): Ceres Seq. ID no. 12332947
MTDKDSSAIKQHTKTQLPVCVGLEILADRRAASGNTSSVPARVQNRKDSREVPVPQHQNNKPATATNTENGFLTRFTRNANLVAAGVMKNMKRVGNYVKETVDDSLDPYRKRPK

SEQ ID NO: 35802 - DNA, 1645 bp, Arabidopsis thaliana
  misc_feature (1)..(1645): Ceres Seq. ID no. 13593234
  misc_feature (1)..(1645): Ortholog of  Ceres SEQ ID NO 13590307 as cited in SEQ ID NO 67154
actctgtcgcttggcgcgctctctctccatagttccagttctgaaatctcactttcacagtttgtgtctgtgcgataatggccatggcagagctctcaacccccaaaacgacgtcgccttttctcaactcttcgtctcggcttcgtctctcttcaaaattgcacctttcaaaccactttcgccatcttcttcttccacctctccacacaacaactcccaactccaaaatctcttgctccgtttctcaaaatagccaagctcctgttgctgtgcaagaaaatggattggtgaagacgaagaaagagtgttatggagtgttctgcctcacctatgatcttaaagctgaagaagagacaagatcatggaagaagttaattaatattgcagtttcaggtgctgcaggaatgatttctaaccatcttctcttcaaacttgcttcaggggaagtatttggtccagatcaacccattgcattgaaactgctaggatcagagagatcaattcaagctcttgaaggtgttgcaatggaactggaggattcattgttcccattgttgagagaagttgatataggaacagatccaaatgaagtgttccaagatgtggagtgggctattctgattggagcaaaacctcgaggccctggaatggaacgtgctgacttgttggacatcaatggccaaatctttgctgagcagggcaaagctctgaacaaagctgcctctcctaacgtcaaggttcttgtagtgggaaacccttgcaacaccaatgccttgatttgtcttaaaaatgctcccaacattcctgcaaagaacttccatgccctcacgaggttagacgaaaatcgtgccaaatgccagcttgctcttaaagccggtgttttctatgacaaagtgtctaatatgaccatatggggaaatcactccacgactcaggtgccagacttcttaaatgccagaattaatggcctgcctgtgaaggaggttattacagatcacaaatggttagaagagggattcactgagagtgtgcagaagagaggtgggttattaattcagaaatggggtcgatcttctgctgcttctactgctgtttccattgttgatgctataaagtctcttgtaactcctactcctgagggtgattggttttcgactggggtgtacacggatggaaatccttatggtattgaagagggccttgtcttcagtatgccatgccggtcgaagggagatggagattatgaacttgtcaaggatgtagaaattgatgactaccttcgccaacgaatcgccaagtcggaagcggaactgttggctgagaagagatgtgttgcacacctcactggagagggcattgcctactgtgatcttggtccggtagatactatgcttcctggggaagtttgatttttgcaggacgttgaacatctcaagtaagcattctcttccgggttgttagctgtacagagcacagccacattacttatgatgattgttcagaataagaaaatgaaactcttatttcttatttacatgcatctgtatgtgatttttcttgagcaatgctccaaaagtcatatacagtagtatttgtaaacacttgaaacgtttctatgctttattccagtttcagaactcaaact

SEQ ID NO: 35803 - protein, 443 aa, Arabidopsis thaliana; identical to SEQ ID NO: 25547
  peptide (1)..(443): Ceres Seq. ID no. 13593235

SEQ ID NO: 35804 - protein, 441 aa, Arabidopsis thaliana; identical to SEQ ID NO: 25548
  peptide (1)..(441): Ceres Seq. ID no. 13593236

SEQ ID NO: 35805 - protein, 334 aa, Arabidopsis thaliana; identical to SEQ ID NO: 25549
  peptide (1)..(334): Ceres Seq. ID no. 13593237

SEQ ID NO: 35806 - DNA, 1068 bp, Arabidopsis thaliana
  misc_feature (1)..(1068): Ceres Seq. ID no. 12334919
  misc_feature (1)..(1068): Ortholog of  Ceres SEQ ID NO 14311859 as cited in SEQ ID NO 51658
  misc_feature (1)..(1068): Ortholog of  Ceres SEQ ID NO 13638685 as cited in SEQ ID NO 51871
  misc_feature (1)..(1068): Ortholog of  Ceres SEQ ID NO 13599200 as cited in SEQ ID NO 0
aatgatctgatctgatctcccaaaaattcccaaatccaaatctacgaatctccgtctcctccgtcgcattttccgaggtagagagagagatcaaaccaaagagacacagagagagtatccaccgatggaatccgcagcaacggctgttgtacctccggcagccgccgccaccaccgccaccgccaccgatgataatctccaatcaagcgactcatcatctcccgccgacgccgttaaccgattgatccacgccttttcgcagcgacaacaacatcttctcgacaaaacggttcctcacgttctctatcgatggatcgcatgtctctgtgttgtattgatctacatcgttcgtgtttactttgtggaaggcttctacatcatcacttacgccatcggcatctaccttttgaatctcatcattgcttttctatctcctcaagaagatcccgaagcttctctcacttccggtggttctcttcctactcggagatccgatgagtatcgtcctttcgttcgccgtctccctgagttcaaattctggttatcgatcataagggctttcatcatcggatttatgatgacgttcttcgaggtgtttgatgtacctgtattctggccaatacttctcttctactgggtgatgttgtttttccttacgatgaggaaacagatacagcatatgatcaaatacagatatgtccctttctcttttgggaaaaagcagtatggaaagaaaccggctccaacagagagcagtgaatgatcaatcaaaactgttcaggtcagcaattttacagtcttttgagagaagtagcatttgaaaaggtcggtcttttgttctcttttgatggcctatatctttgttagggatgaagtagagatagacatattttgctcttttatcatcctgactattttactggtttcacctgaactcaatgtacaatcttatttttttacatccttttttcagtgagaaaataatgtttcatacttgacccttttgtaatcatcatggtggaaaactaaagactaatcagtaatcactgtccggttctatcgatgttc

SEQ ID NO: 35807 - protein, 212 aa, Arabidopsis thaliana
  peptide (1)..(212): Ceres Seq. ID no. 12334920
MESAATAVVPPAAAATTATATDDNLQSSDSSSPADAVNRLIHAFSQRQQHLLDKTVPHVLYRWIACLCVVLIYIVRVYFVEGFYIITYAIGIYLLNLIIAFLSPQEDPEASLTSGGSLPTRRSDEYRPFVRRLPEFKFWLSIIRAFIIGFMMTFFEVFDVPVFWPILLFYWVMLFFLTMRKQIQHMIKYRYVPFSFGKKQYGKKPAPTESSE

SEQ ID NO: 35808 - DNA, 1221 bp, Arabidopsis thaliana
  misc_feature (1)..(1221): Ceres Seq. ID no. 13490479
  misc_feature (1)..(1221): Ortholog of  Ceres SEQ ID NO 13595626 as cited in SEQ ID NO 51116
aatttcgacacaaaaagccctaatctctgcttctgtaaagttcaacatttggcggagtcaaagaaacagagtgattctctgatccgattccggcgaaagaggacgaaacaaacggaacttgttcatcatcttctccagaaatgacgtcgtttcaggtgatgcgttcttcaaattcgagaaactcggatctatctcgtcgcatctcttctgcttctacttcttcttcgtctataagacctcaacaacagttccggcgagatctaacaagtgtcggttacggcggaagaaacgacggattatacagttcaaattcgatgacggtcgaagggattttacacgatactttcgcatcagatccaccagcaccaacggaatcttcactcttagatgcgtcgataaatctgatggatgcttctccagcaccaatggagataacaacaacgacggcttctgatgttgtggatcacggcggaggaacggagacgacgcgtggtgggaagagtgttgatgagatttggagagagatggtatcaggagaaggtaaagggatgaaggaagagacgtcggaagagataatgacgttagaggattttctagcgaaagctgcggtggaagacgaaacagcggtgacggcgtcggcggaggatttggatgtgaagattccggtgacgaattacggattcgatcattctgcaccgccgcataatccgtttcagatgattgataaagtagaaggatcaatagttgcgtttgggaatggtttagatgtttacggaggaggagctagagggaagagagcgagagtgatggttgagccattggataaagcagctgcacagagacagagaaggatgattaagaatcgtgaatctgcagctaggtctagagagaggaaacaagcttatcaagttgagttagaagctttggctgcgaagcttgaggaagagaatgagttgctttctaaggagattgaagataagaggaaagagagataccagaagttgatggagtttgtgattcctgttgttgagaaaccgaagcagcagccaccacggtttttacgcaggattcggtctttggaatggtgataagaggtatagacttttgaggattttagggtcttaatgttacttactttgtgtatgtgtgtgtgagagttgattcataatctgcagtagagtgtaatgattatggttaataacttatatattatattagatt

SEQ ID NO: 35809 - protein, 315 aa, Arabidopsis thaliana
  peptide (1)..(315): Ceres Seq. ID no. 13490480
MTSFQVMRSSNSRNSDLSRRISSASTSSSSIRPQQQFRRDLTSVGYGGRNDGLYSSNSMTVEGILHDTFASDPPAPTESSLLDASINLMDASPAPMEITTTTASDVVDHGGGTETTRGGKSVDEIWREMVSGEGKGMKEETSEEIMTLEDFLAKAAVEDETAVTASAEDLDVKIPVTNYGFDHSAPPHNPFQMIDKVEGSIVAFGNGLDVYGGGARGKRARVMVEPLDKAAAQRQRRMIKNRESAARSRERKQAYQVELEALAAKLEEENELLSKEIEDKRKERYQKLMEFVIPVVEKPKQQPPRFLRRIRSLEW

SEQ ID NO: 35810 - protein, 309 aa, Arabidopsis thaliana
  peptide (1)..(309): Ceres Seq. ID no. 13490481
MRSSNSRNSDLSRRISSASTSSSSIRPQQQFRRDLTSVGYGGRNDGLYSSNSMTVEGILHDTFASDPPAPTESSLLDASINLMDASPAPMEITTTTASDVVDHGGGTETTRGGKSVDEIWREMVSGEGKGMKEETSEEIMTLEDFLAKAAVEDETAVTASAEDLDVKIPVTNYGFDHSAPPHNPFQMIDKVEGSIVAFGNGLDVYGGGARGKRARVMVEPLDKAAAQRQRRMIKNRESAARSRERKQAYQVELEALAAKLEEENELLSKEIEDKRKERYQKLMEFVIPVVEKPKQQPPRFLRRIRSLEW

SEQ ID NO: 35811 - protein, 257 aa, Arabidopsis thaliana
  peptide (1)..(257): Ceres Seq. ID no. 13490482
MTVEGILHDTFASDPPAPTESSLLDASINLMDASPAPMEITTTTASDVVDHGGGTETTRGGKSVDEIWREMVSGEGKGMKEETSEEIMTLEDFLAKAAVEDETAVTASAEDLDVKIPVTNYGFDHSAPPHNPFQMIDKVEGSIVAFGNGLDVYGGGARGKRARVMVEPLDKAAAQRQRRMIKNRESAARSRERKQAYQVELEALAAKLEEENELLSKEIEDKRKERYQKLMEFVIPVVEKPKQQPPRFLRRIRSLEW

SEQ ID NO: 35812 - DNA, 1693 bp, Arabidopsis thaliana
  misc_feature (1)..(1693): Ceres Seq. ID no. 13490475
  misc_feature (1)..(1693): Ortholog of  Ceres SEQ ID NO 14301676 as cited in SEQ ID NO 67423
ataaaaatcccaacatctcctaaaatctcccaaactttcaaaaagttaaccaaaacccccaaacagaaaaatgagaaacaatttcgtccctataattctctccttcatcatcttcttgactccatcaatcgcagaacaagaaccttcaattctttctcccgtcgatcaactcctcaacaaaacaagctcatacctcgatttttcaacaaaattcaaccaaccaagaatcgaactaacaacatcaacgatcatcgccggcatactctctttcctagcttcatcaatctcaagcgccggtggaatcggcggtggaggtttatatgttccgataatgacaatcgtggccggtctcgatctaaagacagcttcaagcttctcagcttttatggttactggtggatctatagctaacgtgggatgcaatctattcgttagaaaccctaaatctggtggcaaaaccctaatcgacttcgatttagctcttttattggaaccatgtatgcttcttggagttagtattggtgtgatctgtaatcttgttttcccgaactggttgattacgagtctcttcgctgtttttcttgcgtggtcgacgttgaagacttttggaaatggactttattattggagattggaatcggagatggtgaagattagagaatcgaatagaatagaagaagatgatgatgaagaagataagattgagagtctaaagttgcctctcttggaggattatcagagaccaaagaggtttccatggattaagcttggagctttggtcattatttggctttcttactttgcagtttatcttcttcgaggaaacaaatatggcgagggaatcatatcgatcgagccatgtggaaacgcctactggctcatttcatcgtctcaaataccactaactctcttcttcactctctggatctgcttcagtgacaatgttcaaagccaacaacaatcagattaccatgtctcagtaaaggatgtagaagatttgagatcaaatgatggagcaagatcaaacaagtgtatgttccctgtaatggctctattagctggagttttgggtggtgtgttcggtattggaggtggaatgctcattagtcctcttcttcttcaagtcggtatcgctcccgaggtaactgcagcgacatgttctttcatggttcttttttcatcaacaatgtctgcgattcaatacttattactaggcatggaacataccggaaccgcaagtatatttacggtcatatgttttgtggcgtcactcgtgggactaaaggtggttcaaaaggtaataaccgagtatggaagggcttcgatcattgtgttctcggttggtatcgtcatggcattgagtattgtgttgatgacaagctatggagctcttgatgtttggaatgattatgtctctggtcgttacatgggtttcaagttaccttgttgagaccaagaaaagaaagttttggtttcttgggttacaagtttcataatacatgtgtatatcatatcaccatgttgttgctctttcatccatttggtcatttagagttaagaagctttctgtttctttcttttgtatgatttttatatcactattcagaatgcacatctcgtgcattcgaatatatggtcaaataaaagttatgttgtgaacctaaattcatatttcaatatcaaatttctatgc

SEQ ID NO: 35813 - protein, 459 aa, Arabidopsis thaliana
  peptide (1)..(459): Ceres Seq. ID no. 13490476
MRNNFVPIILSFIIFLTPSIAEQEPSILSPVDQLLNKTSSYLDFSTKFNQPRIELTTSTIIAGILSFLASSISSAGGIGGGGLYVPIMTIVAGLDLKTASSFSAFMVTGGSIANVGCNLFVRNPKSGGKTLIDFDLALLLEPCMLLGVSIGVICNLVFPNWLITSLFAVFLAWSTLKTFGNGLYYWRLESEMVKIRESNRIEEDDDEEDKIESLKLPLLEDYQRPKRFPWIKLGALVIIWLSYFAVYLLRGNKYGEGIISIEPCGNAYWLISSSQIPLTLFFTLWICFSDNVQSQQQSDYHVSVKDVEDLRSNDGARSNKCMFPVMALLAGVLGGVFGIGGGMLISPLLLQVGIAPEVTAATCSFMVLFSSTMSAIQYLLLGMEHTGTASIFTVICFVASLVGLKVVQKVITEYGRASIIVFSVGIVMALSIVLMTSYGALDVWNDYVSGRYMGFKLPC

SEQ ID NO: 35814 - protein, 372 aa, Arabidopsis thaliana
  peptide (1)..(372): Ceres Seq. ID no. 13490477
MTIVAGLDLKTASSFSAFMVTGGSIANVGCNLFVRNPKSGGKTLIDFDLALLLEPCMLLGVSIGVICNLVFPNWLITSLFAVFLAWSTLKTFGNGLYYWRLESEMVKIRESNRIEEDDDEEDKIESLKLPLLEDYQRPKRFPWIKLGALVIIWLSYFAVYLLRGNKYGEGIISIEPCGNAYWLISSSQIPLTLFFTLWICFSDNVQSQQQSDYHVSVKDVEDLRSNDGARSNKCMFPVMALLAGVLGGVFGIGGGMLISPLLLQVGIAPEVTAATCSFMVLFSSTMSAIQYLLLGMEHTGTASIFTVICFVASLVGLKVVQKVITEYGRASIIVFSVGIVMALSIVLMTSYGALDVWNDYVSGRYMGFKLPC

SEQ ID NO: 35815 - protein, 354 aa, Arabidopsis thaliana
  peptide (1)..(354): Ceres Seq. ID no. 13490478
MVTGGSIANVGCNLFVRNPKSGGKTLIDFDLALLLEPCMLLGVSIGVICNLVFPNWLITSLFAVFLAWSTLKTFGNGLYYWRLESEMVKIRESNRIEEDDDEEDKIESLKLPLLEDYQRPKRFPWIKLGALVIIWLSYFAVYLLRGNKYGEGIISIEPCGNAYWLISSSQIPLTLFFTLWICFSDNVQSQQQSDYHVSVKDVEDLRSNDGARSNKCMFPVMALLAGVLGGVFGIGGGMLISPLLLQVGIAPEVTAATCSFMVLFSSTMSAIQYLLLGMEHTGTASIFTVICFVASLVGLKVVQKVITEYGRASIIVFSVGIVMALSIVLMTSYGALDVWNDYVSGRYMGFKLPC

SEQ ID NO: 35816 - DNA, 1317 bp, Arabidopsis thaliana
  misc_feature (1)..(1317): Ceres Seq. ID no. 12421574
  misc_feature (1)..(1317): Ortholog of  Ceres SEQ ID NO 13596807 as cited in SEQ ID NO 62275
aagaagcctattcgacttcctacttttctccgtgtttctaggactcgcatgtctctgtttatctccgattccggaacagctcggaaactcaggttcagtgttaacggcgagttcaagatactacaagtggcggatatgcattttgctaacggcgctaagacgcagtgtcaaaatgttcttcctagccagagagctcattgctcagacctcaacaccaccatcttcatgtcgcgagtcatcgccgccgagaagcctgatcttatcgtcttcaccggtgataacatatttgggtttgatgtaaaagacgctttgaaatccataaacgctgcgtttgctccagcgattgcgtctaaaatcccatgggttgctattttgggaaaccatgaccaagaatctacatttacaagacaacaagttatgaatcacattgtgaagcttcccaacactttgtctcaagtgaatcctcctgaagctgctcattacattgatggttttggtaattacaatctccaaatccatggagctgctgattcgaaactacagaacaaatctgttcttaatctttattttctcgatagtggagattattctagtgttccttacatggaaggttatgattggatcaaaacttctcagcagttttggttcgaccgcacttcaaaacgtctcaagagggagtacaacgcaaagcctaatcctcaagaaggtatagctccaggactagcttacttccacattccattaccggagtttttgagttttgactcaaagaacgctacaaaaggagtgagacaagaaggtacatccgcggcttctacaaactcgggtttcttcacaacattgatagctagaggagatgtgaaatctgtgtttgtgggtcacgaccatgtcaacgacttctgcggtgaacttaaaggtttgaatctatgttatggtggtggatttgggtatcatgcttatggtaaagctggatgggaaagaagagcgagagttgtggttgttgatttgaataagaagagaaaaggaaagtggggagctgtgaaatcgattaagacatggaagaggcttgatgataagcatctctctgttattgactctcaagttctttggaacaattctgcaaacaaattagttgttcgttgatattgattccatgtgttgttgttttgatctgtctactaaatgttctgttttagttggttttgggtttcatagaaactgtttaagtgtttatcattgagttagttttaaactccatttgatgtaattttgtttggtttaagactttaaggcaagaaagtgaaaaactaaactttc

SEQ ID NO: 35817 - protein, 380 aa, Arabidopsis thaliana
  peptide (1)..(380): Ceres Seq. ID no. 12421575
KKPIRLPTFLRVSRTRMSLFISDSGTARKLRFSVNGEFKILQVADMHFANGAKTQCQNVLPSQRAHCSDLNTTIFMSRVIAAEKPDLIVFTGDNIFGFDVKDALKSINAAFAPAIASKIPWVAILGNHDQESTFTRQQVMNHIVKLPNTLSQVNPPEAAHYIDGFGNYNLQIHGAADSKLQNKSVLNLYFLDSGDYSSVPYMEGYDWIKTSQQFWFDRTSKRLKREYNAKPNPQEGIAPGLAYFHIPLPEFLSFDSKNATKGVRQEGTSAASTNSGFFTTLIARGDVKSVFVGHDHVNDFCGELKGLNLCYGGGFGYHAYGKAGWERRARVVVVDLNKKRKGKWGAVKSIKTWKRLDDKHLSVIDSQVLWNNSANKLVVR

SEQ ID NO: 35818 - protein, 364 aa, Arabidopsis thaliana
  peptide (1)..(364): Ceres Seq. ID no. 12421576
MSLFISDSGTARKLRFSVNGEFKILQVADMHFANGAKTQCQNVLPSQRAHCSDLNTTIFMSRVIAAEKPDLIVFTGDNIFGFDVKDALKSINAAFAPAIASKIPWVAILGNHDQESTFTRQQVMNHIVKLPNTLSQVNPPEAAHYIDGFGNYNLQIHGAADSKLQNKSVLNLYFLDSGDYSSVPYMEGYDWIKTSQQFWFDRTSKRLKREYNAKPNPQEGIAPGLAYFHIPLPEFLSFDSKNATKGVRQEGTSAASTNSGFFTTLIARGDVKSVFVGHDHVNDFCGELKGLNLCYGGGFGYHAYGKAGWERRARVVVVDLNKKRKGKWGAVKSIKTWKRLDDKHLSVIDSQVLWNNSANKLVVR

SEQ ID NO: 35819 - protein, 335 aa, Arabidopsis thaliana
  peptide (1)..(335): Ceres Seq. ID no. 12421577
MHFANGAKTQCQNVLPSQRAHCSDLNTTIFMSRVIAAEKPDLIVFTGDNIFGFDVKDALKSINAAFAPAIASKIPWVAILGNHDQESTFTRQQVMNHIVKLPNTLSQVNPPEAAHYIDGFGNYNLQIHGAADSKLQNKSVLNLYFLDSGDYSSVPYMEGYDWIKTSQQFWFDRTSKRLKREYNAKPNPQEGIAPGLAYFHIPLPEFLSFDSKNATKGVRQEGTSAASTNSGFFTTLIARGDVKSVFVGHDHVNDFCGELKGLNLCYGGGFGYHAYGKAGWERRARVVVVDLNKKRKGKWGAVKSIKTWKRLDDKHLSVIDSQVLWNNSANKLVVR

SEQ ID NO: 35820 - DNA, 1143 bp, Arabidopsis thaliana
  misc_feature (1)..(1143): Ceres Seq. ID no. 12321414
  misc_feature (1)..(1143): Ortholog of  Ceres SEQ ID NO 15170760 as cited in SEQ ID NO 52747
  misc_feature (1)..(1143): Ortholog of  Ceres SEQ ID NO 15168549 as cited in SEQ ID NO 56976
  misc_feature (1)..(1143): Ortholog of  Ceres SEQ ID NO 14314335 as cited in SEQ ID NO 57305
  misc_feature (1)..(1143): Ortholog of  Ceres SEQ ID NO 15177588 as cited in SEQ ID NO 60367
aacaaacacaacatatccacaatacaaaacacaactttcatatataacaaaaaaagttatagaaatggccaaagacgtggaaggacctgagggatttcagacaagagactacgaagatccgccaccaactccgtttttcgatgcggacgagcttaccaagtggtctttatacagagccgtcattgccgagttcgtagccactctcctcttcttgtacatcaccgttttgactgttatcggttacaagattcagtccgacacaaaagctggtggagttgactgtggcggtgtcggaatccttggcatcgcgtgggcttttggtggcatgatcttcattcttgtctactgcaccgccggtatctcaggtggtcatataaacccggcggtgacatttggtttattcttagcccggaaggtgtcgctgattagggcggtgctttacatggtggctcagtgtttgggtgctatttgtggagttgggtttcgtcaaagctttcaaagctcttactatgatcgttacggtggaggagccaactctctagcagacggctacaacacaggcaccggactagccgcagagatcattggaacattcgttctcgtctacacagtcttctccgctactgatcccaaacgtaacgctagagactcccacgttccggttttggcgccacttccgattgggtttgcggtgtttatggtacatttggccactattccgatcaccggaaccggcatcaacccggctaggagtttcggagcgtccgtaatctataacaagagcaagccatgggatgaccactggatattctgggtgggaccattcattggagctgcgatagctgcattttatcaccaatttgtcctaagggcttcaggttccaagtcacttggatccttcagaagtgcagccaacgtttgagtttttgccacacaaaaaaaaacctatcataataacaacaattacaaaatggttgtgttattatgtatgtacaaaaattggcaactttgcttgtaaaactatgcactatatttcttcttgctttttctgttttcattgtggtgtaatactttgatatgtgccaatgccaatgtttgtgtactcgggaaaacaattaatgaaaaccaaattctttttgccct

SEQ ID NO: 35821 - protein, 306 aa, Arabidopsis thaliana
  peptide (1)..(306): Ceres Seq. ID no. 12321415
TNTTYPQYKTQLSYITKKVIEMAKDVEGPEGFQTRDYEDPPPTPFFDADELTKWSLYRAVIAEFVATLLFLYITVLTVIGYKIQSDTKAGGVDCGGVGILGIAWAFGGMIFILVYCTAGISGGHINPAVTFGLFLARKVSLIRAVLYMVAQCLGAICGVGFRQSFQSSYYDRYGGGANSLADGYNTGTGLAAEIIGTFVLVYTVFSATDPKRNARDSHVPVLAPLPIGFAVFMVHLATIPITGTGINPARSFGASVIYNKSKPWDDHWIFWVGPFIGAAIAAFYHQFVLRASGSKSLGSFRSAANV

SEQ ID NO: 35822 - protein, 285 aa, Arabidopsis thaliana
  peptide (1)..(285): Ceres Seq. ID no. 12321416
MAKDVEGPEGFQTRDYEDPPPTPFFDADELTKWSLYRAVIAEFVATLLFLYITVLTVIGYKIQSDTKAGGVDCGGVGILGIAWAFGGMIFILVYCTAGISGGHINPAVTFGLFLARKVSLIRAVLYMVAQCLGAICGVGFRQSFQSSYYDRYGGGANSLADGYNTGTGLAAEIIGTFVLVYTVFSATDPKRNARDSHVPVLAPLPIGFAVFMVHLATIPITGTGINPARSFGASVIYNKSKPWDDHWIFWVGPFIGAAIAAFYHQFVLRASGSKSLGSFRSAANV

SEQ ID NO: 35823 - protein, 198 aa, Arabidopsis thaliana
  peptide (1)..(198): Ceres Seq. ID no. 12321417
MIFILVYCTAGISGGHINPAVTFGLFLARKVSLIRAVLYMVAQCLGAICGVGFRQSFQSSYYDRYGGGANSLADGYNTGTGLAAEIIGTFVLVYTVFSATDPKRNARDSHVPVLAPLPIGFAVFMVHLATIPITGTGINPARSFGASVIYNKSKPWDDHWIFWVGPFIGAAIAAFYHQFVLRASGSKSLGSFRSAANV

SEQ ID NO: 35824 - DNA, 1530 bp, Arabidopsis thaliana
  misc_feature (1)..(1530): Ceres Seq. ID no. 13487891
  misc_feature (1)..(1530): Ortholog of  Ceres SEQ ID NO 15171293 as cited in SEQ ID NO 51744
aacttgccaataattttttcaactgttacagattactacatcaacgaaatattaaacatttaaccatatataaaagttggagatatatgatataagcttttcttagcagtcccacccttcctctctcgagagagctccattccaatcaaagctgtaaacacacttcagaagatggagatcactaacgttaccgagtatgatgcaatcgcaaaggcgaagttgcctaagatggtatatgactactatgcatctggtgcagaagatcaatggactcttcaagagaacagaaacgcttttgcaagaatcctcttccggcctcggattttgattgatgtgaacaaaattgatatggcgactaccgtcttggggttcaagatctcgatgccgatcatggttgctcctactgcctttcaaaagatggctcaccctgatggggaatatgctacggctagagctgcgtctgctgctggaaccatcatgacactatcttcatgggctacttcaagtgttgaagaagttgcttccacagggccaggaatccgattcttccagctctatgtatacaagaacaggaaggtggttgagcagctcgtgagaagagccgagaaagctgggttcaaagccattgctctcactgtagacaccccaaggctaggtcgcagagagtctgatatcaagaacagattcactttgcctccaaacctgacattgaagaactttgaaggtcttgaccttggaaagatggacgaggccaatgactctggcttggcttcgtatgttgctggtcaaattgaccgtaccttgagctggaaggatatccagtggctccaaacaatcaccaacatgccaattcttgtcaagggtgttcttacaggagaggatgcaaggatagcgattcaagctggagcagcagggatcattgtgtcaaatcatggagctcgccagcttgattatgtcccagcaacaatctcagcccttgaagaggttgtcaaagcaacacaaggacgagttcctgtcttcttggatggtggtgttcgacgtggcactgatgtcttcaaggcacttgcacttggagcctctggaatatttattggaagaccagtggtttttgcactagctgctgaaggagaagccggagtcaaaaaggtgcttcaaatgttgcgtgatgagttcgagctaaccatggcactaagtgggtgccggtcactcagtgaaatcacccgtaaccacattgtcacggaatgggacactccacgccatttgcccaggttatagagaagaaaaaaaaaacagagaacagaaacaacacggcaccaaaacgtattcatattctgattgatcactttgcttctactctgctatatttatatctcgaaaaacttgtttctccctatatcggatcacaaaaacgtgcgtagagattctctgtaatgctatttggctacattttacctttccgtttattcttattgcttgtacaatagatgttgattcctacaataccaatgaatactaaaatctgttcccggg

SEQ ID NO: 35825 - protein, 367 aa, Arabidopsis thaliana
  peptide (1)..(367): Ceres Seq. ID no. 13487892
MEITNVTEYDAIAKAKLPKMVYDYYASGAEDQWTLQENRNAFARILFRPRILIDVNKIDMATTVLGFKISMPIMVAPTAFQKMAHPDGEYATARAASAAGTIMTLSSWATSSVEEVASTGPGIRFFQLYVYKNRKVVEQLVRRAEKAGFKAIALTVDTPRLGRRESDIKNRFTLPPNLTLKNFEGLDLGKMDEANDSGLASYVAGQIDRTLSWKDIQWLQTITNMPILVKGVLTGEDARIAIQAGAAGIIVSNHGARQLDYVPATISALEEVVKATQGRVPVFLDGGVRRGTDVFKALALGASGIFIGRPVVFALAAEGEAGVKKVLQMLRDEFELTMALSGCRSLSEITRNHIVTEWDTPRHLPRL

SEQ ID NO: 35826 - protein, 348 aa, Arabidopsis thaliana
  peptide (1)..(348): Ceres Seq. ID no. 13487893
MVYDYYASGAEDQWTLQENRNAFARILFRPRILIDVNKIDMATTVLGFKISMPIMVAPTAFQKMAHPDGEYATARAASAAGTIMTLSSWATSSVEEVASTGPGIRFFQLYVYKNRKVVEQLVRRAEKAGFKAIALTVDTPRLGRRESDIKNRFTLPPNLTLKNFEGLDLGKMDEANDSGLASYVAGQIDRTLSWKDIQWLQTITNMPILVKGVLTGEDARIAIQAGAAGIIVSNHGARQLDYVPATISALEEVVKATQGRVPVFLDGGVRRGTDVFKALALGASGIFIGRPVVFALAAEGEAGVKKVLQMLRDEFELTMALSGCRSLSEITRNHIVTEWDTPRHLPRL

SEQ ID NO: 35827 - protein, 308 aa, Arabidopsis thaliana
  peptide (1)..(308): Ceres Seq. ID no. 13487894
MATTVLGFKISMPIMVAPTAFQKMAHPDGEYATARAASAAGTIMTLSSWATSSVEEVASTGPGIRFFQLYVYKNRKVVEQLVRRAEKAGFKAIALTVDTPRLGRRESDIKNRFTLPPNLTLKNFEGLDLGKMDEANDSGLASYVAGQIDRTLSWKDIQWLQTITNMPILVKGVLTGEDARIAIQAGAAGIIVSNHGARQLDYVPATISALEEVVKATQGRVPVFLDGGVRRGTDVFKALALGASGIFIGRPVVFALAAEGEAGVKKVLQMLRDEFELTMALSGCRSLSEITRNHIVTEWDTPRHLPRL

SEQ ID NO: 35828 - DNA, 749 bp, Arabidopsis thaliana
  misc_feature (1)..(749): Ceres Seq. ID no. 12337355
  misc_feature (1)..(749): Ortholog of  Ceres SEQ ID NO 15178928 as cited in SEQ ID NO 1118
atcgtcatcgtgaaatgtgcagctccggaaataaataatcactaaaataaccagatccgatctactgccccggtttctcgccggagtctccatcctgtaaccggcgatcctctttctgctcagttatggaagacgtgaaagggaaggagattattgatgatgctcctattgacagcaaggtttcagatgaaatggagagtgaggaaaatgcgatcaagaaaaagtatggaggattgttgcctaagaagattcctttgatatctaaggaccatgaacgtgcgttttttgattctgctgattgggctttaggcaagcaaaaaggacagaagccgaaaggacctttggaagctctccgcccaaaactgcagccaaccccgcaacagcaaccaagagcaagacgaatggcttattcttcaggcgaaactgaagactctgagactgataacaacgaagctccggatgaccaagcctgcgcatcagctgtcgatagtaccaatttaaaggacgatggaggcgcaaaagacaacatcaaatcatgaacaacatatagatatctcttgaggagcgcaaacaaacaacatcacaagtcaatttacagaagaataagcgaccaggtttgctttgcaacggttgtaatatcaagtctcttaccttatcatacttgggactgcaaatctgtatcacttacaaacctcgtggcttgaaacgtctattggacgattgcaaattatttgctttaatgatccatc

SEQ ID NO: 35829 - protein, 137 aa, Arabidopsis thaliana
  peptide (1)..(137): Ceres Seq. ID no. 12337356
MEDVKGKEIIDDAPIDSKVSDEMESEENAIKKKYGGLLPKKIPLISKDHERAFFDSADWALGKQKGQKPKGPLEALRPKLQPTPQQQPRARRMAYSSGETEDSETDNNEAPDDQACASAVDSTNLKDDGGAKDNIKS

SEQ ID NO: 35830 - protein, 115 aa, Arabidopsis thaliana
  peptide (1)..(115): Ceres Seq. ID no. 12337357
MESEENAIKKKYGGLLPKKIPLISKDHERAFFDSADWALGKQKGQKPKGPLEALRPKLQPTPQQQPRARRMAYSSGETEDSETDNNEAPDDQACASAVDSTNLKDDGGAKDNIKS

SEQ ID NO: 35831 - DNA, 1303 bp, Arabidopsis thaliana
  misc_feature (1)..(1303): Ceres Seq. ID no. 12379218
  misc_feature (1)..(1303): Ortholog of  Ceres SEQ ID NO 14308168 as cited in SEQ ID NO 59069
attctcagctttgccgttttcatcgattaaagagagagaggcttcgttcgccgtccgtcgtagaaatggggttcaagaggaagaaagatgatggtgatggtgaggaaatggaatctgatgttcgtggaaagtctactttcagtgggggtgagaagaggaatgtgatacttccttcgatgattaagaacaaagataagagatcaaaagtgtatgcgaagcagaagcatgagaagaaattggagaagcagaagaagattagagctcgtgatgctgctgagaaacgagctttagagcttggagaagagcctccacaaaagatgattccgaagacgattgagaatacaagagaatctgatgaaactgtttgcagacctgacgatgaagaattgtttgcggatattgatgctgatgagtttaatccagttctgagacgtgagattgcacctaaggtcttgctcacaacatgtcgtttcaattccactagaggacctgctttaatatctgagttgctttcggtgataccaaactctcattatcaaaagagaggaacctatgatttgaagaagattgtagaatacgcaacgaagaaagattttacatctcttattgttgttcatacaaatcgtagagaacctgatgcgcttcttatcatcggtttgccaaatggtcctactgctcatttcaaattgtcaaatcttgttctaaggaaggatattaagaatcacggaaatcctacaagccatcaaccagaactggttttgaataactttacaacgcgtttagggaatcgtgttgggagattttttcaatcactcttccctccggatcctaatttccgtggtaggagagttgtaacattccacaaccagcgtgactttatatttttcagacatcaccgttacatatttgagacaaaggaaagcaagagtgataaaggaaaagaagagacaataaaacctcgtcttcaggaatgcggtcctcgattcacgcttaagctagttactctacagcatggaacttttgacaccaaaggtggagaatttgaatgggttcataagcctgaaatggacacgagcaggagaaggttcttcttataaattctgctgtcttccgagtttcaccaagttttgtgtttattttgcattttcgaattttccctacctccgtccaaaattgtatgtctttaaaacttctcatttcttttttcaatatagccatgagccatcgaaacaatcgtaagagtacttgtttcaacaatataggccctcgttttttactaagctatatatagttggttaaactc

SEQ ID NO: 35832 - protein, 364 aa, Arabidopsis thaliana
  peptide (1)..(364): Ceres Seq. ID no. 12379219
SQLCRFHRLKRERLRSPSVVEMGFKRKKDDGDGEEMESDVRGKSTFSGGEKRNVILPSMIKNKDKRSKVYAKQKHEKKLEKQKKIRARDAAEKRALELGEEPPQKMIPKTIENTRESDETVCRPDDEELFADIDADEFNPVLRREIAPKVLLTTCRFNSTRGPALISELLSVIPNSHYQKRGTYDLKKIVEYATKKDFTSLIVVHTNRREPDALLIIGLPNGPTAHFKLSNLVLRKDIKNHGNPTSHQPELVLNNFTTRLGNRVGRFFQSLFPPDPNFRGRRVVTFHNQRDFIFFRHHRYIFETKESKSDKGKEETIKPRLQECGPRFTLKLVTLQHGTFDTKGGEFEWVHKPEMDTSRRRFFL

SEQ ID NO: 35833 - protein, 343 aa, Arabidopsis thaliana
  peptide (1)..(343): Ceres Seq. ID no. 12379220
MGFKRKKDDGDGEEMESDVRGKSTFSGGEKRNVILPSMIKNKDKRSKVYAKQKHEKKLEKQKKIRARDAAEKRALELGEEPPQKMIPKTIENTRESDETVCRPDDEELFADIDADEFNPVLRREIAPKVLLTTCRFNSTRGPALISELLSVIPNSHYQKRGTYDLKKIVEYATKKDFTSLIVVHTNRREPDALLIIGLPNGPTAHFKLSNLVLRKDIKNHGNPTSHQPELVLNNFTTRLGNRVGRFFQSLFPPDPNFRGRRVVTFHNQRDFIFFRHHRYIFETKESKSDKGKEETIKPRLQECGPRFTLKLVTLQHGTFDTKGGEFEWVHKPEMDTSRRRFFL

SEQ ID NO: 35834 - protein, 329 aa, Arabidopsis thaliana
  peptide (1)..(329): Ceres Seq. ID no. 12379221
MESDVRGKSTFSGGEKRNVILPSMIKNKDKRSKVYAKQKHEKKLEKQKKIRARDAAEKRALELGEEPPQKMIPKTIENTRESDETVCRPDDEELFADIDADEFNPVLRREIAPKVLLTTCRFNSTRGPALISELLSVIPNSHYQKRGTYDLKKIVEYATKKDFTSLIVVHTNRREPDALLIIGLPNGPTAHFKLSNLVLRKDIKNHGNPTSHQPELVLNNFTTRLGNRVGRFFQSLFPPDPNFRGRRVVTFHNQRDFIFFRHHRYIFETKESKSDKGKEETIKPRLQECGPRFTLKLVTLQHGTFDTKGGEFEWVHKPEMDTSRRRFFL

SEQ ID NO: 35835 - DNA, 1362 bp, Arabidopsis thaliana
  misc_feature (1)..(1362): Ceres Seq. ID no. 12334496
  misc_feature (1)..(1362): Ortholog of  Ceres SEQ ID NO 14313471 as cited in SEQ ID NO 64513
  misc_feature (1)..(1362): Ortholog of  Ceres SEQ ID NO 13591377 as cited in SEQ ID NO 66534
aatttcattcgttctttatcaacaacactctctctcttctctatcaacactttctttcatctctcgccggaaaaacccataaccacaacaatggccaccgaaacccaaatccgaatcggagtaatgggttgcgccgatatcgctcgaaaagtctctcgagcaatccacctcgctcccaacgccacaatctccggcgtagcaagccggtctttagaaaaagccaaagcctttgccaccgccaataactacccagaatcaaccaaaatccacggctcttacgaatctcttctcgaagatccagagatcgatgcgctctatgttcctctccccactagtctccacgttgagtgggctattaaagcagctgagaaagggaaacatatccttttggagaagcctgttgctatgaacgtaactgagtttgataagattgttgatgcttgtgaagctaatggtgttcagattatggatggtactatgtgggttcataatcctagaactgctttgcttaaagagtttctttctgattctgaacgttttggtcagcttaaaactgtacagagttgtttctcatttgctggagatgaagattttcttaaaaacgatatccgtgtgaaacctggtcttgacgggcttggtgcgctaggagatgcggggtggtacgcgatcagagcaactcttttagctaataactttgagcttccgaaaactgtgactgctttccccggtgctgtgttgaatgaagcaggattgatactttcctgtggagcatctttgagttgggaagatggacgaactgcaactatatattgttcattcttggctaacttaacaatggagataactgccattggaacgaaaggcacactccgtgtacacgacttcattatcccgtataaggagactgaggcgtcgtttaccacgagcactaaagcttggttcaatgaccttgtgactgcgtgggttagtcccccgagtgagcatacggttaagacagagcttccacaagaggcatgtatggtgagagagtttgctcgattggttggagaaatcaagaacaatggtgcaaagcctgatgggtactggcctagtattagccgaaagacgcagctagtggttgatgctgttaaagagtctgttgataaaaactatcaacagattagtctctctggtcgttgaaggaaaggactcagactataaatgttgtcgtgtgttctctcctctctcgctctctatgttcaaacttcgatcaaccgtttaagtgtttgttaccacttaccaatatgttctgtcttctgctgtgtccgcctgtatgtatgttaattgttttagactccaattactagccttcaattactaagc

SEQ ID NO: 35836 - protein, 392 aa, Arabidopsis thaliana
  peptide (1)..(392): Ceres Seq. ID no. 12334497
NFIRSLSTTLSLFSINTFFHLSPEKPITTTMATETQIRIGVMGCADIARKVSRAIHLAPNATISGVASRSLEKAKAFATANNYPESTKIHGSYESLLEDPEIDALYVPLPTSLHVEWAIKAAEKGKHILLEKPVAMNVTEFDKIVDACEANGVQIMDGTMWVHNPRTALLKEFLSDSERFGQLKTVQSCFSFAGDEDFLKNDIRVKPGLDGLGALGDAGWYAIRATLLANNFELPKTVTAFPGAVLNEAGLILSCGASLSWEDGRTATIYCSFLANLTMEITAIGTKGTLRVHDFIIPYKETEASFTTSTKAWFNDLVTAWVSPPSEHTVKTELPQEACMVREFARLVGEIKNNGAKPDGYWPSISRKTQLVVDAVKESVDKNYQQISLSGR

SEQ ID NO: 35837 - protein, 362 aa, Arabidopsis thaliana
  peptide (1)..(362): Ceres Seq. ID no. 12334498
MATETQIRIGVMGCADIARKVSRAIHLAPNATISGVASRSLEKAKAFATANNYPESTKIHGSYESLLEDPEIDALYVPLPTSLHVEWAIKAAEKGKHILLEKPVAMNVTEFDKIVDACEANGVQIMDGTMWVHNPRTALLKEFLSDSERFGQLKTVQSCFSFAGDEDFLKNDIRVKPGLDGLGALGDAGWYAIRATLLANNFELPKTVTAFPGAVLNEAGLILSCGASLSWEDGRTATIYCSFLANLTMEITAIGTKGTLRVHDFIIPYKETEASFTTSTKAWFNDLVTAWVSPPSEHTVKTELPQEACMVREFARLVGEIKNNGAKPDGYWPSISRKTQLVVDAVKESVDKNYQQISLSGR

SEQ ID NO: 35838 - protein, 351 aa, Arabidopsis thaliana
  peptide (1)..(351): Ceres Seq. ID no. 12334499
MGCADIARKVSRAIHLAPNATISGVASRSLEKAKAFATANNYPESTKIHGSYESLLEDPEIDALYVPLPTSLHVEWAIKAAEKGKHILLEKPVAMNVTEFDKIVDACEANGVQIMDGTMWVHNPRTALLKEFLSDSERFGQLKTVQSCFSFAGDEDFLKNDIRVKPGLDGLGALGDAGWYAIRATLLANNFELPKTVTAFPGAVLNEAGLILSCGASLSWEDGRTATIYCSFLANLTMEITAIGTKGTLRVHDFIIPYKETEASFTTSTKAWFNDLVTAWVSPPSEHTVKTELPQEACMVREFARLVGEIKNNGAKPDGYWPSISRKTQLVVDAVKESVDKNYQQISLSGR

SEQ ID NO: 35839 - DNA, 1486 bp, Arabidopsis thaliana
  misc_feature (1)..(1486): Ceres Seq. ID no. 12335066
  misc_feature (1)..(1486): Ortholog of  Ceres SEQ ID NO 12609528 as cited in SEQ ID NO 51902
  misc_feature (1)..(1486): Ortholog of  Ceres SEQ ID NO 12625248 as cited in SEQ ID NO 68797
atatagggttacatcttccttagcttgaatacaaaagaaaagctcaagtttgtttctcgtttctatggatattcttcttccttatgctagcctctctggtcttcttcttcttcgttcgtttcagcgaatcacatttgatctatgacacatctatacaaggaattagctttcatcatcaagtctctctctctcgaaaactctcctttggtttcgtttgatctgagaaaagaagaaattcaaatattgataactgtggatgggtgcaccaaagcagaagtggacaccggaagaagaagcagctcttaaagctggagttcttaagcatgggactgggaagtggcgtaccatactctcggatactgagtttagtttaatccttaagtctcgctctaatgttgatcttaaggacaaatggagaaatataagcgtgacagctttatggggttcaaggaagaaggctaaacttgcgcttaagaggactccaccaggtactaaacaggatgataacaacacagctcttaccattgtggctttgactaatgatgatgaacgtgcaaaaccaacttcccccggaggttctggtggtggatcaccacgcacttgtgcttctaagagatcaattacaagtttggataagatcatctttgaggcaattaccaacttgagggaactacgcggttctgacagaacatcaatctttctgtatatagaggagaatttcaagactccaccgaatatgaaaaggcatgtcgcagtacgattaaagcatttatcatcgaatggaacattagttaagataaagcacaagtacaggttttcttctaattttattcccgcaggtgcaagacagaaggctcctcaactctttctggaaggaaacaacaagaaagacccaacaaaacccgaggagaacggtgccaacagtctcactaaattccgagtagacggtgaattatatatgataaaaggcatgacagctcaagaagctgcagaggctgcagcaagagcagttgcagaggcagaatttgctatcacagaggctgaacaagcagcaaaagaggcagaaagagcagaagcagaagctgaagctgctcagatatttgcaaaggcagccatgaaagctttgaagttcaggatccgtaatcatccttggtgaaacagaaagaaatagccatcatggggaagttctgtaacaaagcaagccataaaatatatatacttagtgggtttactggtttcttaagagtgccgatcttgaatcaggcgatatctcatcacctgcagagttttttaagtttccaaacctatctgctctctttttttggttagtaacagtgtaaatccgcagtttgatcatatgtatgttctttctccgaatctgagattctgtataactgatcttttattgtatgtggatgatctgtttagtaaccttgaaactattttgaagtgagatgagtaagcaaaaaaattgagattttgttct

SEQ ID NO: 35840 - protein, 299 aa, Arabidopsis thaliana
  peptide (1)..(299): Ceres Seq. ID no. 12335067
MGAPKQKWTPEEEAALKAGVLKHGTGKWRTILSDTEFSLILKSRSNVDLKDKWRNISVTALWGSRKKAKLALKRTPPGTKQDDNNTALTIVALTNDDERAKPTSPGGSGGGSPRTCASKRSITSLDKIIFEAITNLRELRGSDRTSIFLYIEENFKTPPNMKRHVAVRLKHLSSNGTLVKIKHKYRFSSNFIPAGARQKAPQLFLEGNNKKDPTKPEENGANSLTKFRVDGELYMIKGMTAQEAAEAAARAVAEAEFAITEAEQAAKEAERAEAEAEAAQIFAKAAMKALKFRIRNHPW

SEQ ID NO: 35841 - DNA, 1146 bp, Arabidopsis thaliana
  misc_feature (1)..(1146): Ceres Seq. ID no. 13499978
  misc_feature (1)..(1146): Ortholog of  Ceres SEQ ID NO 15179499 as cited in SEQ ID NO 0
ggggaagaagaaaactctccttctttttgtaacttttgcttcacctctctcttcttctcttgttctattttttttcccgattcaagcaaaattcatcaagacttgtcaatttgaaaaaatgtcgcaatcaaccgtagatgttccgccaaagggtgggtttagcttcgatctgtgtaagagaaatgatatgcttacacaaaagggtcttaaagctccgtcttttttgaagactggaacaaccattgttggtttgattttcaaggatggtgtgatactaggggcagatacccgagcaactgaggggccaattgttgctgataagaactgtgagaagattcactatatggcaccaaacatatattgctgtggtgcaggaactgcggctgatactgaagcagtcactgatatggtcagctcacagctgcgattgcatcgttaccagactggtcgagactctcgggtcattactgctttgacccttctcaaaaaacatcttttcagctaccaaggtcatgtctctgctgctcttgtactcggtggagttgatatcactggtccacatctgcatactatatacccacacggttcaactgacactcttccattcgccacaatgggttcgggttctcttgctgctatgtctgtgtttgaggcaaagtataaagaaggcctaactagggatgaaggaattaagctggtcgctgaatccatatgctcgggtatattcaatgacctgggtagtggtagcaacgtggacatctgcgtgatcacaaaggggaacaaggaatatctcaggaactacatggaaccaaacccaagaacctatgtcagcagcaaaggctattccttcaccaagaaaactgaggttcttctcaccaaaatcaccccattgctggagcgagtcgaaatcacagaagttggtgaagctatggaggaataattcaatcaatctcatatatcttcttttgcattgatctacatcaaggctctgtgtactctcatgatctcatcttcccagtcttgtcttcttcccatgtttaaggatcattcaaatcttgttactcctctctctccatcttagatttcaatagagagggtaagactcgagagacttcgtcctttcgaaataaaaaaacaactttccct

SEQ ID NO: 35842 - protein, 312 aa, Arabidopsis thaliana
  peptide (1)..(312): Ceres Seq. ID no. 13499979
GKKKTLLLFVTFASPLSSSLVLFFFPIQAKFIKTCQFEKMSQSTVDVPPKGGFSFDLCKRNDMLTQKGLKAPSFLKTGTTIVGLIFKDGVILGADTRATEGPIVADKNCEKIHYMAPNIYCCGAGTAADTEAVTDMVSSQLRLHRYQTGRDSRVITALTLLKKHLFSYQGHVSAALVLGGVDITGPHLHTIYPHGSTDTLPFATMGSGSLAAMSVFEAKYKEGLTRDEGIKLVAESICSGIFNDLGSGSNVDICVITKGNKEYLRNYMEPNPRTYVSSKGYSFTKKTEVLLTKITPLLERVEITEVGEAMEE

SEQ ID NO: 35843 - protein, 273 aa, Arabidopsis thaliana
  peptide (1)..(273): Ceres Seq. ID no. 13499980
MSQSTVDVPPKGGFSFDLCKRNDMLTQKGLKAPSFLKTGTTIVGLIFKDGVILGADTRATEGPIVADKNCEKIHYMAPNIYCCGAGTAADTEAVTDMVSSQLRLHRYQTGRDSRVITALTLLKKHLFSYQGHVSAALVLGGVDITGPHLHTIYPHGSTDTLPFATMGSGSLAAMSVFEAKYKEGLTRDEGIKLVAESICSGIFNDLGSGSNVDICVITKGNKEYLRNYMEPNPRTYVSSKGYSFTKKTEVLLTKITPLLERVEITEVGEAMEE

SEQ ID NO: 35844 - protein, 250 aa, Arabidopsis thaliana
  peptide (1)..(250): Ceres Seq. ID no. 13499981
MLTQKGLKAPSFLKTGTTIVGLIFKDGVILGADTRATEGPIVADKNCEKIHYMAPNIYCCGAGTAADTEAVTDMVSSQLRLHRYQTGRDSRVITALTLLKKHLFSYQGHVSAALVLGGVDITGPHLHTIYPHGSTDTLPFATMGSGSLAAMSVFEAKYKEGLTRDEGIKLVAESICSGIFNDLGSGSNVDICVITKGNKEYLRNYMEPNPRTYVSSKGYSFTKKTEVLLTKITPLLERVEITEVGEAMEE

SEQ ID NO: 35845 - DNA, 1230 bp, Arabidopsis thaliana
  misc_feature (1)..(1230): Ceres Seq. ID no. 12488185
  misc_feature (1)..(1230): Ortholog of  Ceres SEQ ID NO 13502858 as cited in SEQ ID NO 65109
atttttttttcgtcccattttgttctttctactgtcgccgtaaaggatattcaaaagcggtagaggcggcgatggcggatcttttaccacctcttacggcggcacaagtcgatgctaagactaaagtcgatgagaaagtcgattactcgaacctcccttctcctgttccctatgaggaactccaccgtgaagctctcatgtctttaaagtcggacaattttgagggtttacgcttcgactttaccagggcgttgaatcagaagttttctctcagtcatagtgtaatgatggggccaaccgaagttcctgctcagtcacctgaaactactatcaaaattccaacagcccattatgagtttggtgccaattattatgacccaaagttgctgctcatcggaagggtaatgactgatggtagactaaatgcgagactgaaagcagatttaactgataagttagttgtgaaggcgaatgctctgataacaaatgaggaacatatgtcacaagcaatgttcaactttgattacatgggatcagactacagagctcagcttcaacttggacagagtgccctaattggagcaacttatatccagagtgttacaaaccatttatccttgggtggtgaaattttctgggctggtgtgcctcggaagtcgggaataggctatgctgctagatacgagacagataaaatggttgcttctggtcaagttgctagcacgggtgctgttgttatgaactatgttcagaagatttcagataaggtgtcacttgccactgatttcatgtacaactacttttcaagagatgtaacagctagtgtgggttatgactatatgcttagacaggctcgtgtgcggggtaagatcgattcaaacggtgttgcatccgctctccttgaagaaagattgagtatgggactcaattttcttctttctgcagagctggatcataagaagaaggactacaagtttggtttcggattaacagttggttaaaagaccgaataaaaaccggcacacaataagcctggcgcacagagcagattgcagcagtagtggtttcagctgcgaggatttcggttaaaatttattctatttcagtttaggctttttggtgaagttgggaagataaacggtaacgatgttgtgttgttatttgaggtttaggatttgtttccaagaaccattttataaaagaagaagaagcaaatgaggtttttgtttt

SEQ ID NO: 35846 - protein, 332 aa, Arabidopsis thaliana
  peptide (1)..(332): Ceres Seq. ID no. 12488186
FFFVPFCSFYCRRKGYSKAVEAAMADLLPPLTAAQVDAKTKVDEKVDYSNLPSPVPYEELHREALMSLKSDNFEGLRFDFTRALNQKFSLSHSVMMGPTEVPAQSPETTIKIPTAHYEFGANYYDPKLLLIGRVMTDGRLNARLKADLTDKLVVKANALITNEEHMSQAMFNFDYMGSDYRAQLQLGQSALIGATYIQSVTNHLSLGGEIFWAGVPRKSGIGYAARYETDKMVASGQVASTGAVVMNYVQKISDKVSLATDFMYNYFSRDVTASVGYDYMLRQARVRGKIDSNGVASALLEERLSMGLNFLLSAELDHKKKDYKFGFGLTVG

SEQ ID NO: 35847 - protein, 309 aa, Arabidopsis thaliana; identical to SEQ ID NO: 24718
  peptide (1)..(309): Ceres Seq. ID no. 12488187

SEQ ID NO: 35848 - protein, 267 aa, Arabidopsis thaliana; identical to SEQ ID NO: 24719
  peptide (1)..(267): Ceres Seq. ID no. 12488188

SEQ ID NO: 35849 - DNA, 920 bp, Arabidopsis thaliana
  misc_feature (1)..(920): Ceres Seq. ID no. 12334492
  misc_feature (1)..(920): Ortholog of  Ceres SEQ ID NO 14308586 as cited in SEQ ID NO 55143
  misc_feature (1)..(920): Ortholog of  Ceres SEQ ID NO 14314308 as cited in SEQ ID NO 57259
  misc_feature (1)..(920): Ortholog of  Ceres SEQ ID NO 15226216 as cited in SEQ ID NO 62291
actcagagacttgttgtgaagttgaaactctctgaccgtagctttcttatccttcattcaggttcactactatgtacagtctcacattcaaatgaatgagtaccgggatcgtgttgtattgccatctgcttcaaagaaacagggacgaccaatttgcacttgtttgaaaattttggatatgtctggtttaaagctttcagctttaagtcaaattaagttaatgactgctataacaacaatagatgatttgaactatccagagaagacagagacatactatgttgtcaatgtcccgtacatattctctgcttgttggaaaaccataaagcctctgttgcaagagagaacaaagaagaagattcaagttctgaaaggttgcgggaaagatgagttgctaaagataatggactatgagtctctcccacatttctgtagaagagaagggtctggatctggtaggcatatctcaaatggaacagtagacaattgtttctctctggatcactctttccaccaagacctttatgattatgtcaagcagcaggctctggttaaaggatcaggtgcaccgatcagacatggttcagtccacgttaagttccctgagccagacaccgaaggcaacaagatcttcgataccttagaaaatgagttccagaagcttggaaatgaccagaagatctgagtgatctacaacccttataacacgaattgcccataagaaaccggaatttgtctctggttgatgagcagtatttaagataagaatcaatcacctttacttgtattactagtttcgcttgcatcagctcgatgcaggttttgtttaaaaagaagatggaacacaatttcctcggaatggatcttttgatctagtaccattatatatatagaactcatttctatttatgtccttttgc

SEQ ID NO: 35850 - protein, 197 aa, Arabidopsis thaliana
  peptide (1)..(197): Ceres Seq. ID no. 12334493
MNEYRDRVVLPSASKKQGRPICTCLKILDMSGLKLSALSQIKLMTAITTIDDLNYPEKTETYYVVNVPYIFSACWKTIKPLLQERTKKKIQVLKGCGKDELLKIMDYESLPHFCRREGSGSGRHISNGTVDNCFSLDHSFHQDLYDYVKQQALVKGSGAPIRHGSVHVKFPEPDTEGNKIFDTLENEFQKLGNDQKI

SEQ ID NO: 35851 - protein, 168 aa, Arabidopsis thaliana
  peptide (1)..(168): Ceres Seq. ID no. 12334494
MSGLKLSALSQIKLMTAITTIDDLNYPEKTETYYVVNVPYIFSACWKTIKPLLQERTKKKIQVLKGCGKDELLKIMDYESLPHFCRREGSGSGRHISNGTVDNCFSLDHSFHQDLYDYVKQQALVKGSGAPIRHGSVHVKFPEPDTEGNKIFDTLENEFQKLGNDQKI

SEQ ID NO: 35852 - protein, 154 aa, Arabidopsis thaliana
  peptide (1)..(154): Ceres Seq. ID no. 12334495
MTAITTIDDLNYPEKTETYYVVNVPYIFSACWKTIKPLLQERTKKKIQVLKGCGKDELLKIMDYESLPHFCRREGSGSGRHISNGTVDNCFSLDHSFHQDLYDYVKQQALVKGSGAPIRHGSVHVKFPEPDTEGNKIFDTLENEFQKLGNDQKI

SEQ ID NO: 35853 - DNA, 1176 bp, Arabidopsis thaliana
  misc_feature (1)..(1176): Ceres Seq. ID no. 13592325
  misc_feature (1)..(1176): Ortholog of  Ceres SEQ ID NO 13599131 as cited in SEQ ID NO 0
gaccatttcttttccatgactttcctcttatcaagaacatttatttctctcactctcagaccttcttgttcgatttccatggcgaatttaacgacgaacgctaaatctcgcctgagaggtgttgtattcgatatggacggaaccctgactgttccggtcatcgatttcgccgcaatgtatagagctgttcttggtgaagatgcttacaagcgaatcaaagcagagagccctagtgggattgatattctgcatcatattgagtcgtggagtcctgataaacagcagaaggcgtatgaaatcattgctgattatgagaaacaaggaatagataagcttcaaatcatgcctggtactgctgaactatgtggcttccttgattccaaaaagataaagagggggctaattacacgcaatgttcaaaaggcaatcgacatcttccatcaacgttttgaggttatcttttctccagcactaggcagagagtttcgtccatataaaccaaacccagacccgctgttgcatatatgttctacatgggacatccaacctaatgaagtcatgatggttggtgacagcttaaaagatgatgtgagtgacagacatgatgacaagcctttggtcaaccctttctccatagcaaatcgataagcaatgcaatgaaagaagcttaaacaatggatcttctcatgccattgcttaaagattttctatgtggaaaggatgcctaccaacttttcagactatttttctcacatctttactgaagattacaactgggaatcgatctttcttttctcgattctgcagatagcatgtgggaaacgagctggagccttcacttgcttgctagatgaaaccggaaggtatggaccagacgatttttctgtttccggtctgcaacctgattttaaggttgattccttgtccaaaatccagaacctattggagacgaacttcgacctgaacccgtagtttttccaagttcctcatcttgtagtttcagtgaccaaattagtgtcctactcaacacagtatctgttcaggatagccataaatgtcaaaccacggaattctatgcactggctatctttaagttgcacaattgtgtccctgcatggtcgtctagcgaacatgtgtgtgagggcaaacattgttgtttgttaaatccaaaatttc

SEQ ID NO: 35854 - protein, 215 aa, Arabidopsis thaliana
  peptide (1)..(215): Ceres Seq. ID no. 13592326
DHFFSMTFLLSRTFISLTLRPSCSISMANLTTNAKSRLRGVVFDMDGTLTVPVIDFAAMYRAVLGEDAYKRIKAESPSGIDILHHIESWSPDKQQKAYEIIADYEKQGIDKLQIMPGTAELCGFLDSKKIKRGLITRNVQKAIDIFHQRFEVIFSPALGREFRPYKPNPDPLLHICSTWDIQPNEVMMVGDSLKDDVSDRHDDKPLVNPFSIANR

SEQ ID NO: 35855 - protein, 210 aa, Arabidopsis thaliana
  peptide (1)..(210): Ceres Seq. ID no. 13592327
MTFLLSRTFISLTLRPSCSISMANLTTNAKSRLRGVVFDMDGTLTVPVIDFAAMYRAVLGEDAYKRIKAESPSGIDILHHIESWSPDKQQKAYEIIADYEKQGIDKLQIMPGTAELCGFLDSKKIKRGLITRNVQKAIDIFHQRFEVIFSPALGREFRPYKPNPDPLLHICSTWDIQPNEVMMVGDSLKDDVSDRHDDKPLVNPFSIANR

SEQ ID NO: 35856 - protein, 189 aa, Arabidopsis thaliana
  peptide (1)..(189): Ceres Seq. ID no. 13592328
MANLTTNAKSRLRGVVFDMDGTLTVPVIDFAAMYRAVLGEDAYKRIKAESPSGIDILHHIESWSPDKQQKAYEIIADYEKQGIDKLQIMPGTAELCGFLDSKKIKRGLITRNVQKAIDIFHQRFEVIFSPALGREFRPYKPNPDPLLHICSTWDIQPNEVMMVGDSLKDDVSDRHDDKPLVNPFSIANR

SEQ ID NO: 35857 - DNA, 1284 bp, Arabidopsis thaliana
  misc_feature (1)..(1284): Ceres Seq. ID no. 12348687
  misc_feature (1)..(1284): Ortholog of  Ceres SEQ ID NO 12582036 as cited in SEQ ID NO 50981
  misc_feature (1)..(1284): Ortholog of  Ceres SEQ ID NO 14311969 as cited in SEQ ID NO 58929
  misc_feature (1)..(1284): Ortholog of  Ceres SEQ ID NO 15173523 as cited in SEQ ID NO 61797
  misc_feature (1)..(1284): Ortholog of  Ceres SEQ ID NO 14309357 as cited in SEQ ID NO 0
agattagatcttggttccaaatttcactcttttcctctaaaacgcatttatcactttccctcattaaacacaaaaactcattcatcgtcctctctcgcttgacctacaacacccgattctctaatcgaaaccgtttctctctttttgatcagatctcagatctttccctctttgattcttcttccttagatcgattctctctagaaacaacaatggcgtctgggcgtgaagagttcgtatacatggctaagctcgcggagcaagcggagaggtacgaagagatggtagagtttatggagaaagtctccgccgccgttgatggcgatgaactcaccgtagaagagcgaaatcttctctccgtcgcttataagaatgtgattggtgctcgccgtgcctcgtggcgtatcatttcatcgatcgagcagaaggaagagagccgtggtaacgatgaccacgtcacggcgatccgtgaatataggtctaagatcgagacggaactctccggaatctgcgacggaatccttaagttgcttgactctagactcatccctgccgctgcttctggtgattccaaggtcttttaccttaagatgaagggagattatcacaggtacttggctgagtttaagactggtcaagagaggaaagacgccgccgaacatacactcgccgcttacaaatctgctcaggatattgctaatgcagagcttgctccaacacacccaattcgtcttggtcttgcattgaacttctctgtgttctattacgagatcctcaattctcctgatcgtgcctgtaacctcgccaaacaggcctttgatgaggcgattgcagagttggacactcttggtgaagagtcatacaaagacagtaccttgatcatgcagcttcttcgtgacaatctcactctctggacatctgatatgcaggatgatgctgcggatgagatcaaggaagcagcagcgccaaaaccgaccgaggaacagcagtgatcttttgagtgaaactgctagttttcttctagggtttggaatttcttctctttctcgtccatatgtttttcttaatccatctaagaggtcgctcttgccatttcgctcatcttcaaaagcttattcattcatcatatttgtggcaagtctgaaccatcaatcatctttttatctctttttaatttattttctcttttcttatttctttgttgttatcgatttcaatgtctgtgtaatcgaaacttgctttcttttctcatcaatttgaagatcataaagtctcttgtctctt

SEQ ID NO: 35858 - protein, 329 aa, Arabidopsis thaliana
  peptide (1)..(329): Ceres Seq. ID no. 12348688
IRSWFQISLFSSKTHLSLSLIKHKNSFIVLSRLTYNTRFSNRNRFSLFDQISDLSLFDSSSLDRFSLETTMASGREEFVYMAKLAEQAERYEEMVEFMEKVSAAVDGDELTVEERNLLSVAYKNVIGARRASWRIISSIEQKEESRGNDDHVTAIREYRSKIETELSGICDGILKLLDSRLIPAAASGDSKVFYLKMKGDYHRYLAEFKTGQERKDAAEHTLAAYKSAQDIANAELAPTHPIRLGLALNFSVFYYEILNSPDRACNLAKQAFDEAIAELDTLGEESYKDSTLIMQLLRDNLTLWTSDMQDDAADEIKEAAAPKPTEEQQ

SEQ ID NO: 35859 - protein, 259 aa, Arabidopsis thaliana
  peptide (1)..(259): Ceres Seq. ID no. 12348689
MASGREEFVYMAKLAEQAERYEEMVEFMEKVSAAVDGDELTVEERNLLSVAYKNVIGARRASWRIISSIEQKEESRGNDDHVTAIREYRSKIETELSGICDGILKLLDSRLIPAAASGDSKVFYLKMKGDYHRYLAEFKTGQERKDAAEHTLAAYKSAQDIANAELAPTHPIRLGLALNFSVFYYEILNSPDRACNLAKQAFDEAIAELDTLGEESYKDSTLIMQLLRDNLTLWTSDMQDDAADEIKEAAAPKPTEEQQ

SEQ ID NO: 35860 - protein, 249 aa, Arabidopsis thaliana
  peptide (1)..(249): Ceres Seq. ID no. 12348690
MAKLAEQAERYEEMVEFMEKVSAAVDGDELTVEERNLLSVAYKNVIGARRASWRIISSIEQKEESRGNDDHVTAIREYRSKIETELSGICDGILKLLDSRLIPAAASGDSKVFYLKMKGDYHRYLAEFKTGQERKDAAEHTLAAYKSAQDIANAELAPTHPIRLGLALNFSVFYYEILNSPDRACNLAKQAFDEAIAELDTLGEESYKDSTLIMQLLRDNLTLWTSDMQDDAADEIKEAAAPKPTEEQQ

SEQ ID NO: 35861 - DNA, 861 bp, Arabidopsis thaliana
  misc_feature (1)..(861): Ceres Seq. ID no. 12372082
  misc_feature (1)..(861): Ortholog of  Ceres SEQ ID NO 12627215 as cited in SEQ ID NO 60976
  misc_feature (1)..(861): Ortholog of  Ceres SEQ ID NO 13654980 as cited in SEQ ID NO 63094
  misc_feature (1)..(861): Ortholog of  Ceres SEQ ID NO 12589584 as cited in SEQ ID NO 0
  misc_feature (1)..(861): Ortholog of  Ceres SEQ ID NO 12635657 as cited in SEQ ID NO 0
  misc_feature (1)..(861): Ortholog of  Ceres SEQ ID NO 12635879 as cited in SEQ ID NO 0
  misc_feature (1)..(861): Ortholog of  Ceres SEQ ID NO 13599649 as cited in SEQ ID NO 0
  misc_feature (1)..(861): Ortholog of  Ceres SEQ ID NO 14309404 as cited in SEQ ID NO 0
aaaaaagggactgtggagaaacactttagcacggtgcgacaagatggcgagctcagtgacgctgcttctatggagtcttcttcttctcggtacactaagcgctattcaggccaaaaagtctaaggaaaacttaaaggagatcacacacaaggtttattttgatgttgaaattgatgggaaagcagctggtcgtattgtcatgggtctatttggcaagacagtccccaaaactgtagagaatttccgagctttatgcactggggagaaaggaataggtaagaatgggaaggcgctccattacaaggggagttcatttcataggatcataccaagctttatgctccaaggaggcgattttacacatggaaatggaatgggaggagaatctatctatggtgagaagtttgctgatgagaacttcaaactcaagcatactggtccagggttcttatcaatggcaaatgccggtcaagataccaacggatcacagtttttcatcacaactgtaacaaccagctggttggatgggcgacatgtggtattcgggaaggtagtgacaggaatggatgtggtgtacaaagtcgaagctgaaggaaatcagagtggaactcctaagagtaaagtggtgattgtagacagtggtgagcttcccctgtaactcaacaactctagttttctccatctgatcatccattgatgtgagctctagtgtgcttgatgacttttgtgttaaaacgagtgtcttggttactttatgaaagattctaccggctttatttctttcgtctgctttctagctcgagctatgtctgactttatacacaaatgtctttcagtagcaaaaattctgcacttatgccg

SEQ ID NO: 35862 - protein, 218 aa, Arabidopsis thaliana
  peptide (1)..(218): Ceres Seq. ID no. 12372083
KKGLWRNTLARCDKMASSVTLLLWSLLLLGTLSAIQAKKSKENLKEITHKVYFDVEIDGKAAGRIVMGLFGKTVPKTVENFRALCTGEKGIGKNGKALHYKGSSFHRIIPSFMLQGGDFTHGNGMGGESIYGEKFADENFKLKHTGPGFLSMANAGQDTNGSQFFITTVTTSWLDGRHVVFGKVVTGMDVVYKVEAEGNQSGTPKSKVVIVDSGELPL

SEQ ID NO: 35863 - protein, 204 aa, Arabidopsis thaliana
  peptide (1)..(204): Ceres Seq. ID no. 12372084
MASSVTLLLWSLLLLGTLSAIQAKKSKENLKEITHKVYFDVEIDGKAAGRIVMGLFGKTVPKTVENFRALCTGEKGIGKNGKALHYKGSSFHRIIPSFMLQGGDFTHGNGMGGESIYGEKFADENFKLKHTGPGFLSMANAGQDTNGSQFFITTVTTSWLDGRHVVFGKVVTGMDVVYKVEAEGNQSGTPKSKVVIVDSGELPL

SEQ ID NO: 35864 - protein, 152 aa, Arabidopsis thaliana
  peptide (1)..(152): Ceres Seq. ID no. 12372085
MGLFGKTVPKTVENFRALCTGEKGIGKNGKALHYKGSSFHRIIPSFMLQGGDFTHGNGMGGESIYGEKFADENFKLKHTGPGFLSMANAGQDTNGSQFFITTVTTSWLDGRHVVFGKVVTGMDVVYKVEAEGNQSGTPKSKVVIVDSGELPL

SEQ ID NO: 35865 - DNA, 1354 bp, Arabidopsis thaliana
  misc_feature (1)..(1354): Ceres Seq. ID no. 13487647
  misc_feature (1)..(1354): Ortholog of  Ceres SEQ ID NO 14311509 as cited in SEQ ID NO 51398
  misc_feature (1)..(1354): Ortholog of  Ceres SEQ ID NO 14307702 as cited in SEQ ID NO 54703
  misc_feature (1)..(1354): Ortholog of  Ceres SEQ ID NO 15176361 as cited in SEQ ID NO 55438
gttttatcttttgatagttctgattgtaattagattttggtaggtcacttgtatagagagatcagtaaaataagaaggatgagttggtgtgatggttcagatgataactacgatcttaatcttgaaagagtatcgaacactgatcatccatcggttcaactcaaagaccaatctcaatcatgtgtaacgagccgtccagattccaagattagcgctgaaactcctatcacgagttgtccttcttgcggacacaagctccatcatcaccaagacgaccaggttggtagcatcaaagatttaccaagcttaccggcaggagtcaaattcgatccgtcggataaagagatccttatgcatttggaggcgaaggtatcatccgataagcgaaaacttcatccgttgattgatgaatttatacctacgcttgaaggagagaatggaatttgttatacgcatcctgagaaacttcctggagtaagcaaggacgggcaagtacggcacttcttccaccggccatcaaaggcttatacgaccggaacacgaaaacgaagaaaagtgagcacagatgaggaaggccatgaaacaaggtggcacaaaacaggcaagactcgacctgttttgtctcaatcaggagaaaccggtttcaagaagatcctagtgctctacaccaactatggtcgccagaagaagcctgagaagacgaattgggtgatgcatcagtatcatttaggtagcagcgaggacgaaaaagacggtgaaccagtcctctctaaagtcttctaccaaacacagcctaggcaatgcggttcgatggaacctaaaccgaaaaatctcgtaaacctaaaccggtttagttatgaaaatattcaggccggtttcgggtatgagcatggtggtaaaagtgaagagacgacgcaggtgattcgagagttggtagttcgtgaaggcgatgggtcatgttcgtttcttagttttacttgtgatgcaagtaagggtaaagaaagcttcatgaagaatcaatagaacataacatatataatatatataaatggaggtgctttgttggagtaaagatgaggaaaagaatgagagagcacatattctttgtgtgtaggtgttgggtaactatcatagtaatctacctcaaagcttttgggagattttaggttttaaccttttttattattaaattgggggcgtaactttaacctcgagacatgactgatatttgtttatatttctattcttctagataaaatatgtcaaaacaatactgtaatagctcgtctttcaattattgtaacaaatatttcaagtaataatgaaattaaaaatggataaaataggactttgg

SEQ ID NO: 35866 - protein, 314 aa, Arabidopsis thaliana
  peptide (1)..(314): Ceres Seq. ID no. 13487648
MSWCDGSDDNYDLNLERVSNTDHPSVQLKDQSQSCVTSRPDSKISAETPITSCPSCGHKLHHHQDDQVGSIKDLPSLPAGVKFDPSDKEILMHLEAKVSSDKRKLHPLIDEFIPTLEGENGICYTHPEKLPGVSKDGQVRHFFHRPSKAYTTGTRKRRKVSTDEEGHETRWHKTGKTRPVLSQSGETGFKKILVLYTNYGRQKKPEKTNWVMHQYHLGSSEDEKDGEPVLSKVFYQTQPRQCGSMEPKPKNLVNLNRFSYENIQAGFGYEHGGKSEETTQVIRELVVREGDGSCSFLSFTCDASKGKESFMKNQ

SEQ ID NO: 35867 - protein, 223 aa, Arabidopsis thaliana
  peptide (1)..(223): Ceres Seq. ID no. 13487649
MHLEAKVSSDKRKLHPLIDEFIPTLEGENGICYTHPEKLPGVSKDGQVRHFFHRPSKAYTTGTRKRRKVSTDEEGHETRWHKTGKTRPVLSQSGETGFKKILVLYTNYGRQKKPEKTNWVMHQYHLGSSEDEKDGEPVLSKVFYQTQPRQCGSMEPKPKNLVNLNRFSYENIQAGFGYEHGGKSEETTQVIRELVVREGDGSCSFLSFTCDASKGKESFMKNQ

SEQ ID NO: 35868 - DNA, 1086 bp, Arabidopsis thaliana
  misc_feature (1)..(1086): Ceres Seq. ID no. 12580498
  misc_feature (1)..(1086): Ortholog of  Ceres SEQ ID NO 15226198 as cited in SEQ ID NO 62150
agaattagatatttccgacacgaggcaaattcctagtggctcatggcgtcatcatctgatcacacggcgaagataatcgacggcaaggcgattgctcataccatcagatcagagatcgccgaggaagttcgcggtctatctgagaaacacggcaaggtcccaggactagctgtagttattgttgggagccgaaaggattcacagacctatgtgaatacgaagaggaaagcgtgcgctgaggttgggattaagtcatttgacgtgggcctaccagaggaagtttctgaagctgatcttattagcaaagttcatgaactaaattcaaatccggatgtccatggcatattagttcaactcccattgccgaaacatattaatgaggagaatatattgggtgcaatcagcattgataaagatgtcgatggcttccatcctttgaatattggtaagctagccatgaaaggcagagaacccctcttccttccttgcaccccaaagggatgtttggaactcctagctagaagcggcgtaaagataaaggggcaacgagcagttgttgtaggtcggagtaacattgttggtttgcccgtttcacttcttttgctcaaggctgatgctactgtcacaactgtacattctcacaccaaggatcctgaggctatcatacgggaagctgacattgttattgctgcatgcggacaagcccacatgattaagggcaactggataaagccaggggctgcagtaattgatgttggaactaatgcagtcagcgacccgagcaagaaatcaggataccggttggttggagatgttgatttcgcagaagcttcaaaagttgcaggtttcataactccggtccctggtggtgtaggcccaatgacagtggcaatgcttctcaggaacaccgtagacggtgccaagcgtgtctttggcgagtaaaacaatctactgtatgtaataaagaaaccaagagtttctccattctgtaattgtgtacttggcttgacgatatttttccactcaaataaattgaaattggcgttccctttggattaaaaaaaaaaaaaaaaaaaaaaaacaaaa

SEQ ID NO: 35869 - protein, 299 aa, Arabidopsis thaliana
  peptide (1)..(299): Ceres Seq. ID no. 12580499
MASSSDHTAKIIDGKAIAHTIRSEIAEEVRGLSEKHGKVPGLAVVIVGSRKDSQTYVNTKRKACAEVGIKSFDVGLPEEVSEADLISKVHELNSNPDVHGILVQLPLPKHINEENILGAISIDKDVDGFHPLNIGKLAMKGREPLFLPCTPKGCLELLARSGVKIKGQRAVVVGRSNIVGLPVSLLLLKADATVTTVHSHTKDPEAIIREADIVIAACGQAHMIKGNWIKPGAAVIDVGTNAVSDPSKKSGYRLVGDVDFAEASKVAGFITPVPGGVGPMTVAMLLRNTVDGAKRVFGE

SEQ ID NO: 35870 - protein, 161 aa, Arabidopsis thaliana
  peptide (1)..(161): Ceres Seq. ID no. 12580500
MKGREPLFLPCTPKGCLELLARSGVKIKGQRAVVVGRSNIVGLPVSLLLLKADATVTTVHSHTKDPEAIIREADIVIAACGQAHMIKGNWIKPGAAVIDVGTNAVSDPSKKSGYRLVGDVDFAEASKVAGFITPVPGGVGPMTVAMLLRNTVDGAKRVFGE

SEQ ID NO: 35871 - DNA, 948 bp, Arabidopsis thaliana
  misc_feature (1)..(948): Ceres Seq. ID no. 13488006
  misc_feature (1)..(948): Ortholog of  Ceres SEQ ID NO 12635836 as cited in SEQ ID NO 0
  misc_feature (1)..(948): Ortholog of  Ceres SEQ ID NO 13599004 as cited in SEQ ID NO 0
atagccagatagagagatcctggagaaagcttaaacctaacaatttctctcagagtgttatcatcaaaagattcttggtctccgatccagtcacctgaagattctccgagcttcttttgaccacacactttcaatggcggatgctgtgaacgctcaaactccatcgctctccgagcaatatcatttggagaaagaagtgaagcaagacacaagtgcaaagcctgttgaagtgaaagaggtggcaccagaagttactacacaagctgaagaggttaagacggagcaagctaaggaagaatctcctgttgaggaagcggtttctgtagttgaagagaagtctgaatctgctcctgaatcaacggaagtggcttctgaggctcctgctgcagcggaagacaatgctgaagagactcctgctgctgctgaagaaaataatgacgaaaacgctagtgaagaagttgctgaagaaacccctgatgagatcaagcttgagacagctcctgctgatttccgtttccctacaacaaaccaaacaaggcattgtttcactcgctacgttgaatatcacagatgtgtagctgctaagggtgatgatgctccagaatgcgataagtttgcaaagttttatcgatctctttgccccagcgaatgggttgataggtggaacgagcaaagagaaaatggaacattccctggtcctctaccctgaagaaaaatcatattgccatcattcctcttttgctgttaccttcatgagattacactgcagagtttaataagattttacaaaaccagcacttctggttcccatcatcataaaatgtgagaatttaacaaaactttatgaatctcaaatttttctcttatataagtttttgaggatcatctgatttttctgaattgttgttcttcctgattatgctttactatggcaagcttcaaattctt

SEQ ID NO: 35872 - protein, 191 aa, Arabidopsis thaliana; identical to SEQ ID NO: 23771
  peptide (1)..(191): Ceres Seq. ID no. 13488007

SEQ ID NO: 35873 - DNA, 751 bp, Arabidopsis thaliana
  misc_feature (1)..(751): Ceres Seq. ID no. 12340049
  misc_feature (1)..(751): Ortholog of  Ceres SEQ ID NO 13595021 as cited in SEQ ID NO 55815
atttgctcattagagaacagagaaaaaaaaaacaatggcaactcaagccgccgggatcttcaactccgccataacaaccgccgcaacctccggcgtcaagaaactccactttttctcaacaacccaccgtcccaaatccctctccttcaccaaaaccgcaatccgctccgagaaaacagattcctccgccgccgctgctgcagcccccgccacgaaagaagctcccgtgggattcacgccaccgcagctagacccaaacacaccgtctccgatcttcgctggaagcaccggtggtcttctacgtaaagcgcaagtggaagagttctacgttatcacgtggaactcaccgaaagaacagatctttgagatgccgacagggaggagcagcgatcatgagagaaggtccgaatcttctgaagctagcgaggaaagagcagtgtttagctttggggacaaggcttagatccaagtacaagatcacttaccagttttacagagtgtttcctaacggtgaggttcaatatcttcatcctaaagatggtgtttatccagagaaggcgaatccaggaagagaaggtgttggtctcaacatgagatctattgggaaaaatgttagtcccattgaagttaagtttactggcaaacaaagttatgatttgtaagatctgtaaactaaaaaaaccaaaaactatgttcatgtggtgatgattatgactatgtttcatgttaatttttaatggattttgttttg

SEQ ID NO: 35874 - protein, 142 aa, Arabidopsis thaliana
  peptide (1)..(142): Ceres Seq. ID no. 12340050
MATQAAGIFNSAITTAATSGVKKLHFFSTTHRPKSLSFTKTAIRSEKTDSSAAAAAAPATKEAPVGFTPPQLDPNTPSPIFAGSTGGLLRKAQVEEFYVITWNSPKEQIFEMPTGRSSDHERRSESSEASEERAVFSFGDKA

SEQ ID NO: 35875 - protein, 101 aa, Arabidopsis thaliana
  peptide (1)..(101): Ceres Seq. ID no. 12340051
ICSLENREKKNNGNSSRRDLQLRHNNRRNLRRQETPLFLNNPPSQIPLLHQNRNPLRENRFLRRRCCSPRHERSSRGIHATAARPKHTVSDLRWKHRWSST

SEQ ID NO: 35876 - protein, 89 aa, Arabidopsis thaliana
  peptide (1)..(89): Ceres Seq. ID no. 12340052
MREGPNLLKLARKEQCLALGTRLRSKYKITYQFYRVFPNGEVQYLHPKDGVYPEKANPGREGVGLNMRSIGKNVSPIEVKFTGKQSYDL

SEQ ID NO: 35877 - DNA, 885 bp, Arabidopsis thaliana
  misc_feature (1)..(885): Ceres Seq. ID no. 13492248
  misc_feature (1)..(885): Ortholog of  Ceres SEQ ID NO 12557831 as cited in SEQ ID NO 58
  misc_feature (1)..(885): Ortholog of  Ceres SEQ ID NO 13638808 as cited in SEQ ID NO 51951
  misc_feature (1)..(885): Ortholog of  Ceres SEQ ID NO 12637454 as cited in SEQ ID NO 0
aaaaaaaaaataatatcgagacgagacgggtttgtttcttctctctatctctatatctaccaaaatcctttgccccccgaatctagttctctcgatcgaccctgtgacgatggctaataaccaagcaagccttcttctgcagaaacagcttaaagatctgtgtaagaaacctgttgatggtttctctgctggcctcgttgatgagaagaacgttttccaatggagcgtctctattatgggtcctcctgatactttgtatgaaggtggcttttttaatgcaattatgtcgtttccggagaattatccagtttcaccaccaactgtgacgtttacctcggagatgtggcatcctaatgtttattctgatggaaaagtttgcatttctattcttcatcctcctggtgatgatcctcatggatacgagcttgcctctgaacgttggacccctgtccatacggtagaaagcattgtgttgagtatcatatcgatgctctcaggtcccaacgatgagtcaccagcgaatgtggaagctgcaaaggaatggagagacaacagagcagagtttaggaagaaagtgagtcgctgtgtgagaagatcgcaagagatgctatgaacatctctccagcgtttttttcgtgttgtagaaatatcgattctaatcttatgagaaagcctaagcagaaccaaccatcttcaagcagcagccagatgaatctgactttgcaaaagcttctctttctttttcctttttgggttttgttctctaaggtttggtttggaatattggtgtggaatcaaatccgctccatattttaggattatattattgcactcgttaatggattcgtttgatctggctttttaactttattctggttttgggtt

SEQ ID NO: 35878 - protein, 167 aa, Arabidopsis thaliana
  peptide (1)..(167): Ceres Seq. ID no. 13492249
MANNQASLLLQKQLKDLCKKPVDGFSAGLVDEKNVFQWSVSIMGPPDTLYEGGFFNAIMSFPENYPVSPPTVTFTSEMWHPNVYSDGKVCISILHPPGDDPHGYELASERWTPVHTVESIVLSIISMLSGPNDESPANVEAAKEWRDNRAEFRKKVSRCVRRSQEML

SEQ ID NO: 35879 - protein, 125 aa, Arabidopsis thaliana
  peptide (1)..(125): Ceres Seq. ID no. 13492250
MGPPDTLYEGGFFNAIMSFPENYPVSPPTVTFTSEMWHPNVYSDGKVCISILHPPGDDPHGYELASERWTPVHTVESIVLSIISMLSGPNDESPANVEAAKEWRDNRAEFRKKVSRCVRRSQEML

SEQ ID NO: 35880 - protein, 109 aa, Arabidopsis thaliana
  peptide (1)..(109): Ceres Seq. ID no. 13492251
MSFPENYPVSPPTVTFTSEMWHPNVYSDGKVCISILHPPGDDPHGYELASERWTPVHTVESIVLSIISMLSGPNDESPANVEAAKEWRDNRAEFRKKVSRCVRRSQEML

SEQ ID NO: 35881 - DNA, 1348 bp, Arabidopsis thaliana
  misc_feature (1)..(1348): Ceres Seq. ID no. 12579524
  misc_feature (1)..(1348): Ortholog of  Ceres SEQ ID NO 14310390 as cited in SEQ ID NO 59715
  misc_feature (1)..(1348): Ortholog of  Ceres SEQ ID NO 13597809 as cited in SEQ ID NO 64598
  misc_feature (1)..(1348): Ortholog of  Ceres SEQ ID NO 12617960 as cited in SEQ ID NO 69051
  misc_feature (1)..(1348): Ortholog of  Ceres SEQ ID NO 13589401 as cited in SEQ ID NO 0
acggagattgtaacaaggaaaccgccgtcgccggatctgatagtgcatatccatgaagtagaagacgaagaaacttactttctgatcttagaacggagtatatgtacagaagattcgcgtccctcaatttttgatctcaagggtcgggtttacctttttttccttcttatttttggtggctttgcgttttctcattcgacgatttctggatttggggatttcaaaaccatgaggaagaagctcgatactcggttcccagctgctcgtattaaaaagattatgcaagctgatgaggatgttggcaagatagctttggcagtgcctgtcttagtctcaaaatctttggagttgttcttgcaagacctttgtgatcgtacatatgaaattacccttgaaagaggtgccaagactgtgagctcattgcacctaaaacattgtgtggaaagatataacgtgtttgattttctgagggaagttgtgagtaaggtgcctgactatggccattcccaagggcaatttcatatgtacgatcacaaaggtcttggaagaacaagaagatgtctggtggtgtacttggtggtgctacagctgcttgggttgtgtttgaattgatggagtaccatcttctcactctgctttgccacgtgatgattgttgttctcgctgtgctgtttttgtggtctaatgccactatgttcattaacaagtccccaccaaagattcctgaagttcatatccctgaagaacctattcttcagcttgcgtctgggctcagaatcgagatcaaccgtggattctcttctctccgtgaaattgcatcaggaagggatctcaagaaattcctcattgctattgccgggttatgggttctctcaatcttgggcggttgcttcgacttcttgacattggcatacatagctcttgtgttgctcttcacggttcctcttgcctacgacaagtatgaagacaaagtcgacccattaggtgagaaagcaatgatcgagctcaagaagcagtatgcagtgttggatgagaaggtgttgagcaagatcccacttgggccgttgaagaacaagaagaaagattaggggtttacacaaggttgtccgtggctagcaaaacgggtgttgtgaaatggtatcgaagtaatgtgttttgggcgtttttttaggtggctctttcggttatgtgaatgaacttggaattttcctgactggtttgttctgttgtttatgtcattgttgatcagcgtcgagggataaaagtagtgatatttcttctctctctaagcctctatataactaagaatttcaagatatttgaattttgcaatctcgtggttaatgtt

SEQ ID NO: 35882 - protein, 203 aa, Arabidopsis thaliana
  peptide (1)..(203): Ceres Seq. ID no. 12579525
TEIVTRKPPSPDLIVHIHEVEDEETYFLILERSICTEDSRPSIFDLKGRVYLFFLLIFGGFAFSHSTISGFGDFKTMRKKLDTRFPAARIKKIMQADEDVGKIALAVPVLVSKSLELFLQDLCDRTYEITLERGAKTVSSLHLKHCVERYNVFDFLREVVSKVPDYGHSQGQFHMYDHKGLGRTRRCLVVYLVVLQLLGLCLN

SEQ ID NO: 35883 - protein, 176 aa, Arabidopsis thaliana
  peptide (1)..(176): Ceres Seq. ID no. 12579526
MSGGVLGGATAAWVVFELMEYHLLTLLCHVMIVVLAVLFLWSNATMFINKSPPKIPEVHIPEEPILQLASGLRIEINRGFSSLREIASGRDLKKFLIAIAGLWVLSILGGCFDFLTLAYIALVLLFTVPLAYDKYEDKVDPLGEKAMIELKKQYAVLDEKVLSKIPLGPLKNKKKD

SEQ ID NO: 35884 - protein, 158 aa, Arabidopsis thaliana
  peptide (1)..(158): Ceres Seq. ID no. 12579527
MEYHLLTLLCHVMIVVLAVLFLWSNATMFINKSPPKIPEVHIPEEPILQLASGLRIEINRGFSSLREIASGRDLKKFLIAIAGLWVLSILGGCFDFLTLAYIALVLLFTVPLAYDKYEDKVDPLGEKAMIELKKQYAVLDEKVLSKIPLGPLKNKKKD

SEQ ID NO: 35885 - DNA, 939 bp, Arabidopsis thaliana
  misc_feature (1)..(939): Ceres Seq. ID no. 12393372
  misc_feature (1)..(939): Ortholog of  Ceres SEQ ID NO 13661969 as cited in SEQ ID NO 61215
  misc_feature (1)..(939): Ortholog of  Ceres SEQ ID NO 12614809 as cited in SEQ ID NO 68808
  misc_feature (1)..(939): Ortholog of  Ceres SEQ ID NO 12634366 as cited in SEQ ID NO 0
  misc_feature (1)..(939): Ortholog of  Ceres SEQ ID NO 14309113 as cited in SEQ ID NO 0
  misc_feature (1)..(939): Ortholog of  Ceres SEQ ID NO 15175257 as cited in SEQ ID NO 0
ataaaaaataagtaaccaagaaaataagtaacggcttcttcgatcatttatatgtttatcctaaacttataagaaagcttaataatttcagtgttctcactcatttccaatctgtgatatatttctcatgtctcatcagacagtagcgctagcctctaaggctaagtctcctaaacccaaaagaggaaagttagataaggataaaatgactgcattggagaaacatgtttccttcttcgacaggaacaaagacggcaccgtttatccatgggaaacctaccaaggatttagagcgctcgggacagggcgtcttttggcggcttttgttgctatattcatcaacatgggactcagcaagaaaactcgtccgggaaagggattctcgccgttgtttccaatagacgtgaagaatagtcacctttgcatgcacggtagtgacaccgacgtctatgacgatgacggaagatttgtggaatcaaaattcgaggagatattcaacaagcatgctcgcacacataaagatgctctcactgcagaggaaattcaaaaaatgcttaagactaacagggatcctttcgatatcacaggatggctttcagattatggagaatggaaaatattacatacgttagctcaagacaaaaatggtttgttatcggaaaagagcgtcagggccatctacgatggtagccttttccaccaactggagaaaaaaagatcatcttcttcctctcgtggcaagaaacaaaaactaccttaaatgtttacgtgaatcttcttatattgttatgtggagatcacataactttcgtggtttataattatataattttgtcaaataacttttgtaatgaataattacatagatcaaacactctttaaataattattgtgtatattgaaaaaaaaaaacttatcaaagtatacttcatttaagtc

SEQ ID NO: 35886 - protein, 210 aa, Arabidopsis thaliana
  peptide (1)..(210): Ceres Seq. ID no. 12393373
MSHQTVALASKAKSPKPKRGKLDKDKMTALEKHVSFFDRNKDGTVYPWETYQGFRALGTGRLLAAFVAIFINMGLSKKTRPGKGFSPLFPIDVKNSHLCMHGSDTDVYDDDGRFVESKFEEIFNKHARTHKDALTAEEIQKMLKTNRDPFDITGWLSDYGEWKILHTLAQDKNGLLSEKSVRAIYDGSLFHQLEKKRSSSSSRGKKQKLP

SEQ ID NO: 35887 - protein, 184 aa, Arabidopsis thaliana; identical to SEQ ID NO: 30098
  peptide (1)..(184): Ceres Seq. ID no. 12393374

SEQ ID NO: 35888 - protein, 138 aa, Arabidopsis thaliana; identical to SEQ ID NO: 30099
  peptide (1)..(138): Ceres Seq. ID no. 12393375

SEQ ID NO: 35889 - DNA, 562 bp, Arabidopsis thaliana
  misc_feature (1)..(562): Ceres Seq. ID no. 12420983
  misc_feature (1)..(562): Ortholog of  Ceres SEQ ID NO 15169443 as cited in SEQ ID NO 58785
atttcattttcgttttcactttctccgaacatccaaaagcttgtagcttgctcctcaaatcttcttgaaaaatgaaggttgccgctgctttcctcctcgccgttttgggcggaaacgctaatccttcagccgagaatatcaaagatatcatcggagctgttggtgctgatgttgatggagagagcattgagcttctattgaaagaagtgagtggtaaggacattgctgagctgattgcttctggtagggagaaattagcgtctgtgccatctggtggtggtgtggctgtttcagctgctccatcaagcggtggtggtggtgctgctgctgctgcccctncggagaagaaagaagccaagaaggaagagaaagaagagtctgatgatgacatgggattcagtctcttcgagtaaggtttttgtccccacggaaaggagtcgagatttgattttttgttctcttagtggttctggtttttgctcctctttgtagttcggtgttattaaagattcttggattacgaattttactcgttagataatgaagcaagaagagttttttc

SEQ ID NO: 35890 - protein, 113 aa, Arabidopsis thaliana
  peptide (1)..(113): Ceres Seq. ID no. 12420984
  misc_feature (90)..(90): Xaa is any aa, unknown or other
MKVAAAFLLAVLGGNANPSAENIKDIIGAVGADVDGESIELLLKEVSGKDIAELIASGREKLASVPSGGGVAVSAAPSSGGGGAAAAAPXEKKEAKKEEKEESDDDMGFSLFE

SEQ ID NO: 35891 - DNA, 895 bp, Arabidopsis thaliana
  misc_feature (1)..(895): Ceres Seq. ID no. 12324013
  misc_feature (1)..(895): Ortholog of  Ceres SEQ ID NO 13638917 as cited in SEQ ID NO 56018
  misc_feature (1)..(895): Ortholog of  Ceres SEQ ID NO 13663116 as cited in SEQ ID NO 60731
  misc_feature (1)..(895): Ortholog of  Ceres SEQ ID NO 14316029 as cited in SEQ ID NO 67234
  misc_feature (1)..(895): Ortholog of  Ceres SEQ ID NO 15175556 as cited in SEQ ID NO 0
gagatagagagaaagagaagcagttcggagaaacaatggcggtagaagacactcccaaatctgttgtaacggaagaagctaagcctaattcaatagagaatccgattgatcgataccatgaggaaggtgatgatgccgaagaaggagagatcgccggaggagaaggagacggaaacgttgacgaatcgagcaaatccggtgttcctgaatcgcatcctctggaacattcatggactttctggttcgataatcctgctgtgaaatcgaaacaaacctcttggggaagttccttgcgacccgtgtttacgttttcaactgttgaggaattttggagtttgtacaacaacatgaagcatccgagcaagttagctcacggagctgacttctactgtttcaaacacatcattgaacctaagtgggaggatcctatttgtgctaatggaggaaaatggactatgactttccctaaggagaagtctgataagagctggctctacactttgcttgcattgattggagagcagtttgatcatggagatgaaatatgtggagcagttgtcaacattagaggaaagcaagaaaggatatctatttggactaaaaatgcttcaaacgaagctgctcaggtgagcattggaaaacaatggaaggagtttctcgattacaacaacagcataggtttcatcatccatgaggatgcgaagaagctcgacaggaatgcaaagaacgcttacaccgcttgaaacctctcaaatctttgcattgtttcaattacagttttgtatgtgagagatctctatttatctaaacatgacttgacagtctgtctttgctagtgttgattgttcacgaagctctaacatttcatttagtaatatattagtatggttcttca

SEQ ID NO: 35892 - protein, 246 aa, Arabidopsis thaliana
  peptide (1)..(246): Ceres Seq. ID no. 12324014
DREKEKQFGETMAVEDTPKSVVTEEAKPNSIENPIDRYHEEGDDAEEGEIAGGEGDGNVDESSKSGVPESHPLEHSWTFWFDNPAVKSKQTSWGSSLRPVFTFSTVEEFWSLYNNMKHPSKLAHGADFYCFKHIIEPKWEDPICANGGKWTMTFPKEKSDKSWLYTLLALIGEQFDHGDEICGAVVNIRGKQERISIWTKNASNEAAQVSIGKQWKEFLDYNNSIGFIIHEDAKKLDRNAKNAYTA

SEQ ID NO: 35893 - protein, 235 aa, Arabidopsis thaliana
  peptide (1)..(235): Ceres Seq. ID no. 12324015
MAVEDTPKSVVTEEAKPNSIENPIDRYHEEGDDAEEGEIAGGEGDGNVDESSKSGVPESHPLEHSWTFWFDNPAVKSKQTSWGSSLRPVFTFSTVEEFWSLYNNMKHPSKLAHGADFYCFKHIIEPKWEDPICANGGKWTMTFPKEKSDKSWLYTLLALIGEQFDHGDEICGAVVNIRGKQERISIWTKNASNEAAQVSIGKQWKEFLDYNNSIGFIIHEDAKKLDRNAKNAYTA

SEQ ID NO: 35894 - protein, 131 aa, Arabidopsis thaliana
  peptide (1)..(131): Ceres Seq. ID no. 12324016
MKHPSKLAHGADFYCFKHIIEPKWEDPICANGGKWTMTFPKEKSDKSWLYTLLALIGEQFDHGDEICGAVVNIRGKQERISIWTKNASNEAAQVSIGKQWKEFLDYNNSIGFIIHEDAKKLDRNAKNAYTA

SEQ ID NO: 35895 - DNA, 1325 bp, Arabidopsis thaliana
  misc_feature (1)..(1325): Ceres Seq. ID no. 12562714
  misc_feature (1)..(1325): Ortholog of  Ceres SEQ ID NO 13638849 as cited in SEQ ID NO 52046
  misc_feature (1)..(1325): Ortholog of  Ceres SEQ ID NO 13599613 as cited in SEQ ID NO 0
acgaaaggaaaatatgagtgaggagaagaggaagcaacacttcgtgctagtacatggtgcgtgccacggcgcatggtgctggtacaaggttaagcctcttctcgaggctttgggccatcgtgtaaccgccttagacctagctgcttccggtatagacacaaccaggtcaatcactgacatttctacatgtgaacaatattctgagccattgatgcagctaatgacttcattgccgaatgatgagaaggttgtactcgttggtcatagctttggaggtttgagtttagccttagccatggataagtttcccgataaaatctctgtctctgtcttcgtgactgcattcatgcccgacaccaaacactcaccatcgttcgtcgaggaaaaggtatatatctctttttaaagcagccaaattttgtgttctgttcttaaatccaccacctggaagtctagacggtcaaaacaacgtggtcgtccatttttagccaaaaccgttacaagattgtagccaaaattattacaaaaattgatcaacataacggttccttttggtctatatgtccgattgttcagtctagtcggacaaaatcgagatttccatttcgcagtcttttataacttgtggcttatatactataaccaattaaccatagatcatgtgttagacaatctaatgtccaagtagtgtcactttcgtggtgatgagttagtaatttgttttaacatgtttcattttcatggttgttacttcgttagaatttttaaaggtagttaattgtaataaacgtgaaaataaatatgattttttcgtaattactatgaaaaagtttgcaagcagcatgacaccagaaggatggatgggctctgagctcgagacatatggttcagataattccggcttgtctgtgttcttcagcaccgacttcatgaagcaccgtctctaccaactttctcctgtggaggatcttgagcttggattgcttctaaagaggcctagttcattgtttattaatgaattatcgaagatggagaacttttcttagaaagggtatggatctgttcctcgagcttacattgtgtgcaaagaggacaacattatctcggaagaccatcaacgatggatgatccataattatccggcgaatttagtgattgagatggaagagacggatcatatgccaatgttttgcaaacctcaagtactaagtgaccatctattggcaatcgctgacaatttctcttaaataatattttgatgaaaatgtatttggagtggatacaataaaaatgtgttctaaattaatggatctttatgaaggtcc

SEQ ID NO: 35896 - protein, 134 aa, Arabidopsis thaliana
  peptide (1)..(134): Ceres Seq. ID no. 12562715
RKENMSEEKRKQHFVLVHGACHGAWCWYKVKPLLEALGHRVTALDLAASGIDTTRSITDISTCEQYSEPLMQLMTSLPNDEKVVLVGHSFGGLSLALAMDKFPDKISVSVFVTAFMPDTKHSPSFVEEKVYISF

SEQ ID NO: 35897 - protein, 130 aa, Arabidopsis thaliana
  peptide (1)..(130): Ceres Seq. ID no. 12562716
MSEEKRKQHFVLVHGACHGAWCWYKVKPLLEALGHRVTALDLAASGIDTTRSITDISTCEQYSEPLMQLMTSLPNDEKVVLVGHSFGGLSLALAMDKFPDKISVSVFVTAFMPDTKHSPSFVEEKVYISF

SEQ ID NO: 35898 - protein, 101 aa, Arabidopsis thaliana
  peptide (1)..(101): Ceres Seq. ID no. 12562717
MVVTSLEFLKVVNCNKRENKYDFFVITMKKFASSMTPEGWMGSELETYGSDNSGLSVFFSTDFMKHRLYQLSPVEDLELGLLLKRPSSLFINELSKMENFS

SEQ ID NO: 35899 - DNA, 739 bp, Arabidopsis thaliana
  misc_feature (1)..(739): Ceres Seq. ID no. 12394077
  misc_feature (1)..(739): Ortholog of  Ceres SEQ ID NO 14306309 as cited in SEQ ID NO 1394
  misc_feature (1)..(739): Ortholog of  Ceres SEQ ID NO 13595377 as cited in SEQ ID NO 56088
  misc_feature (1)..(739): Ortholog of  Ceres SEQ ID NO 13598648 as cited in SEQ ID NO 64497
  misc_feature (1)..(739): Ortholog of  Ceres SEQ ID NO 13660598 as cited in SEQ ID NO 67591
acactactctaaccgttttttttcttctctcaaatctcaaatctcaaaatctcaatttcttcaacaatgtcatcgaagaacggagttgttcgtagctgtttaggatcaatggacgacatcaaaaaagtcttccaacgattcgacaaaaacggcgacgggaaaatctccgtcgacgagctcaaagaagtgatccgcgctctctcaccaacagcatcaccagaagaaacagtaacgatgatgaaacaattcgatctagacggtaacggattcatagatctggacgaattcgtcgcgcttttccaaatcggaatcggaggaggaggtaataatcgaaacgacgtaagcgatttgaaagaagcgtttgagttatatgatttggatggtaatggaaggatctcggcgaaagagcttcattcagtgatgaagaatttgggtgagaagtgctctgttcaagattgtaagaagatgattagtaaagttgatattgatggtgatggttgcgttaattttgatgagtttaagaagatgatgagcaatggtggtggtgcatgaggatttggaagatttcgccggagattagattagtcgacggtgatgattcgtattagcagattaattttagtgacggcgattaaaaaccctagaagtatgtggtgattgatgaatattgattttaactatataaggttgtttctatatcttctgctctttttataattaatatgctttgttgagtgtt

SEQ ID NO: 35900 - protein, 161 aa, Arabidopsis thaliana
  peptide (1)..(161): Ceres Seq. ID no. 12394078
MSSKNGVVRSCLGSMDDIKKVFQRFDKNGDGKISVDELKEVIRALSPTASPEETVTMMKQFDLDGNGFIDLDEFVALFQIGIGGGGNNRNDVSDLKEAFELYDLDGNGRISAKELHSVMKNLGEKCSVQDCKKMISKVDIDGDGCVNFDEFKKMMSNGGGA

SEQ ID NO: 35901 - protein, 147 aa, Arabidopsis thaliana
  peptide (1)..(147): Ceres Seq. ID no. 12394079
MDDIKKVFQRFDKNGDGKISVDELKEVIRALSPTASPEETVTMMKQFDLDGNGFIDLDEFVALFQIGIGGGGNNRNDVSDLKEAFELYDLDGNGRISAKELHSVMKNLGEKCSVQDCKKMISKVDIDGDGCVNFDEFKKMMSNGGGA

SEQ ID NO: 35902 - protein, 105 aa, Arabidopsis thaliana
  peptide (1)..(105): Ceres Seq. ID no. 12394080
MMKQFDLDGNGFIDLDEFVALFQIGIGGGGNNRNDVSDLKEAFELYDLDGNGRISAKELHSVMKNLGEKCSVQDCKKMISKVDIDGDGCVNFDEFKKMMSNGGGA

SEQ ID NO: 35903 - DNA, 1434 bp, Arabidopsis thaliana
  misc_feature (1)..(1434): Ceres Seq. ID no. 12421633
  misc_feature (1)..(1434): Ortholog of  Ceres SEQ ID NO 15177935 as cited in SEQ ID NO 60258
  misc_feature (1)..(1434): Ortholog of  Ceres SEQ ID NO 13659033 as cited in SEQ ID NO 66372
  misc_feature (1)..(1434): Ortholog of  Ceres SEQ ID NO 12625899 as cited in SEQ ID NO 69079
  misc_feature (1)..(1434): Ortholog of  Ceres SEQ ID NO 15180051 as cited in SEQ ID NO 0
atataaactcgaatccatcacaaagcctattcaagttaagagaaaagaaaaaaaaaaaccgttcttggaagatgggtttcaaactcaactctcttttccttcttctttcgcttctcatactcacaatcttgtccggagccgaccaagccttggcttacgtcaagaaaccacatgtgagccaacgcaacaaaacggcgttagcagccgtcgccggaagaggaggaggaaaagagatgttgaaagggaggaagcagacgagtggttgtaacttgtttcaagggagatgggttttcgatgcttcttaccctttctacgattcatccacgtgccctttcatcgacggtgagttcgactgtctcaaattcggccgaccagacaaacagttccttaagtactcttggcagcctgattcatgcaccgtcccaaggtttgatggggaagcgtttttgaagaaatggagagggaaacgagtgatgttcgtgggtgactcactgagtctaaacatgtgggaatcgttggcatgtatgatacattcgtcggttccaaacactaagaccacttttctcaagcgaaccccactctcctctctcactttccaggaatatgacgtcacactattcctataccgaacaccatacctagtggacatctccaaagaaagtgtcgggcgtgtgcttaaccttggagccattgaagatggagctgatgcttggaaaaatatggacctcctcgtcttcaattcttggcactggtggactcacacaggagtacagtctcaagggtgggattttataagagatgggtcttcactgatgagagacatggaccgccttgatgctttcaacaaaggactcaccacttggggtcaatgggttgatcaaaatgttaatgtttcgcaaacccgagtcttcttccaaggcatttctcccactcactacatgggaagggaatggaacgagccgaggaaaacttgcaacgggcagatgcaaccgttgaccggatcaacatacccaggtggttcacttcctgcagcaagcattgtgtctcgagtattaagcacgatgagaacgcccgtttacttactcgacatcacaactctatctcaactgagaaaagatgctcatccatctacatatggaggcgatggcggaacggattgcagtcactggtgccttcctggcttgccggatacttggaaccagcttctctatgcagctctttcgatgtgaaagcttgactcaatacacacttgcatgtatattacattcttggcagtccaaaggggaaaaaaagaagaagaaacgactgacattttacttggagagaatttgaagattagaaagagtatatgacgataaagttgtaaagtgttttatattctttactcttgggtggttacaaatcataatctaatcgacttcgattgtgattacc

SEQ ID NO: 35904 - protein, 408 aa, Arabidopsis thaliana
  peptide (1)..(408): Ceres Seq. ID no. 12421634
INSNPSQSLFKLREKKKKNRSWKMGFKLNSLFLLLSLLILTILSGADQALAYVKKPHVSQRNKTALAAVAGRGGGKEMLKGRKQTSGCNLFQGRWVFDASYPFYDSSTCPFIDGEFDCLKFGRPDKQFLKYSWQPDSCTVPRFDGEAFLKKWRGKRVMFVGDSLSLNMWESLACMIHSSVPNTKTTFLKRTPLSSLTFQEYDVTLFLYRTPYLVDISKESVGRVLNLGAIEDGADAWKNMDLLVFNSWHWWTHTGVQSQGWDFIRDGSSLMRDMDRLDAFNKGLTTWGQWVDQNVNVSQTRVFFQGISPTHYMGREWNEPRKTCNGQMQPLTGSTYPGGSLPAASIVSRVLSTMRTPVYLLDITTLSQLRKDAHPSTYGGDGGTDCSHWCLPGLPDTWNQLLYAALSM

SEQ ID NO: 35905 - protein, 385 aa, Arabidopsis thaliana
  peptide (1)..(385): Ceres Seq. ID no. 12421635
MGFKLNSLFLLLSLLILTILSGADQALAYVKKPHVSQRNKTALAAVAGRGGGKEMLKGRKQTSGCNLFQGRWVFDASYPFYDSSTCPFIDGEFDCLKFGRPDKQFLKYSWQPDSCTVPRFDGEAFLKKWRGKRVMFVGDSLSLNMWESLACMIHSSVPNTKTTFLKRTPLSSLTFQEYDVTLFLYRTPYLVDISKESVGRVLNLGAIEDGADAWKNMDLLVFNSWHWWTHTGVQSQGWDFIRDGSSLMRDMDRLDAFNKGLTTWGQWVDQNVNVSQTRVFFQGISPTHYMGREWNEPRKTCNGQMQPLTGSTYPGGSLPAASIVSRVLSTMRTPVYLLDITTLSQLRKDAHPSTYGGDGGTDCSHWCLPGLPDTWNQLLYAALSM

SEQ ID NO: 35906 - protein, 331 aa, Arabidopsis thaliana
  peptide (1)..(331): Ceres Seq. ID no. 12421636
MLKGRKQTSGCNLFQGRWVFDASYPFYDSSTCPFIDGEFDCLKFGRPDKQFLKYSWQPDSCTVPRFDGEAFLKKWRGKRVMFVGDSLSLNMWESLACMIHSSVPNTKTTFLKRTPLSSLTFQEYDVTLFLYRTPYLVDISKESVGRVLNLGAIEDGADAWKNMDLLVFNSWHWWTHTGVQSQGWDFIRDGSSLMRDMDRLDAFNKGLTTWGQWVDQNVNVSQTRVFFQGISPTHYMGREWNEPRKTCNGQMQPLTGSTYPGGSLPAASIVSRVLSTMRTPVYLLDITTLSQLRKDAHPSTYGGDGGTDCSHWCLPGLPDTWNQLLYAALSM

SEQ ID NO: 35907 - DNA, 1460 bp, Arabidopsis thaliana
  misc_feature (1)..(1460): Ceres Seq. ID no. 12370574
  misc_feature (1)..(1460): Ortholog of  Ceres SEQ ID NO 13598741 as cited in SEQ ID NO 62749
  misc_feature (1)..(1460): Ortholog of  Ceres SEQ ID NO 12587535 as cited in SEQ ID NO 64020
  misc_feature (1)..(1460): Ortholog of  Ceres SEQ ID NO 15176854 as cited in SEQ ID NO 64525
  misc_feature (1)..(1460): Ortholog of  Ceres SEQ ID NO 12586366 as cited in SEQ ID NO 68983
  misc_feature (1)..(1460): Ortholog of  Ceres SEQ ID NO 15178891 as cited in SEQ ID NO 0
ataatttactaaatatcactttctagtctcttctctttactttggtcgtccacaatgaaaggaggcagcctctcgtttctcttcgttctcctaatcgccaccatcacttccgtcatttgcttcagtgacgggatgttaccaaacggcgactttgaactaggaccaaaaccatcggacatgaaaggaacgcaagtaataaacaagaaggcgattcctagctgggagctttcaggcttcgtcgaatacataaagtccggtcaaaaacaaggagacatgcttctcgtagtcccggccggaaagttcgcaatccggctaggcaacgaggcatcgatcaaacaaagacttaacgttacaaaaggaatgtattactcactgacgttcagtgccgcaaggacatgtgcccaagacgaacggctcaacatatcggtggcacctgactcaggcgttattcctatacagacggtgtacagtagcagtggatgggacctttacgcatgggcgttccaagccgagagtaacgtggcagagatcgtgattcataatcctggtgaggaggaagatcctgcttgtggaccactcattgatggtgtggcaatcaaagctctataccctcctcggcccaccaataagaatatattgaagaacggaggatttgaagaaggtccctacgtactcccaaacgcaacaaccggcgttctggttcctccctttatagaagatgaccactctcctttacccgcgtggatggtcgaatcactcaaagccatcaaatacgttgatgtcgagcatttctcggtcccacaaggccgtcgagccgtggagctagtggcaggcaaagaaagcgcaatcgctcaggtagctaggaccgttgtgggaaaaacttacgtgctttcgtttgcggttggagatgctaacaatgcttgccaaggatcgatggtggtcgaggcatttgcgggaaaagacactctaaaggtaccttatgagtctcgaggcaaaggagggttcaaacgcgcttctctacggtttgtggcggtttcgacccgcacaagagttatgttttacagcacattttactcgatgagaagcgatgatttctcatcactgtgtgggcccgtgatcgatgatgttaagctcctcagtgctcgtaagccgtaagatggccattgttttatttctaaggttcttcgtataagccagtgtggttttttatataaatatgattttcttaatctctaatgcttttgaaatgagatgagtaatactgaaagggtgtttgtggtgtagggttttatataaggcaaaaaggtcttgcttatatatattttcttgtatgagaaggctaaagaaatgttgtctgtttttactaaattgggttctttcaaggagatcgggtgattgtgagaataaaaatgtaatacagatatatatggtagagaggaatgaggataataatttaactg

SEQ ID NO: 35908 - protein, 366 aa, Arabidopsis thaliana
  peptide (1)..(366): Ceres Seq. ID no. 12370575
MKGGSLSFLFVLLIATITSVICFSDGMLPNGDFELGPKPSDMKGTQVINKKAIPSWELSGFVEYIKSGQKQGDMLLVVPAGKFAIRLGNEASIKQRLNVTKGMYYSLTFSAARTCAQDERLNISVAPDSGVIPIQTVYSSSGWDLYAWAFQAESNVAEIVIHNPGEEEDPACGPLIDGVAIKALYPPRPTNKNILKNGGFEEGPYVLPNATTGVLVPPFIEDDHSPLPAWMVESLKAIKYVDVEHFSVPQGRRAVELVAGKESAIAQVARTVVGKTYVLSFAVGDANNACQGSMVVEAFAGKDTLKVPYESRGKGGFKRASLRFVAVSTRTRVMFYSTFYSMRSDDFSSLCGPVIDDVKLLSARKP

SEQ ID NO: 35909 - protein, 340 aa, Arabidopsis thaliana
  peptide (1)..(340): Ceres Seq. ID no. 12370576
MLPNGDFELGPKPSDMKGTQVINKKAIPSWELSGFVEYIKSGQKQGDMLLVVPAGKFAIRLGNEASIKQRLNVTKGMYYSLTFSAARTCAQDERLNISVAPDSGVIPIQTVYSSSGWDLYAWAFQAESNVAEIVIHNPGEEEDPACGPLIDGVAIKALYPPRPTNKNILKNGGFEEGPYVLPNATTGVLVPPFIEDDHSPLPAWMVESLKAIKYVDVEHFSVPQGRRAVELVAGKESAIAQVARTVVGKTYVLSFAVGDANNACQGSMVVEAFAGKDTLKVPYESRGKGGFKRASLRFVAVSTRTRVMFYSTFYSMRSDDFSSLCGPVIDDVKLLSARKP

SEQ ID NO: 35910 - protein, 325 aa, Arabidopsis thaliana
  peptide (1)..(325): Ceres Seq. ID no. 12370577
MKGTQVINKKAIPSWELSGFVEYIKSGQKQGDMLLVVPAGKFAIRLGNEASIKQRLNVTKGMYYSLTFSAARTCAQDERLNISVAPDSGVIPIQTVYSSSGWDLYAWAFQAESNVAEIVIHNPGEEEDPACGPLIDGVAIKALYPPRPTNKNILKNGGFEEGPYVLPNATTGVLVPPFIEDDHSPLPAWMVESLKAIKYVDVEHFSVPQGRRAVELVAGKESAIAQVARTVVGKTYVLSFAVGDANNACQGSMVVEAFAGKDTLKVPYESRGKGGFKRASLRFVAVSTRTRVMFYSTFYSMRSDDFSSLCGPVIDDVKLLSARKP

SEQ ID NO: 35911 - DNA, 1254 bp, Arabidopsis thaliana
  misc_feature (1)..(1254): Ceres Seq. ID no. 12396165
  misc_feature (1)..(1254): Ortholog of  Ceres SEQ ID NO 12336358 as cited in SEQ ID NO 20733
  misc_feature (1)..(1254): Ortholog of  Ceres SEQ ID NO 12623467 as cited in SEQ ID NO 60951
  misc_feature (1)..(1254): Ortholog of  Ceres SEQ ID NO 14309133 as cited in SEQ ID NO 0
tctcggaccaatattcaaagccgtgtgttcttctctgtctcattaaatcaaaaccaattttgttcttcttctttgattttttttttcttcttcattttttcttctttctatttgtaacgtatcttgagagatcgacgatgtcgtcgaagaaatccctagttcaaagtctcttcaacatttccaaaacctactccaggatttctggtcttacccgaatgcgtccgaccaaatccggcggcattcctcccgacgccggagattctggaatccgccgcagatttctccacaagagggcatttttctcgccggagatagttcctaaaggtggtaacttgatggagaaactcagggaattgactttgtccaataataatcgtattagactcgacgagatgttaccgccaccttcgccgaagaaatcatcaccggagtttttcccggcggtcacggtggaagacgtgaagaagctcatgagagcagcggaaatggagctggtgaaatcgaagctgagagagattggcaagaactgggttccttattcggagtttgttcgggtctgcggagaatacagttcggatcctgaacaaggtaaccgggtcgcgaatatgcttgacgaagctggaaacgtcatcgttttgggaaaactcgtctgccttaaacccgaagagctaacaagcgccatggctggtctgattccgacattcgaacccagtctcgacgacgcaacaagacaagagttcgaacaacttgagattataaaatcagatatcgacaaaagagccgatgatctggttcgaaaagaattatgggccggattaggcctaattatggcccaaacagttggattttttaggctgacgttttgggaactgtcgtgggacgtgatggaacccatatgcttctacgtaacttcgacatatttcatggctggttacgccttcttcctccgaacttcaaaggaaccttcctttgaaggtttttacaaaagccggttcgagacgaagcagaaacgtttgccttaaaatgcttgatttcgatatcgatcgatttaccaagctacagaagatgcatcgtccaaatttgactaaatctggtcgttgttgatcgtaattcttttcttcttctttttcctaaatcggatgctaaattaaatgtatagacgactgaaattttcgtagagaataattagttttagagggataaaaaaaagtcttgtcatgcgggggtaacactaaataactaaatcaattaatt

SEQ ID NO: 35912 - protein, 339 aa, Arabidopsis thaliana
  peptide (1)..(339): Ceres Seq. ID no. 12396166
SDQYSKPCVLLCLIKSKPILFFFFDFFFLLHFFFFLFVTYLERSTMSSKKSLVQSLFNISKTYSRISGLTRMRPTKSGGIPPDAGDSGIRRRFLHKRAFFSPEIVPKGGNLMEKLRELTLSNNNRIRLDEMLPPPSPKKSSPEFFPAVTVEDVKKLMRAAEMELVKSKLREIGKNWVPYSEFVRVCGEYSSDPEQGNRVANMLDEAGNVIVLGKLVCLKPEELTSAMAGLIPTFEPSLDDATRQEFEQLEIIKSDIDKRADDLVRKELWAGLGLIMAQTVGFFRLTFWELSWDVMEPICFYVTSTYFMAGYAFFLRTSKEPSFEGFYKSRFETKQKRLP

SEQ ID NO: 35913 - protein, 294 aa, Arabidopsis thaliana
  peptide (1)..(294): Ceres Seq. ID no. 12396167
MSSKKSLVQSLFNISKTYSRISGLTRMRPTKSGGIPPDAGDSGIRRRFLHKRAFFSPEIVPKGGNLMEKLRELTLSNNNRIRLDEMLPPPSPKKSSPEFFPAVTVEDVKKLMRAAEMELVKSKLREIGKNWVPYSEFVRVCGEYSSDPEQGNRVANMLDEAGNVIVLGKLVCLKPEELTSAMAGLIPTFEPSLDDATRQEFEQLEIIKSDIDKRADDLVRKELWAGLGLIMAQTVGFFRLTFWELSWDVMEPICFYVTSTYFMAGYAFFLRTSKEPSFEGFYKSRFETKQKRLP

SEQ ID NO: 35914 - protein, 268 aa, Arabidopsis thaliana
  peptide (1)..(268): Ceres Seq. ID no. 12396168
MRPTKSGGIPPDAGDSGIRRRFLHKRAFFSPEIVPKGGNLMEKLRELTLSNNNRIRLDEMLPPPSPKKSSPEFFPAVTVEDVKKLMRAAEMELVKSKLREIGKNWVPYSEFVRVCGEYSSDPEQGNRVANMLDEAGNVIVLGKLVCLKPEELTSAMAGLIPTFEPSLDDATRQEFEQLEIIKSDIDKRADDLVRKELWAGLGLIMAQTVGFFRLTFWELSWDVMEPICFYVTSTYFMAGYAFFLRTSKEPSFEGFYKSRFETKQKRLP

SEQ ID NO: 35915 - DNA, 1315 bp, Arabidopsis thaliana
  misc_feature (1)..(1315): Ceres Seq. ID no. 12482719
  misc_feature (1)..(1315): Ortholog of  Ceres SEQ ID NO 13639663 as cited in SEQ ID NO 57850
  misc_feature (1)..(1315): Ortholog of  Ceres SEQ ID NO 15224330 as cited in SEQ ID NO 58808
aaaagactatcaaaagaagaaacagagcaaatttcattctctcagaacaaatatatacatattaatcagaatcaggaaaagtgaagaagcgaaagagagaagaagatcggatgggagtggattactacaaagtcctccaagtcgatcgcagcgcaagcgacgatgatctcaagaaagcttatcgtaaacttgccatgaaatggcatcccgacaaaaatcccaacaacaaaaaggatgccgaagctatgttcaaacaaatatccgaagcttacgaggtactaagtgatcctcagaagaaagctgtgtatgatcaatatggtgaggaaggtttgaaagggaacgtgccacctccggatgcaggtggagctacttacttctctaccggggatggtccaacgtccttcaggttcaacccgagaaatgcggatgatatatttgctgagttctttggcttctctagcccatttggcggcggaagaggtggtacaagattctctagcagcatgtttggtgataatatgtttgcttctttcggcgaaggaggaggcggtggtggtggctcgatgcatcacggtggagctaggaaggctgctcctatcgaaaacaagttgccttgtagccttgaagatctttacaaaggaaccaccaaaaagatgaggatttctagggagattgctgatgtcagtggcaagacgatgcaggtggaagagattttgaccattgatgtgaaaccaggatggaagaaaggcacaaagatcacgttcccagagaaaggcaatgagcaacccggtgtgattccagcggatttagtcttcataatcgacgagaagcctcacccggttttcactcgagagggtaacgacctcatagtcacacagaagatctcacttgttgaggccttgactggttacacagtgaacctgactactcttgatggtcggagactgacaattccagtcaccaacgtggtccatcccgagtacgaggaagtggtaccgaaggaagggatgccattgcaaaaagaccagactaagagaggtaacttgaggatcaaatttaacatcaagttccctacaaggttaacctcagagcagaagacaggagtgaagaaacttctcggatgaaatgagttatagtcagcacatttcagacaaaacaatgttgaacagaagaggaacaagaaaatcatgttgcagaccacagggattgtgattaaatactgttgtgacctttttgatcgatttgtaacatatgtacgattggatacctcctaataaatttgttactttctctataatcaaaacgcttctaaacc

SEQ ID NO: 35916 - protein, 337 aa, Arabidopsis thaliana
  peptide (1)..(337): Ceres Seq. ID no. 12482720
MGVDYYKVLQVDRSASDDDLKKAYRKLAMKWHPDKNPNNKKDAEAMFKQISEAYEVLSDPQKKAVYDQYGEEGLKGNVPPPDAGGATYFSTGDGPTSFRFNPRNADDIFAEFFGFSSPFGGGRGGTRFSSSMFGDNMFASFGEGGGGGGGSMHHGGARKAAPIENKLPCSLEDLYKGTTKKMRISREIADVSGKTMQVEEILTIDVKPGWKKGTKITFPEKGNEQPGVIPADLVFIIDEKPHPVFTREGNDLIVTQKISLVEALTGYTVNLTTLDGRRLTIPVTNVVHPEYEEVVPKEGMPLQKDQTKRGNLRIKFNIKFPTRLTSEQKTGVKKLLG

SEQ ID NO: 35917 - protein, 309 aa, Arabidopsis thaliana
  peptide (1)..(309): Ceres Seq. ID no. 12482721
MKWHPDKNPNNKKDAEAMFKQISEAYEVLSDPQKKAVYDQYGEEGLKGNVPPPDAGGATYFSTGDGPTSFRFNPRNADDIFAEFFGFSSPFGGGRGGTRFSSSMFGDNMFASFGEGGGGGGGSMHHGGARKAAPIENKLPCSLEDLYKGTTKKMRISREIADVSGKTMQVEEILTIDVKPGWKKGTKITFPEKGNEQPGVIPADLVFIIDEKPHPVFTREGNDLIVTQKISLVEALTGYTVNLTTLDGRRLTIPVTNVVHPEYEEVVPKEGMPLQKDQTKRGNLRIKFNIKFPTRLTSEQKTGVKKLLG

SEQ ID NO: 35918 - protein, 292 aa, Arabidopsis thaliana
  peptide (1)..(292): Ceres Seq. ID no. 12482722
MFKQISEAYEVLSDPQKKAVYDQYGEEGLKGNVPPPDAGGATYFSTGDGPTSFRFNPRNADDIFAEFFGFSSPFGGGRGGTRFSSSMFGDNMFASFGEGGGGGGGSMHHGGARKAAPIENKLPCSLEDLYKGTTKKMRISREIADVSGKTMQVEEILTIDVKPGWKKGTKITFPEKGNEQPGVIPADLVFIIDEKPHPVFTREGNDLIVTQKISLVEALTGYTVNLTTLDGRRLTIPVTNVVHPEYEEVVPKEGMPLQKDQTKRGNLRIKFNIKFPTRLTSEQKTGVKKLLG

SEQ ID NO: 35919 - DNA, 1021 bp, Arabidopsis thaliana
  misc_feature (1)..(1021): Ceres Seq. ID no. 13488432
  misc_feature (1)..(1021): Ortholog of  Ceres SEQ ID NO 15176185 as cited in SEQ ID NO 1082
ttgacccaaaagaacccataatgtttagagtgaccggaactctctcggcggcatcatctccagcggtggcggcggcgtctttctccgccgctctaagactttccataactcccactctcgctatcgcctctcctccccatctccgttggttctcgaagttttctcgtcaatttctcggcggacgcatctcttcactccgaccacgcattccttctccgtgcccgattcgactctctggtttcccggctctcaaaatgagagcttcgtttagcagtgggagtagtgggagtagtgcaagtagagagattctggtgcagcatttgcttgttaagaataatgatgttgagctctttgccgaactccaaaagaaattcttggatggagaggagatgagtgatcttgcggctgagtattcgatttgtccttccaaaaaggacggtggtatacttggatgggtaaaactgggtcaaatggtaccagagtttgaggaagctgcgtttaaagcagagctgaatcaggtggtgaggtgtagaacccaatttggcttgcacttattgcaagttctatctgagagagaaccggtgaaagatatccaggtagaggagctgcattccaaaatgcaagatccagttttcatggatgaggctcagttaattgatgtcagagaacccaatgagatagagatagcatccttgccaggattcaaagtgttcccactccgccaatttggaacatgggcaccagacatcacttcaaagctgaaccctgagaaggatacatttgtcttgtgcaaggttggtggcaggtcaatgcaggttgccaactggttacagtctcagggcttcaagagtgtgtacaacattactggtgggatacaagcttattctctcaaggttgacccatcaattcctacttactgaaattgagcatcttagtctctttttcttgtatcctcctaattccaaattagatttgcaaattcgtattcaataaactatataatataaggttcatttttgag

SEQ ID NO: 35920 - protein, 305 aa, Arabidopsis thaliana
  peptide (1)..(305): Ceres Seq. ID no. 13488433
DPKEPIMFRVTGTLSAASSPAVAAASFSAALRLSITPTLAIASPPHLRWFSKFSRQFLGGRISSLRPRIPSPCPIRLSGFPALKMRASFSSGSSGSSASREILVQHLLVKNNDVELFAELQKKFLDGEEMSDLAAEYSICPSKKDGGILGWVKLGQMVPEFEEAAFKAELNQVVRCRTQFGLHLLQVLSEREPVKDIQVEELHSKMQDPVFMDEAQLIDVREPNEIEIASLPGFKVFPLRQFGTWAPDITSKLNPEKDTFVLCKVGGRSMQVANWLQSQGFKSVYNITGGIQAYSLKVDPSIPTY

SEQ ID NO: 35921 - protein, 299 aa, Arabidopsis thaliana
  peptide (1)..(299): Ceres Seq. ID no. 13488434
MFRVTGTLSAASSPAVAAASFSAALRLSITPTLAIASPPHLRWFSKFSRQFLGGRISSLRPRIPSPCPIRLSGFPALKMRASFSSGSSGSSASREILVQHLLVKNNDVELFAELQKKFLDGEEMSDLAAEYSICPSKKDGGILGWVKLGQMVPEFEEAAFKAELNQVVRCRTQFGLHLLQVLSEREPVKDIQVEELHSKMQDPVFMDEAQLIDVREPNEIEIASLPGFKVFPLRQFGTWAPDITSKLNPEKDTFVLCKVGGRSMQVANWLQSQGFKSVYNITGGIQAYSLKVDPSIPTY

SEQ ID NO: 35922 - protein, 221 aa, Arabidopsis thaliana
  peptide (1)..(221): Ceres Seq. ID no. 13488435
MRASFSSGSSGSSASREILVQHLLVKNNDVELFAELQKKFLDGEEMSDLAAEYSICPSKKDGGILGWVKLGQMVPEFEEAAFKAELNQVVRCRTQFGLHLLQVLSEREPVKDIQVEELHSKMQDPVFMDEAQLIDVREPNEIEIASLPGFKVFPLRQFGTWAPDITSKLNPEKDTFVLCKVGGRSMQVANWLQSQGFKSVYNITGGIQAYSLKVDPSIPTY

SEQ ID NO: 35923 - DNA, 874 bp, Arabidopsis thaliana
  misc_feature (1)..(874): Ceres Seq. ID no. 12333657
  misc_feature (1)..(874): Ortholog of  Ceres SEQ ID NO 13638654 as cited in SEQ ID NO 59310
gttagtcatgtcatcgatgacggagaaggagaaggagagagatccaccaccaccacatcaagagattgaagagactactccgttgctcgaaaattctcaaccggaaagtgaattgagatcgacgaccgcggcggcgaaggttcctgaggtggagattcatctgtataagtgtggaaaaggtccgatcgatgtgttcaagtcaaatctcggcggttatgagcaggatcagctcgaggttcgatctattcttgagaaatatggcttgaaagcaatcttcgctttcaacgttgagaaaggtcgtgctgttccgatcagatttcaccctaggaatggtcggtctgtgttgccttatagggatggtgccgtcatttacatcgacggtgaacctcaggattccctgctcaaacccatcaccagaatcattctcggagttgtgattgttacgctcttaataacatttctattgaaagaccctccagcttggatcaagaacaacatctccattgggacctttcctccatgggtgctcgcatgcatagttatagttttcactcgagctagaaagagaaccagggacttcttcaagaagtatggctggtagtttcgcagaccctaacactcgtctcgcttaaaatgtggtcgaaatttgtagtctttcatcgaccatatatatagaggttctcttgccttaacccaacaagttcccttccttggcaagactcttcgtctttgatacgccttgaggcgccaaattgcttgctttcagaactaagagagagcaatcattttcttcatttgcattttgttgaagtttatagttttatgcatttccatgtgtaatgcgatttggtttttgccattttgatggaaactg

SEQ ID NO: 35924 - protein, 199 aa, Arabidopsis thaliana
  peptide (1)..(199): Ceres Seq. ID no. 12333658
LVMSSMTEKEKERDPPPPHQEIEETTPLLENSQPESELRSTTAAAKVPEVEIHLYKCGKGPIDVFKSNLGGYEQDQLEVRSILEKYGLKAIFAFNVEKGRAVPIRFHPRNGRSVLPYRDGAVIYIDGEPQDSLLKPITRIILGVVIVTLLITFLLKDPPAWIKNNISIGTFPPWVLACIVIVFTRARKRTRDFFKKYGW

SEQ ID NO: 35925 - protein, 197 aa, Arabidopsis thaliana
  peptide (1)..(197): Ceres Seq. ID no. 12333659
MSSMTEKEKERDPPPPHQEIEETTPLLENSQPESELRSTTAAAKVPEVEIHLYKCGKGPIDVFKSNLGGYEQDQLEVRSILEKYGLKAIFAFNVEKGRAVPIRFHPRNGRSVLPYRDGAVIYIDGEPQDSLLKPITRIILGVVIVTLLITFLLKDPPAWIKNNISIGTFPPWVLACIVIVFTRARKRTRDFFKKYGW

SEQ ID NO: 35926 - protein, 194 aa, Arabidopsis thaliana
  peptide (1)..(194): Ceres Seq. ID no. 12333660
MTEKEKERDPPPPHQEIEETTPLLENSQPESELRSTTAAAKVPEVEIHLYKCGKGPIDVFKSNLGGYEQDQLEVRSILEKYGLKAIFAFNVEKGRAVPIRFHPRNGRSVLPYRDGAVIYIDGEPQDSLLKPITRIILGVVIVTLLITFLLKDPPAWIKNNISIGTFPPWVLACIVIVFTRARKRTRDFFKKYGW

SEQ ID NO: 35927 - DNA, 805 bp, Arabidopsis thaliana
  misc_feature (1)..(805): Ceres Seq. ID no. 12333653
  misc_feature (1)..(805): Ortholog of  Ceres SEQ ID NO 15180167 as cited in SEQ ID NO 0
agcattttctttcagctcaaacccaagaacctcatcgccgattatttcttcattcttactctatcccgcgccgattaatctctctcagaaccgtccgagatgaggaagctcaagtatcacgagaagaagcttataaagaaagtaaatttcttagaatggaaaagagaaggtaaccatcgggaaaacgagattacgtatcgataccacatgggctctcgtgatgattacaaaaagtattcaggattgtgtaggatgttgcagaaactgacgaatataatgaaacaaatggatcctgcagatccttttcgtattcagatgactgatatgcttttggagaagctatataacatgggtgttataccgactaggaaaagcttgactctaactgagcggttatcagtttcatccttctgtaggcgtaggctatctactgtgctggttcacctgaagtttgcagagcaccacaaagaagctgtgacatacatagagcaaggacacgttcgtgtaggaccagaaacaattactgatccagctttcttagtaactcggaacatggaagatttcatcacttgggttgattcatccaagattaaacgaaaggttcttgagtacaatgacacattggatgattatgacatgcttgcttagctttgaggaagttaaaaaagactgatgttttgtaaaagccaaaaaaggttcactgctactactattgcagggtttgtttggatttttgaatatgcaaatgtgctactattcccttgtctttaatcttactttcgatctatttgcaagaagaaacttg

SEQ ID NO: 35928 - protein, 182 aa, Arabidopsis thaliana
  peptide (1)..(182): Ceres Seq. ID no. 12333654
MRKLKYHEKKLIKKVNFLEWKREGNHRENEITYRYHMGSRDDYKKYSGLCRMLQKLTNIMKQMDPADPFRIQMTDMLLEKLYNMGVIPTRKSLTLTERLSVSSFCRRRLSTVLVHLKFAEHHKEAVTYIEQGHVRVGPETITDPAFLVTRNMEDFITWVDSSKIKRKVLEYNDTLDDYDMLA

SEQ ID NO: 35929 - protein, 146 aa, Arabidopsis thaliana
  peptide (1)..(146): Ceres Seq. ID no. 12333655
MGSRDDYKKYSGLCRMLQKLTNIMKQMDPADPFRIQMTDMLLEKLYNMGVIPTRKSLTLTERLSVSSFCRRRLSTVLVHLKFAEHHKEAVTYIEQGHVRVGPETITDPAFLVTRNMEDFITWVDSSKIKRKVLEYNDTLDDYDMLA

SEQ ID NO: 35930 - protein, 131 aa, Arabidopsis thaliana
  peptide (1)..(131): Ceres Seq. ID no. 12333656
MLQKLTNIMKQMDPADPFRIQMTDMLLEKLYNMGVIPTRKSLTLTERLSVSSFCRRRLSTVLVHLKFAEHHKEAVTYIEQGHVRVGPETITDPAFLVTRNMEDFITWVDSSKIKRKVLEYNDTLDDYDMLA

SEQ ID NO: 35931 - DNA, 776 bp, Arabidopsis thaliana
  misc_feature (1)..(776): Ceres Seq. ID no. 13490249
  misc_feature (1)..(776): Ortholog of  Ceres SEQ ID NO 13599287 as cited in SEQ ID NO 338
  misc_feature (1)..(776): Ortholog of  Ceres SEQ ID NO 14314817 as cited in SEQ ID NO 52571
aaccatatatatacacacaaaatatttgttaacaaaaagatttatatttcttctcttctttgttcataactaagaactcagaaagagaccaacgacactgcaaatggcggatgaatctccaaagtctatctacgacttcaccgtcaaggatatcggaggtaacgatgtgagtttggaccaatacaaaggcaaaactcttttggttgtaaacgttgcttccaaatgtggtctgacggatgcgaactacaaggaactgaatgttctgtacgagaaatacaaggagcaagggttggagatattagcattcccgtgtaatcagttcttaggacaagaaccaggaaacaatgaagagattcaacaaactgtctgcaccaggttcaaagctgaattccccatctttgacaaggtggatgtgaacggtaagaacacggcaccattatacaagtacttgaaagcagagaaaggaggtttgctcattgatgctatcaaatggaacttcaccaaattcttggtttctcctgatggcaaggtcttacagagatattctcccagaacctctcctcttcaattcgagaaggacattcaaactgcgttgggacaggcctcttcttaatcaccagaagaagaagtttcaagaactttcgtttggtccaaattatgatcttagaatcatcaacattgcaaacttattttctttgaattctatcattcttgttttaaataattgatgtattcgatgtcttttcatgggatgatatatcatatattatcatgcg

SEQ ID NO: 35932 - protein, 169 aa, Arabidopsis thaliana
  peptide (1)..(169): Ceres Seq. ID no. 13490250
MADESPKSIYDFTVKDIGGNDVSLDQYKGKTLLVVNVASKCGLTDANYKELNVLYEKYKEQGLEILAFPCNQFLGQEPGNNEEIQQTVCTRFKAEFPIFDKVDVNGKNTAPLYKYLKAEKGGLLIDAIKWNFTKFLVSPDGKVLQRYSPRTSPLQFEKDIQTALGQASS

SEQ ID NO: 35933 - DNA, 982 bp, Arabidopsis thaliana
  misc_feature (1)..(982): Ceres Seq. ID no. 12482664
  misc_feature (1)..(982): Ortholog of  Ceres SEQ ID NO 14305743 as cited in SEQ ID NO 52462
  misc_feature (1)..(982): Ortholog of  Ceres SEQ ID NO 13623029 as cited in SEQ ID NO 0
agattcagaaaccctaatttcttcacaaagcaaaacacagaaaaagccattctttttgccccttgagtgctttcagctcttcccacaaggttacagaagtaatgtcacgtgtgtacgtcggaaatttggacccgcgagttactgagcgtgaacttgaggatgagttccgtgcctttggagttgtcaggagtgtttgggttgcccgtagaccacctggttacgcttttctagatttcgaagatcctagggatgcccgtgatgctatccgtgctttagatggcaagaatggctggagggttgaacagtctcacaatcgaggtgagcgtggtggcggcggtcgtggtggtgaccgtggaggtggtggcggcggccgtggtggtcgtggtggctctgatttgaaatgctatgaatgcggtgagactggtcatttcgcacgtgaatgccgtaaccgtggtggaactggaaggcgtcgcagcaagagccgtagtcgcactcctccaagatacagaaggagcccaagctatggacggaggagttacagccctcgtgcaagatctccccctcctccaaggcgccgcagtccttctcctcctcctgcccgtggccgcagctacagtagatcaccacctccatacagagcgcgtgaggaagtgccatatgctaatggaaatggactgaaagaaagacgcagaagcaggagctgagtgagtgattttgcaagaaaacgagtgtgtgggaggatactttggaagagaagaagagagggactaagggaagttactatcatctatgaatttcagtaagagaacatgttttaggtctgctgggttggataaagcttgctacttttgcttttggatatgaaacgtacgtagttgtgtatctaccaataggtaaaagaacacttgattcgtaccctagtttcttaaagacataatgtttgattggaaattctgctaaatgcctaagcgtttcttgtctt

SEQ ID NO: 35934 - protein, 200 aa, Arabidopsis thaliana
  peptide (1)..(200): Ceres Seq. ID no. 12482665
MSRVYVGNLDPRVTERELEDEFRAFGVVRSVWVARRPPGYAFLDFEDPRDARDAIRALDGKNGWRVEQSHNRGERGGGGRGGDRGGGGGGRGGRGGSDLKCYECGETGHFARECRNRGGTGRRRSKSRSRTPPRYRRSPSYGRRSYSPRARSPPPPRRRSPSPPPARGRSYSRSPPPYRAREEVPYANGNGLKERRRSRS

SEQ ID NO: 35935 - DNA, 1133 bp, Arabidopsis thaliana
  misc_feature (1)..(1133): Ceres Seq. ID no. 12436710
  misc_feature (1)..(1133): Ortholog of  Ceres SEQ ID NO 12615296 as cited in SEQ ID NO 62724
  misc_feature (1)..(1133): Ortholog of  Ceres SEQ ID NO 15225093 as cited in SEQ ID NO 65177
  misc_feature (1)..(1133): Ortholog of  Ceres SEQ ID NO 15179532 as cited in SEQ ID NO 0
aagtgttcttgaggagaaggacgatcgatctaaggagacgatgaagatcttccacgttccttgtctgcaagacaactactcttatctgataatcgatgagagcaccggagacgcggcggttgtggatccagttgatccggagaaggtgatcgcatcggctgagaagcaccaagctaagatcaagttcgtactcactacgcatcatcactgggatcatgccggtggaaacgagaagattaagcagttggttcctgatatcaaagtatatggaggttctctggataaggtgaagggttgcactgatgcggttgataatggtgacaagctgactttgggtcaggatattaacatattggctctccacactccttggtttgtttgtttttttttttttttccaatgaatttagatgcatctaatctacttgatgtttaactcagtcattttctcttgtcatcgctgattcctctgatatatctacttgttacagtcacaccaagggtcacattagttattatgtgaccggaaaagaaggagaaaacccagccgtgttcaccggagatacactttttgttgctggatgtgggaagttttttgaagggacagctgagcagatgtatcagtcgttgtgtgtgactctggctgcattacctaaaccgacacaggtttactgcggccatgagtacaccgttaagaacttggaatttgctctaactgtggaaccaaacaacgggaagatacaacagaagttagcatgggcccgtcaacagcgccaagcagatcttcccacaatcccttcaacactggaggaagagctcgaaacaaatccatttatgcgtgttgataagccagagatacaggagaaactcggttgcaagtcgccaattgatacaatgagggaagttcggaacaagaaggatcagtggaggggatgatgataaatggagagcttcttgcctatgttttgtgtacttgtgttgaatgatcctgtaaaaggtgtatgaaccagtaatgttgatattctgtgtgaaactgtgaaccggtttggtaaaccgaaatcagaccgacctgtaagccgtactccctttttgaattttcagtttactatggataataatttcagtgtctacacc

SEQ ID NO: 35936 - protein, 133 aa, Arabidopsis thaliana
  peptide (1)..(133): Ceres Seq. ID no. 12436711
SVLEEKDDRSKETMKIFHVPCLQDNYSYLIIDESTGDAAVVDPVDPEKVIASAEKHQAKIKFVLTTHHHWDHAGGNEKIKQLVPDIKVYGGSLDKVKGCTDAVDNGDKLTLGQDINILALHTPWFVCFFFFFQ

SEQ ID NO: 35937 - protein, 120 aa, Arabidopsis thaliana
  peptide (1)..(120): Ceres Seq. ID no. 12436712
MKIFHVPCLQDNYSYLIIDESTGDAAVVDPVDPEKVIASAEKHQAKIKFVLTTHHHWDHAGGNEKIKQLVPDIKVYGGSLDKVKGCTDAVDNGDKLTLGQDINILALHTPWFVCFFFFFQ

SEQ ID NO: 35938 - protein, 106 aa, Arabidopsis thaliana
  peptide (1)..(106): Ceres Seq. ID no. 12436713
MYQSLCVTLAALPKPTQVYCGHEYTVKNLEFALTVEPNNGKIQQKLAWARQQRQADLPTIPSTLEEELETNPFMRVDKPEIQEKLGCKSPIDTMREVRNKKDQWRG

SEQ ID NO: 35939 - DNA, 1500 bp, Arabidopsis thaliana
  misc_feature (1)..(1500): Ceres Seq. ID no. 13497169
  misc_feature (1)..(1500): Ortholog of  Ceres SEQ ID NO 13597740 as cited in SEQ ID NO 64482
  misc_feature (1)..(1500): Ortholog of  Ceres SEQ ID NO 13596056 as cited in SEQ ID NO 68307
  misc_feature (1)..(1500): Ortholog of  Ceres SEQ ID NO 12388689 as cited in SEQ ID NO 0
gttgatcaacaattaaacacaaaaacccttaagttgacatggctgtatctcttccaactcttaaaaatcaattactattatacccctcagaaaaatggcagagcgtgtgtctctcacactcaacggaaccctcctttctcctcctcccacaacaacaacaacaacaatgtcttcttctctccgatctaccaccgccgcttctcttctcctccgctcctcctcctcctcctccagatccactctcactctctccgcttcctcctctctctccttcgtcagatctctcgtctcttctccacgtctctcttcttcttcatccctctctcagaagaaatatcgaattgcgtcggtgaatcggagtttcaactccaccaccgccgctactaaatcttcatcttcagatcctgatcagttgaagaacgctagagaagatatcaaagagcttctcagcaccaaattctgccatccgattttggttagattaggttggcatgatgctggtacgtataacaagaacattaaggaatggccacaaagaggtggagctaatggaagtttgagattcgatattgagcttaaacatgctgctaacgctggtcttgtgaatgctttaaacttgattaaggatatcaaagagaaatactctgggatcagttatgctgatttgttccagttagctagtgctactgctatagaggaagctggaggaccgaaaataccgatgaaatatggtagagttgatgcctctggtcctgaggattgtccagaagaaggaaggcttccagatgctggtcctccttcacctgctactcatctcagagaagttttttacagaatgggattagatgacaaggacatagttgcattatctggtgctcacacgttaggaagatctaggccagaacgtagtggttgggggaagcctgagacgaagtacacgaaagaaggacctggagcaccaggaggacagtcatggacaccagagtggctgaagtttgataattcttacttcaaggagatcaaggaaaagagagatgaagatctccttgtcctacccactgatgctgccatcttcgaagattcttctttcaaggtctatgctgaaaagtatgctgcagatcaggatgcatttttcaaggattacgctgtagcccatgcgaagctcagcaatcttggagcagaatttaaccctccggagggtatcgttatctaatgggggcacataatttactcaaccagacttatgattttagagaaacgtagttcaataatgaaagagaagaaaaagttgacggagaacttttcatgcgagtacttttcgagataccttttggacaaatgtttctggctgttcaaaggattttgtttagccgaaagtatttgatcgttttcatggttttgtgctttcatgtttttttcttgtaataaattgcggaagtgattatccaaaatctatacaaattttgtctggaattgaattattttatcgatgttataact

SEQ ID NO: 35940 - protein, 372 aa, Arabidopsis thaliana
  peptide (1)..(372): Ceres Seq. ID no. 13497170
MAERVSLTLNGTLLSPPPTTTTTTMSSSLRSTTAASLLLRSSSSSSRSTLTLSASSSLSFVRSLVSSPRLSSSSSLSQKKYRIASVNRSFNSTTAATKSSSSDPDQLKNAREDIKELLSTKFCHPILVRLGWHDAGTYNKNIKEWPQRGGANGSLRFDIELKHAANAGLVNALNLIKDIKEKYSGISYADLFQLASATAIEEAGGPKIPMKYGRVDASGPEDCPEEGRLPDAGPPSPATHLREVFYRMGLDDKDIVALSGAHTLGRSRPERSGWGKPETKYTKEGPGAPGGQSWTPEWLKFDNSYFKEIKEKRDEDLLVLPTDAAIFEDSSFKVYAEKYAADQDAFFKDYAVAHAKLSNLGAEFNPPEGIVI

SEQ ID NO: 35941 - protein, 348 aa, Arabidopsis thaliana
  peptide (1)..(348): Ceres Seq. ID no. 13497171
MSSSLRSTTAASLLLRSSSSSSRSTLTLSASSSLSFVRSLVSSPRLSSSSSLSQKKYRIASVNRSFNSTTAATKSSSSDPDQLKNAREDIKELLSTKFCHPILVRLGWHDAGTYNKNIKEWPQRGGANGSLRFDIELKHAANAGLVNALNLIKDIKEKYSGISYADLFQLASATAIEEAGGPKIPMKYGRVDASGPEDCPEEGRLPDAGPPSPATHLREVFYRMGLDDKDIVALSGAHTLGRSRPERSGWGKPETKYTKEGPGAPGGQSWTPEWLKFDNSYFKEIKEKRDEDLLVLPTDAAIFEDSSFKVYAEKYAADQDAFFKDYAVAHAKLSNLGAEFNPPEGIVI

SEQ ID NO: 35942 - DNA, 1123 bp, Arabidopsis thaliana
  misc_feature (1)..(1123): Ceres Seq. ID no. 12394899
  misc_feature (1)..(1123): Ortholog of  Ceres SEQ ID NO 13581804 as cited in SEQ ID NO 51424
  misc_feature (1)..(1123): Ortholog of  Ceres SEQ ID NO 14307797 as cited in SEQ ID NO 54802
  misc_feature (1)..(1123): Ortholog of  Ceres SEQ ID NO 15168374 as cited in SEQ ID NO 55652
  misc_feature (1)..(1123): Ortholog of  Ceres SEQ ID NO 13663874 as cited in SEQ ID NO 67003
  misc_feature (1)..(1123): Ortholog of  Ceres SEQ ID NO 13624654 as cited in SEQ ID NO 0
acattcatcaacacaaaagatacccagagagacataagaaagaaagagagagagagatactttggtcatttcagggttgtcgtttctctctcttgttcttgagattttgaagagagagagatatgggaagaggtagggttcagctgaagaggatagagaacaagatcaataggcaagttactttctcaaagagaaggtctggtttgctcaagaaagctcatgagatctctgttctctgcgatgctgaggttgctctcatcgtcttctcttccaaaggcaaactcttcgaatattccaccgactcttgcatggagaggatacttgaacgctatgatcgctatttatattcagacaaacaacttgttggccgagacgtttcacaaagtgaaaattgggttctagaacatgctaagctcaaggcaagagttgaggtacttgagaagaacaaaaggaattttatgggggaagatcttgattcgttgagcttgaaggagcttcaaagcttggagcatcagctcgatgcagctatcaagagcattaggtcaagaaagaaccaagctatgttcgaatccatatctgcgctccagaagaaggataaagccttgcaagatcacaacaattcgcttctcaaaaagattaaggagagggagaagaaaacgggtcagcaagaaggacaattagtccaatgctccaactcttcttcagttcttctgcctcaatactgcgtaacctcctccagagatggctttgtggagagagttgggggagagaacggtggtgcatcgtcgttgacggaaccaaactctctgcttccggcttggatgttacgtcctaccactacgaacgagtagaactatctcactctttataatataatgataatataattaatgtttaatattttcataacattcagcatttttttggtgacttatactcattactaataccgatatgttttagctagtcatattatatgtatgatggaactccgttgtcgagacgtatgtacgtaagctatcattagattcactgcgtcttaagaacaaagattcatatcttggtaatgatttctcatgaataattaatgtaacttttactttttaaaaaaaaaaagcaaact

SEQ ID NO: 35943 - protein, 242 aa, Arabidopsis thaliana
  peptide (1)..(242): Ceres Seq. ID no. 12394900
MGRGRVQLKRIENKINRQVTFSKRRSGLLKKAHEISVLCDAEVALIVFSSKGKLFEYSTDSCMERILERYDRYLYSDKQLVGRDVSQSENWVLEHAKLKARVEVLEKNKRNFMGEDLDSLSLKELQSLEHQLDAAIKSIRSRKNQAMFESISALQKKDKALQDHNNSLLKKIKEREKKTGQQEGQLVQCSNSSSVLLPQYCVTSSRDGFVERVGGENGGASSLTEPNSLLPAWMLRPTTTNE

SEQ ID NO: 35944 - protein, 180 aa, Arabidopsis thaliana
  peptide (1)..(180): Ceres Seq. ID no. 12394901
MERILERYDRYLYSDKQLVGRDVSQSENWVLEHAKLKARVEVLEKNKRNFMGEDLDSLSLKELQSLEHQLDAAIKSIRSRKNQAMFESISALQKKDKALQDHNNSLLKKIKEREKKTGQQEGQLVQCSNSSSVLLPQYCVTSSRDGFVERVGGENGGASSLTEPNSLLPAWMLRPTTTNE

SEQ ID NO: 35945 - protein, 130 aa, Arabidopsis thaliana
  peptide (1)..(130): Ceres Seq. ID no. 12394902
MGEDLDSLSLKELQSLEHQLDAAIKSIRSRKNQAMFESISALQKKDKALQDHNNSLLKKIKEREKKTGQQEGQLVQCSNSSSVLLPQYCVTSSRDGFVERVGGENGGASSLTEPNSLLPAWMLRPTTTNE

SEQ ID NO: 35946 - DNA, 1307 bp, Arabidopsis thaliana
  misc_feature (1)..(1307): Ceres Seq. ID no. 12482093
  misc_feature (1)..(1307): Ortholog of  Ceres SEQ ID NO 14314272 as cited in SEQ ID NO 57461
  misc_feature (1)..(1307): Ortholog of  Ceres SEQ ID NO 15170602 as cited in SEQ ID NO 57485
aagacaaaaggagcggtttggtgaagttagttaaaagagttgggtttcttcgtaagcatcgaaatcagatttctttaccaaagaaaaaataaagaaaagaaaaatatagcaagtacactgcatttcaacactctcatatctctccttcctacttcctcggtttcatcgtccactgtctcaacaatggcgtcattgtcggtaccttgcgtcaagatctgtgctctgaacaggcgggtcggatctctccctggaatctctactcaaagatggcagccgcaacccaatgggatctcctttccctccgatgtttctcagaatcattctgcattctggaggttgcgtgcaacaactaatgaggttgtttctaactccactccaatgactaatggtgggtatatgaacggaaaagcgaaaaccaatgttcctgaacccgccgagctctctgaatttatggctaaagtctctggtcttcttaagcttgtggattcaaaagacatagtggaacttgaactaaagcagctcgactgtgagatcgttattcgaaagaaggaagctttacagcaagctgtaccaccagctccagtttatcactcaatgcctcctgtaatggcagacttttcaatgcctccagctcaaccagtggctcttcctccttctcctactcctacctcaacgcctgcaacagcaaaaccaacatccgccccatcctcgtctcatcctccactcaagagtcccatggctggtactttctatagatctcctggacccggtgaacccccttttgtaaaggttggagataaggtacagaagggtcaaattgtttgtattatcgaagctatgaaactgatgaacgagattgaggctgagaagtcaggaaccatcatggaactactggctgaagatggaaaaccagtcagcgttgacacgcctctttttgtcatcgcaccttgaaacgaagaaggatccttttagctgcttcaaaacatcttcaaagtctcggttaagctatagcaacgtgctaaaactcatcaagtaattatttcagcttaagttggttggtttcggatttctgcttgtcgcttcaataattgacccatcttttgggatttcacgtaacgtactacactttgctttttagttttctgcgaaactaatgtattttgtagcctctcaatcctggctctctgtcccatacttcagttttttacacaacgcactgcttataaaagcacagttaaaggtgtctaaaggagaatggtgtgtctttgactgaggcaacaaataaaacagtgaaaagttaaggtttt

SEQ ID NO: 35947 - protein, 255 aa, Arabidopsis thaliana
  peptide (1)..(255): Ceres Seq. ID no. 12482094
MASLSVPCVKICALNRRVGSLPGISTQRWQPQPNGISFPSDVSQNHSAFWRLRATTNEVVSNSTPMTNGGYMNGKAKTNVPEPAELSEFMAKVSGLLKLVDSKDIVELELKQLDCEIVIRKKEALQQAVPPAPVYHSMPPVMADFSMPPAQPVALPPSPTPTSTPATAKPTSAPSSSHPPLKSPMAGTFYRSPGPGEPPFVKVGDKVQKGQIVCIIEAMKLMNEIEAEKSGTIMELLAEDGKPVSVDTPLFVIAP

SEQ ID NO: 35948 - protein, 190 aa, Arabidopsis thaliana
  peptide (1)..(190): Ceres Seq. ID no. 12482095
MTNGGYMNGKAKTNVPEPAELSEFMAKVSGLLKLVDSKDIVELELKQLDCEIVIRKKEALQQAVPPAPVYHSMPPVMADFSMPPAQPVALPPSPTPTSTPATAKPTSAPSSSHPPLKSPMAGTFYRSPGPGEPPFVKVGDKVQKGQIVCIIEAMKLMNEIEAEKSGTIMELLAEDGKPVSVDTPLFVIAP

SEQ ID NO: 35949 - protein, 184 aa, Arabidopsis thaliana
  peptide (1)..(184): Ceres Seq. ID no. 12482096
MNGKAKTNVPEPAELSEFMAKVSGLLKLVDSKDIVELELKQLDCEIVIRKKEALQQAVPPAPVYHSMPPVMADFSMPPAQPVALPPSPTPTSTPATAKPTSAPSSSHPPLKSPMAGTFYRSPGPGEPPFVKVGDKVQKGQIVCIIEAMKLMNEIEAEKSGTIMELLAEDGKPVSVDTPLFVIAP

SEQ ID NO: 35950 - DNA, 1552 bp, Arabidopsis thaliana
  misc_feature (1)..(1552): Ceres Seq. ID no. 12325208
  misc_feature (1)..(1552): Ortholog of  Ceres SEQ ID NO 13584744 as cited in SEQ ID NO 69137
atgtagatttgactttgtttcaaagcggaggaagaaggagaaggcaacactaaagatcaaaaccttagatctttgcttacgctttcctctggttaggaacggtttttcagaaacaaaagattccatttttagattcaattcccttctggtttgaaaaatgatatcaaaatggtgaatagaagtgatttggtggtgattggcatctcggttgggcttgcacttggtctcttgctcgctctgcttttgttcttcgccataaaatggtactatggccgctctcacctcaggcgatgcgctaatgaacagaattccccgactctacctgttcacactgctaaaagaggtgtagtaatccctgatgatagagcaaacacagaatcgtcacagccacctgagaatggagcaccaactcaacatcagccatggtggaacaaccacaccaaagatctcactgtatctgcatccggcatacctagatataactacaaggatattcagaaagcaacacaaaatttcacaaccgttctaggacaaggatcttttggtcctgtctacaaagcggttatgcccaatggagaattagctgcagcgaaagttcatggctctaattcaagtcaaggagacagagagtttcaaaccgaggtatctttacttgggagactgcatcaccggaatcttgtgaacttgacaggatactgtgtcgataaaagtcaccggatgttgatctatgagttcatgagtaatggaagtttggagaatcttttgtatggcggaatgcaagtcttgaattgggaagagcggcttcaaatcgctcttgacatctcccacggcattgaataccttcacgaaggggccgtgccgccagttattcaccgtgatcttaagtcagcaaacattttgttagatcattccatgagagctaaggtcgcggatttcgggttgtcgaaagagatggttttagatagaatgacttccggattgaagggtactcacggctacatggatccaacatacatttcgactaacaaatacacgatgaagagcgacatttacagtttcggtgtcatcattcttgagctcattactgcaatccatccccaacagaatctgatggaatacatcaacctggcttcgatgagtccagatggtatcgacgaaatactcgatcagaaactagtgggaaacgcaagcattgaagaagtgaggttactggcgaagattgcaaacaggtgtgtgcataagacaccaagaaaaagaccatctattggagaagtaacacagttcatactaaagatcaaacaaagtcggtctcgaggaagaagacaggacacgatgtcttcatcgtttggtgttggttatgaggaagatctgtcaagggttatgagcaggattaaggatcagcatgttgagttagggttattggctggtgttaaggaagagaatcatcaagagaggaacattgcaacaacatagtaactatttactttaggagtaagtctttttgtacatattaccacatgaggctcaaaagtaagatttctccctcttctgc

SEQ ID NO: 35951 - protein, 434 aa, Arabidopsis thaliana
  peptide (1)..(434): Ceres Seq. ID no. 12325209
MVNRSDLVVIGISVGLALGLLLALLLFFAIKWYYGRSHLRRCANEQNSPTLPVHTAKRGVVIPDDRANTESSQPPENGAPTQHQPWWNNHTKDLTVSASGIPRYNYKDIQKATQNFTTVLGQGSFGPVYKAVMPNGELAAAKVHGSNSSQGDREFQTEVSLLGRLHHRNLVNLTGYCVDKSHRMLIYEFMSNGSLENLLYGGMQVLNWEERLQIALDISHGIEYLHEGAVPPVIHRDLKSANILLDHSMRAKVADFGLSKEMVLDRMTSGLKGTHGYMDPTYISTNKYTMKSDIYSFGVIILELITAIHPQQNLMEYINLASMSPDGIDEILDQKLVGNASIEEVRLLAKIANRCVHKTPRKRPSIGEVTQFILKIKQSRSRGRRQDTMSSSFGVGYEEDLSRVMSRIKDQHVELGLLAGVKEENHQERNIATT

SEQ ID NO: 35952 - protein, 302 aa, Arabidopsis thaliana
  peptide (1)..(302): Ceres Seq. ID no. 12325210
MPNGELAAAKVHGSNSSQGDREFQTEVSLLGRLHHRNLVNLTGYCVDKSHRMLIYEFMSNGSLENLLYGGMQVLNWEERLQIALDISHGIEYLHEGAVPPVIHRDLKSANILLDHSMRAKVADFGLSKEMVLDRMTSGLKGTHGYMDPTYISTNKYTMKSDIYSFGVIILELITAIHPQQNLMEYINLASMSPDGIDEILDQKLVGNASIEEVRLLAKIANRCVHKTPRKRPSIGEVTQFILKIKQSRSRGRRQDTMSSSFGVGYEEDLSRVMSRIKDQHVELGLLAGVKEENHQERNIATT

SEQ ID NO: 35953 - protein, 251 aa, Arabidopsis thaliana
  peptide (1)..(251): Ceres Seq. ID no. 12325211
MLIYEFMSNGSLENLLYGGMQVLNWEERLQIALDISHGIEYLHEGAVPPVIHRDLKSANILLDHSMRAKVADFGLSKEMVLDRMTSGLKGTHGYMDPTYISTNKYTMKSDIYSFGVIILELITAIHPQQNLMEYINLASMSPDGIDEILDQKLVGNASIEEVRLLAKIANRCVHKTPRKRPSIGEVTQFILKIKQSRSRGRRQDTMSSSFGVGYEEDLSRVMSRIKDQHVELGLLAGVKEENHQERNIATT

SEQ ID NO: 35954 - DNA, 1397 bp, Arabidopsis thaliana
  misc_feature (1)..(1397): Ceres Seq. ID no. 12370917
  misc_feature (1)..(1397): Ortholog of  Ceres SEQ ID NO 13654557 as cited in SEQ ID NO 68444
ctaatttctcaaagagtctaaagagacggagagtgagagaagagagaaacatttcgagacaaatggccgccgccgctgctcgtcctctcgtcaccatccaaaccttggatggtgacatgtccaccgatcaatcctccaccgtcgtacttcccgacgtcatgacggcgccagttcgaccagacatcgttaacttcgttcacgcccaaatctccaacaacagccgtcagccatacgccgtatcgaagaaggccgagtcctggggaaccggacgtgccgtgtctcgtatccctcgtgttcccggtggtggtactcaccgtgctggtcaagctgcgttcggtaacatgtgtcgtggtggtcgtatgttcgctccaaccaagatctggcgccgctggcaccgtcgtgtcaatgtcaacatgaagcgtcacgcaatcgtctcagctatcgctgcaactgctgttcctgcgcttgtgatggctcgtggtcacaagatcgagaatgttcctgagatgcctcttgttgtgagtgactccgccgaagctgtggagaagacctcagctgcgatcaaggttttgaaacagatcggtgcttatgatgatgctgagaaggcaaagaacagcattggaatccgtcctggtaaaggtaaaatgaggaaccgtcgttacatttctaggaaaggtcctctggtggtttatggaactgaaggatctaagatagttaaggcgtttagaaaccttcctggtgttgagctttgtcatgtggagaggcttaatttgttgaagcttgctcctggtggtcaccttggtcggtttgtgatctggaccaagtctgcctttgagaagcttgagtctatctatggttcgtttgaagccatcagagaagaaggggggtatgtgcttcctcgtgcaaagatggtgaatgctgatcttgccaggattatcaattcagatgagattcagagtgttgtgaatccgatcaagaaggatgcgaagagggctgttcttaagaagaatccattgaagaatctcaatgtgatgttgaagttgaatccttatgctaagaccgcgaagaggatgtcactgttagctgaagcacagagagttaaggctaagaaggagaagctcgccaagaagaggaaaaccgttaccaaggaggaggcgttggcaatcaaagcagcaggcaagtcgtggtacaagactatgatctccgacagtgattacaccgagtttgataacttcaccaaatggctcggtgctagccagtaataatctcgtctgctttggaacactttccatattttagtcaaaagattttggtttttttaatctgttttgtctttgggtgtctggatatcaagttgaattatgaacaagtttcacttttttacatctccatttctt

SEQ ID NO: 35955 - protein, 419 aa, Arabidopsis thaliana
  peptide (1)..(419): Ceres Seq. ID no. 12370918
NFSKSLKRRRVREERNISRQMAAAAARPLVTIQTLDGDMSTDQSSTVVLPDVMTAPVRPDIVNFVHAQISNNSRQPYAVSKKAESWGTGRAVSRIPRVPGGGTHRAGQAAFGNMCRGGRMFAPTKIWRRWHRRVNVNMKRHAIVSAIAATAVPALVMARGHKIENVPEMPLVVSDSAEAVEKTSAAIKVLKQIGAYDDAEKAKNSIGIRPGKGKMRNRRYISRKGPLVVYGTEGSKIVKAFRNLPGVELCHVERLNLLKLAPGGHLGRFVIWTKSAFEKLESIYGSFEAIREEGGYVLPRAKMVNADLARIINSDEIQSVVNPIKKDAKRAVLKKNPLKNLNVMLKLNPYAKTAKRMSLLAEAQRVKAKKEKLAKKRKTVTKEEALAIKAAGKSWYKTMISDSDYTEFDNFTKWLGASQ

SEQ ID NO: 35956 - protein, 399 aa, Arabidopsis thaliana
  peptide (1)..(399): Ceres Seq. ID no. 12370919
MAAAAARPLVTIQTLDGDMSTDQSSTVVLPDVMTAPVRPDIVNFVHAQISNNSRQPYAVSKKAESWGTGRAVSRIPRVPGGGTHRAGQAAFGNMCRGGRMFAPTKIWRRWHRRVNVNMKRHAIVSAIAATAVPALVMARGHKIENVPEMPLVVSDSAEAVEKTSAAIKVLKQIGAYDDAEKAKNSIGIRPGKGKMRNRRYISRKGPLVVYGTEGSKIVKAFRNLPGVELCHVERLNLLKLAPGGHLGRFVIWTKSAFEKLESIYGSFEAIREEGGYVLPRAKMVNADLARIINSDEIQSVVNPIKKDAKRAVLKKNPLKNLNVMLKLNPYAKTAKRMSLLAEAQRVKAKKEKLAKKRKTVTKEEALAIKAAGKSWYKTMISDSDYTEFDNFTKWLGASQ

SEQ ID NO: 35957 - protein, 381 aa, Arabidopsis thaliana
  peptide (1)..(381): Ceres Seq. ID no. 12370920
MSTDQSSTVVLPDVMTAPVRPDIVNFVHAQISNNSRQPYAVSKKAESWGTGRAVSRIPRVPGGGTHRAGQAAFGNMCRGGRMFAPTKIWRRWHRRVNVNMKRHAIVSAIAATAVPALVMARGHKIENVPEMPLVVSDSAEAVEKTSAAIKVLKQIGAYDDAEKAKNSIGIRPGKGKMRNRRYISRKGPLVVYGTEGSKIVKAFRNLPGVELCHVERLNLLKLAPGGHLGRFVIWTKSAFEKLESIYGSFEAIREEGGYVLPRAKMVNADLARIINSDEIQSVVNPIKKDAKRAVLKKNPLKNLNVMLKLNPYAKTAKRMSLLAEAQRVKAKKEKLAKKRKTVTKEEALAIKAAGKSWYKTMISDSDYTEFDNFTKWLGASQ

SEQ ID NO: 35958 - DNA, 1910 bp, Arabidopsis thaliana; identical to SEQ ID NO: 30306
  misc_feature (1)..(1910): Ceres Seq. ID no. 13509014
  misc_feature (1)..(1910): Ortholog of  Ceres SEQ ID NO 15177320 as cited in SEQ ID NO 52645
  misc_feature (1)..(1910): Ortholog of  Ceres SEQ ID NO 15171359 as cited in SEQ ID NO 57279
  misc_feature (1)..(1910): Ortholog of  Ceres SEQ ID NO 15168502 as cited in SEQ ID NO 60095
  misc_feature (1)..(1910): Ortholog of  Ceres SEQ ID NO 14314084 as cited in SEQ ID NO 63256
  misc_feature (1)..(1910): Ortholog of  Ceres SEQ ID NO 15169466 as cited in SEQ ID NO 66135
  misc_feature (1)..(1910): Ortholog of  Ceres SEQ ID NO 14303091 as cited in SEQ ID NO 66369

SEQ ID NO: 35959 - protein, 510 aa, Arabidopsis thaliana; identical to SEQ ID NO: 30307
  peptide (1)..(510): Ceres Seq. ID no. 13509015

SEQ ID NO: 35960 - protein, 500 aa, Arabidopsis thaliana [sequence omitted]

SEQ ID NO: 35961 - protein, 326 aa, Arabidopsis thaliana; identical to SEQ ID NO: 30309
  peptide (1)..(326): Ceres Seq. ID no. 13509017

SEQ ID NO: 35962 - DNA, 1205 bp, Arabidopsis thaliana
  misc_feature (1)..(1205): Ceres Seq. ID no. 12334500
  misc_feature (1)..(1205): Ortholog of  Ceres SEQ ID NO 15168868 as cited in SEQ ID NO 58303
aacgccagttgccatccaggagaggggagaagaagaatttgtattctcaagttgtcgatatgagagagatgaagtcagaaacacgtttgtgagagaacagcttttagatgtgattgtggatcagattctcaaagacttttcgcgaagagtctctgatccttaaatcgcttctctctcgcttgacctcatttcgtcgtcgaaatcagatccttgtgaaaatgccgaaacaggatatggagaagatggagcttcgtaagaacttccgtaatgtttggcataccgatcttacccacagtatccagaacgatactccttattgttgcttcgcgttgtggtgtgccccttgtgcatcatacttgcttcgcaagcgtgcgctttacgatgatatgtcaaggtacgtctgctgtgccggttacatgccttgtagtggtaggtgtggagaagccaaatgtcctcaactttgtcttgccactgaggtcttctgctgctttgcaaactctgtggcctcaactcgctttcttctgcaagatgagttccaaattcaaacgacaaaatgtgacaactgcatcattggtttcatggtttgcctcagccaagtggcttgcatattctccatagttgcatgtattgtcggtatggatgagctttcagaagcttctcagatactcacatgttgctctgacatggtgtactgcacggtttgcgcatgtatgcagacacaacacaagatggaaatggacaagagggacggtaagttcgggccacagccaatggcagtgcctccggctcagcaaatgtcacggtttgatcaagccaccccacccgcagtcggttatcctccacaacaaggttatccaccttctggttatcctcaacaccctccacaaggttatccaccttctggctatcctcaaaaccctcctccctcagcttattctcaataccctcctggggcttatcctcctcctcccgcttacccaaagtgatcactctttgcctgttttctctcccgattggaaaattttatttcatctttttttaatgctgtcttgttacgggtcaagaattgaacgttcgctgattgttttgaggtcgttgtttgtatgagattttgacctcgcatgttgttgttgttttctgaaacgtccctcttggactaagagatttcatgactttttcctttccttttaaattctctctttttc

SEQ ID NO: 35963 - protein, 255 aa, Arabidopsis thaliana
  peptide (1)..(255): Ceres Seq. ID no. 12334501
MPKQDMEKMELRKNFRNVWHTDLTHSIQNDTPYCCFALWCAPCASYLLRKRALYDDMSRYVCCAGYMPCSGRCGEAKCPQLCLATEVFCCFANSVASTRFLLQDEFQIQTTKCDNCIIGFMVCLSQVACIFSIVACIVGMDELSEASQILTCCSDMVYCTVCACMQTQHKMEMDKRDGKFGPQPMAVPPAQQMSRFDQATPPAVGYPPQQGYPPSGYPQHPPQGYPPSGYPQNPPPSAYSQYPPGAYPPPPAYPK

SEQ ID NO: 35964 - protein, 250 aa, Arabidopsis thaliana
  peptide (1)..(250): Ceres Seq. ID no. 12334502
MEKMELRKNFRNVWHTDLTHSIQNDTPYCCFALWCAPCASYLLRKRALYDDMSRYVCCAGYMPCSGRCGEAKCPQLCLATEVFCCFANSVASTRFLLQDEFQIQTTKCDNCIIGFMVCLSQVACIFSIVACIVGMDELSEASQILTCCSDMVYCTVCACMQTQHKMEMDKRDGKFGPQPMAVPPAQQMSRFDQATPPAVGYPPQQGYPPSGYPQHPPQGYPPSGYPQNPPPSAYSQYPPGAYPPPPAYPK

SEQ ID NO: 35965 - protein, 247 aa, Arabidopsis thaliana
  peptide (1)..(247): Ceres Seq. ID no. 12334503
MELRKNFRNVWHTDLTHSIQNDTPYCCFALWCAPCASYLLRKRALYDDMSRYVCCAGYMPCSGRCGEAKCPQLCLATEVFCCFANSVASTRFLLQDEFQIQTTKCDNCIIGFMVCLSQVACIFSIVACIVGMDELSEASQILTCCSDMVYCTVCACMQTQHKMEMDKRDGKFGPQPMAVPPAQQMSRFDQATPPAVGYPPQQGYPPSGYPQHPPQGYPPSGYPQNPPPSAYSQYPPGAYPPPPAYPK

SEQ ID NO: 35966 - DNA, 1722 bp, Arabidopsis thaliana
  misc_feature (1)..(1722): Ceres Seq. ID no. 12327448
  misc_feature (1)..(1722): Ortholog of  Ceres SEQ ID NO 15179094 as cited in SEQ ID NO 0
agagctggatgttttttcctctataaacctcttttgctttctctcttcgtctctgaccactttggctccggcgttagttttttccctctctgctactgctgcggctccggctcctgctacggtatttgacaagtgtgttgacattctctcataacaattcaaatgggtgactcggaaaacgttcagcaaccttcaaaaaagagaggtgccttgaagcagctgtctcgtgataatccaggtcttgatgatgatgatgattcagctgaacttgagagtggaactttcaagaaggccagtgatgaggttttggctagtagaagaattgtcagagttaagcgcaaagagccatctgctgctccagttgcagcatccaatccatttgctggaattcagttggtccctacgactgcacctgcttcaacccctgtgggaacaaatgcacctctggctgagtcaaaattggctccagctgaagcagtagttgaggacaatcaaaaagcaagtgatattgaggagggcgatgaagttgacagtaagaaggttgatgtcaaagatgctgttggggaagagactgaaaagactaaagataaggatgataatcattgtggaaagagtgctgatgtccaagttgcggctacagaagtagctcagatggtctcatgtgacacaaacgtttgcaacaacgctgttgaaggaacagaccaaactgattttcctcttgagaaggattcaggaggtgatcaggctgagaaaaaagaaaaagaaggcaacggaattgaggaagcagataagaatggcgataatggtgctttcagctcattccaacagcattcaagtaacaaaaacgcattcaccggacttgccagtacagaggcttcagggtcttcgttctcatttggtttggtttctcaggatggttcaactggtactgggtctctctttggctttggccttccaagcagcaatagctcttctatattcggtgcaactggatcgtccattatcaagaagagtgaaggtagtgggtttccgccaaagcaagaggtttccacagaaacaggtgaagagaatgagaaagttgccttctcagctgactcgatcatgttcgaatatcttgatggaggatggaaagagcgtggaaaaggagaactcaaggtaaacgtctccagtaatgatggtaaagcaagattagttatgagagctaaaggaaactacagattgatcttaaacgcgagtctttacccagagatgaaacttgcaaacatggataaaaagggaatcacattcgcttgtgtgaatagtgtaagcgaaggcaaagaaggtctctctacatttgcactgaagttcaaagacccgacaattgttgaagagtttcgtgtagccattgacaaacacaaagatagtaaaccaatggagaaagcagcagaaaaatcagctcttcctctgaagacacctgagaactctccaacagctacagatacttgaagaaaaggtaaaaagaaaaaaagaaaaaacatgtagaaacacttctctcgtctctctcgtctctcttgtcttttgtcttgtcttgttacttccaagtagttgaattttgaggcagaggaaaactaaaatatttggagaagtttgttgttttttttacacagttgttgagactttttggttacatgtttctgtttgtagaaggaaaccatatatgacttaaatctgcatccttgattt

SEQ ID NO: 35967 - protein, 440 aa, Arabidopsis thaliana
  peptide (1)..(440): Ceres Seq. ID no. 12327449
MGDSENVQQPSKKRGALKQLSRDNPGLDDDDDSAELESGTFKKASDEVLASRRIVRVKRKEPSAAPVAASNPFAGIQLVPTTAPASTPVGTNAPLAESKLAPAEAVVEDNQKASDIEEGDEVDSKKVDVKDAVGEETEKTKDKDDNHCGKSADVQVAATEVAQMVSCDTNVCNNAVEGTDQTDFPLEKDSGGDQAEKKEKEGNGIEEADKNGDNGAFSSFQQHSSNKNAFTGLASTEASGSSFSFGLVSQDGSTGTGSLFGFGLPSSNSSSIFGATGSSIIKKSEGSGFPPKQEVSTETGEENEKVAFSADSIMFEYLDGGWKERGKGELKVNVSSNDGKARLVMRAKGNYRLILNASLYPEMKLANMDKKGITFACVNSVSEGKEGLSTFALKFKDPTIVEEFRVAIDKHKDSKPMEKAAEKSALPLKTPENSPTATDT

SEQ ID NO: 35968 - protein, 277 aa, Arabidopsis thaliana
  peptide (1)..(277): Ceres Seq. ID no. 12327450
MVSCDTNVCNNAVEGTDQTDFPLEKDSGGDQAEKKEKEGNGIEEADKNGDNGAFSSFQQHSSNKNAFTGLASTEASGSSFSFGLVSQDGSTGTGSLFGFGLPSSNSSSIFGATGSSIIKKSEGSGFPPKQEVSTETGEENEKVAFSADSIMFEYLDGGWKERGKGELKVNVSSNDGKARLVMRAKGNYRLILNASLYPEMKLANMDKKGITFACVNSVSEGKEGLSTFALKFKDPTIVEEFRVAIDKHKDSKPMEKAAEKSALPLKTPENSPTATDT

SEQ ID NO: 35969 - DNA, 544 bp, Arabidopsis thaliana
  misc_feature (1)..(544): Ceres Seq. ID no. 13497719
  misc_feature (1)..(544): Ortholog of  Ceres SEQ ID NO 14302208 as cited in SEQ ID NO 63753
actatattataatttttgctttataaaaaaaaatatcaaactctatattttctcgatctcttctcttcctcttatttctccaagatcccagacgaaatggctcagaaagtggtgctgaaggttttaaccatgactgatgataagacgaagcagaaagccatagaagctgcagctgatatcttcggagttgattccatagcagcggatatgaaggatcaaaaattgacggtgatcggtttgatggatgcggctgcggtggtgaagaagttgaagaaggttggtaaagtcgatttgatatcggttggaccggcaaaagaagagaagaaagaagagaagaaggaagagaagaaagaggaaaagaaagaggagaagaaggaagagcagaaagaagaagaacctaagaaataagtgactcgaattgctattaaaaccctaaatttttgtcatattgatttcacaattagaacgctgaatcattgaataatttaagatgtaaaattaattgttcaatacagattgtaataaaagcgaagtatttgaaact

SEQ ID NO: 35970 - protein, 103 aa, Arabidopsis thaliana
  peptide (1)..(103): Ceres Seq. ID no. 13497720
MAQKVVLKVLTMTDDKTKQKAIEAAADIFGVDSIAADMKDQKLTVIGLMDAAAVVKKLKKVGKVDLISVGPAKEEKKEEKKEEKKEEKKEEKKEEQKEEEPKK

SEQ ID NO: 35971 - protein, 92 aa, Arabidopsis thaliana
  peptide (1)..(92): Ceres Seq. ID no. 13497721
MTDDKTKQKAIEAAADIFGVDSIAADMKDQKLTVIGLMDAAAVVKKLKKVGKVDLISVGPAKEEKKEEKKEEKKEEKKEEKKEEQKEEEPKK

SEQ ID NO: 35972 - protein, 66 aa, Arabidopsis thaliana
  peptide (1)..(66): Ceres Seq. ID no. 13497722
MKDQKLTVIGLMDAAAVVKKLKKVGKVDLISVGPAKEEKKEEKKEEKKEEKKEEKKEEQKEEEPKK

SEQ ID NO: 35973 - DNA, 543 bp, Arabidopsis thaliana
  misc_feature (1)..(543): Ceres Seq. ID no. 13490582
  misc_feature (1)..(543): Ortholog of  Ceres SEQ ID NO 13582124 as cited in SEQ ID NO 51028
  misc_feature (1)..(543): Ortholog of  Ceres SEQ ID NO 15176134 as cited in SEQ ID NO 0
aaggatttatgatcttcaaattcaagtatgaattataaagtttcgatttttacgaatcattaattttgtattcaggtactgctaaaaaaatggcttctcctattcccgtcggcgttactaaggaaaaggcgtttagtatggcacaaacggagatggagtatcgcgtggaactctttaacaagcttgctcaaacatgctttaataaatgtgtggataaaaggtacaaggaagctgagctaaacatgggtgagaatagttgcatcgaccgttgtgtttccaagtactggcaggtaaatggaatggttggacagcttctaagtgctggcaagcctcccgtgtaatccagtttaaaggcaattattacagaccaaaaagctcatggagggaacacaactctgttctttgtttttctaaagtttaaggcaatcttgtttttattgtcaagaaagttgcatcacatttttggcgctgatttggacaaattatgcaattccatgtgaacccattattattacctaaggggtgaaatgaaataacaaatcg

SEQ ID NO: 35974 - protein, 83 aa, Arabidopsis thaliana
  peptide (1)..(83): Ceres Seq. ID no. 13490583
MASPIPVGVTKEKAFSMAQTEMEYRVELFNKLAQTCFNKCVDKRYKEAELNMGENSCIDRCVSKYWQVNGMVGQLLSAGKPPV

SEQ ID NO: 35975 - protein, 67 aa, Arabidopsis thaliana; identical to SEQ ID NO: 27031
  peptide (1)..(67): Ceres Seq. ID no. 13490584

SEQ ID NO: 35976 - protein, 62 aa, Arabidopsis thaliana
  peptide (1)..(62): Ceres Seq. ID no. 13490585
MEYRVELFNKLAQTCFNKCVDKRYKEAELNMGENSCIDRCVSKYWQVNGMVGQLLSAGKPPV

SEQ ID NO: 35977 - DNA, 1221 bp, Arabidopsis thaliana
  misc_feature (1)..(1221): Ceres Seq. ID no. 12327375
  misc_feature (1)..(1221): Ortholog of  Ceres SEQ ID NO 12616314 as cited in SEQ ID NO 64355
aacatattttgcccactatttgggtaagaagacttggtctctcgctggttgcttcaatccgagaaaatgctgactctactcttcttctctctcggagcgcttcttcttatcgttctgctcttcaaatttgcattcgccgatggagattttaccttgatttcgaagaagcatgtgaagcgtgaggccatacaaggcaaggtcgtctggatcacaggggctagccgtggaattggtgaaattcttgctaaacagtttgcaagtttagatgccaagcttattctctctgctaggaataaagctgaactggatcgggttaagagtgagcttaaaggtaaatttgcaccagaagatgtcaaggttttgcctttagatttagctagcggcgaagagtcactcaaacatgttgtagagcaagcagtgtcgcttttccctggagctggtgttgattatttggttcacaatgctgcctttgagcgtccgaaatccaaggcatcggatgcaagtgaggaaactctcaagactacattcgatgttaatgtctttgggacgatatctctgacaaagttggtagctcctcatatgctaaaacaaggagggggtcattttgttgtgataagcagtgctgcaggaaaggtaccatcacctggacaggctatatattctgcttcaaaacatgctcttcatggctacttccacagcttgcgttctgagttctgtcagaagggaatcaaggttaccgtcgtttgtcctggtccaatagaaacctggaatggtacaggaacatcaacttcggaagacagcaagtctcctgagaaacgtgtgtcatctgaacgatgtgcagagctgactataatcgctgcatctcataacttgaaggaagcttggatttcatatcagccagtactactcgtgatgtatctagtgcagtacatgccttcccttggcttctggctcatggacaaggttggaggaaagcgtgtggaggtcgcggaaaagaaaggcaacacatactcgtgggatttactgttcgggaagaagactaaaacaaactgaagctgattctctagaagatacacatagatgtggttggttgagccttagtccgtagatgtggttggtgtttgtttgctagtttgattgttaaataactaccaaagcgtcgaaaaatgttttgttgccttgtgaggtgctcaataagtaagaaaagatgtgatcttctgc

SEQ ID NO: 35978 - protein, 328 aa, Arabidopsis thaliana
  peptide (1)..(328): Ceres Seq. ID no. 12327376
MLTLLFFSLGALLLIVLLFKFAFADGDFTLISKKHVKREAIQGKVVWITGASRGIGEILAKQFASLDAKLILSARNKAELDRVKSELKGKFAPEDVKVLPLDLASGEESLKHVVEQAVSLFPGAGVDYLVHNAAFERPKSKASDASEETLKTTFDVNVFGTISLTKLVAPHMLKQGGGHFVVISSAAGKVPSPGQAIYSASKHALHGYFHSLRSEFCQKGIKVTVVCPGPIETWNGTGTSTSEDSKSPEKRVSSERCAELTIIAASHNLKEAWISYQPVLLVMYLVQYMPSLGFWLMDKVGGKRVEVAEKKGNTYSWDLLFGKKTKTN

SEQ ID NO: 35979 - DNA, 1121 bp, Arabidopsis thaliana
  misc_feature (1)..(1121): Ceres Seq. ID no. 12324170
  misc_feature (1)..(1121): Ortholog of  Ceres SEQ ID NO 13661768 as cited in SEQ ID NO 61427
  misc_feature (1)..(1121): Ortholog of  Ceres SEQ ID NO 15179176 as cited in SEQ ID NO 0
  misc_feature (1)..(1121): Ortholog of  Ceres SEQ ID NO 15179239 as cited in SEQ ID NO 0
aatcgaattttgttgtgtgtgacctcaaactgacaacttccagtaattgtaatattaccaattttttttataaaaaagatgaacttcactttagagcaatagcaatccctcgagtctcccctatataaagattccaactccttaacgattcatctaatgaaaaaacacacacaccaaaaatatcagatatctcaaacaatgtcttcagtttttggatctgtccatatcttggccatgatagccatacaactcctccttacacacagtgtttcatctctgaaccttaccaatgcgtatctgcaccacaaatgcagcaacactcaaggaaaatataagcaggggagcgcgttcgagaaaaatctcaacttagtcctcagtaccatcacctcgattggaaattttcgtgacggtttccgctacaccgaagaaggtgaggatcccaataacgtctttgtcatgttccagtgtcgcggcgactcctactggtccaagtgccccccttgcattagcaccgccgtctctgggcttcgtaggagatgtccaagaaataagggagcaataatatggtatgaccaatgtcttttaaagatatcttcagttgcctccttcaataagatagattatgagaacgatttctatttgtccaacccaaacaacatgagtgatcgggggttgttcaacaaggagacgtcggctctcctggagaagctggcatataaagcctccgatagaaacaacttggatggtaaacaattggtgttgtacgcagcaggggagaagagaattgggacaaagaaggtgtatgcaatggtgcagtgtacgaaagacttaatatttacaaagtgctttgagtgtttggaagggattttgaggaagtttccacagtgttgtgacggtaaacgaggagggagagttttcggtacgagctgtaactttaggtatgagttatatccttttcttagaaactaacagcaacagtacaatgagagctccatattaaatgaaagggttctagagataaacagtcttataatatacactgtgttgcattttagtacgtgaacttgagcgaataaatgtactttcctctttgttttttgtgaacttgagttattaagagg

SEQ ID NO: 35980 - protein, 270 aa, Arabidopsis thaliana
  peptide (1)..(270): Ceres Seq. ID no. 12324171
MKKHTHQKYQISQTMSSVFGSVHILAMIAIQLLLTHSVSSLNLTNAYLHHKCSNTQGKYKQGSAFEKNLNLVLSTITSIGNFRDGFRYTEEGEDPNNVFVMFQCRGDSYWSKCPPCISTAVSGLRRRCPRNKGAIIWYDQCLLKISSVASFNKIDYENDFYLSNPNNMSDRGLFNKETSALLEKLAYKASDRNNLDGKQLVLYAAGEKRIGTKKVYAMVQCTKDLIFTKCFECLEGILRKFPQCCDGKRGGRVFGTSCNFRYELYPFLRN

SEQ ID NO: 35981 - protein, 256 aa, Arabidopsis thaliana
  peptide (1)..(256): Ceres Seq. ID no. 12324172
MSSVFGSVHILAMIAIQLLLTHSVSSLNLTNAYLHHKCSNTQGKYKQGSAFEKNLNLVLSTITSIGNFRDGFRYTEEGEDPNNVFVMFQCRGDSYWSKCPPCISTAVSGLRRRCPRNKGAIIWYDQCLLKISSVASFNKIDYENDFYLSNPNNMSDRGLFNKETSALLEKLAYKASDRNNLDGKQLVLYAAGEKRIGTKKVYAMVQCTKDLIFTKCFECLEGILRKFPQCCDGKRGGRVFGTSCNFRYELYPFLRN

SEQ ID NO: 35982 - protein, 244 aa, Arabidopsis thaliana
  peptide (1)..(244): Ceres Seq. ID no. 12324173
MIAIQLLLTHSVSSLNLTNAYLHHKCSNTQGKYKQGSAFEKNLNLVLSTITSIGNFRDGFRYTEEGEDPNNVFVMFQCRGDSYWSKCPPCISTAVSGLRRRCPRNKGAIIWYDQCLLKISSVASFNKIDYENDFYLSNPNNMSDRGLFNKETSALLEKLAYKASDRNNLDGKQLVLYAAGEKRIGTKKVYAMVQCTKDLIFTKCFECLEGILRKFPQCCDGKRGGRVFGTSCNFRYELYPFLRN

SEQ ID NO: 35983 - DNA, 1308 bp, Arabidopsis thaliana
  misc_feature (1)..(1308): Ceres Seq. ID no. 12335159
  misc_feature (1)..(1308): Ortholog of  Ceres SEQ ID NO 13638540 as cited in SEQ ID NO 51531
  misc_feature (1)..(1308): Ortholog of  Ceres SEQ ID NO 13595337 as cited in SEQ ID NO 56160
  misc_feature (1)..(1308): Ortholog of  Ceres SEQ ID NO 12615230 as cited in SEQ ID NO 62513
atatcaatcaatcgaaaaacctttctctcttctttcggagccgtcgcttgtgaaactttccggcgatttaacagagtcatgatggaaatacgaactccgaagactggcaaagccaagcgtgttctcgaaagccgagctcctaagttggttgaaactgggaagaagacgttgatacttcatggaacaaagacgagtgctacacttagctctgtaatgacggaactctaccgtttgaagaagggaggtgccatcagatattcaaggaggaatgagaatattaggcctttcgagagtggaggtgaaacttcattagagttcttctctcagaaaacagattgtagcatttttgtgtatggttctcacacgaagaaacgacctgacaatcttgtacttgggagaatgtatgatcaccaagtctatgatcttatagaagttgggattgagaactttaaatccttgcgggcgttttcgtatgacaagaaattcgcacctcatgaaggaacaaagcctttcatttgctttattggtgaaggttttgagaatgtatcagagcttaagcatctcaaagaagtcctcactgatctttttcgtggcgaggttgtggataatctaaatcttactggtttagaccgcgcttacgtatgttcagctatatccccaacaaaggttttccttactcattgcgcattgaagcttaaaaagtcaggatccattgttccgagaatggagcttgttgaagtcggtccatccatggacttggttatcaggcgtaatcgtcttcctaacgatagcttaatgaaagaagcaatgagaacatccaaggataagcctaagaagaaggagaaaaacgttgatcaagatgcagtactagggaagactgggaagatttatatgcctgatcagaagctgaaagaaatgaaactgttcgataaatctaagggatcgaagagagagcggaaagacgctaagcttaagcataaggaagagactgttgccaaaaagatgaaggtgtcttctgagtgactcaacagaccactcttggctctgcatcaacagctttcaatatgtggaagatgaaatgattttgtagtgtaatgagcttgacttttatttttccattagaatctataactgaatgttttctatacgctaatattttattaaggtgattttgttttgttaaaactctgcagcaacagaaactggatatgataaaaacacatttttgtctatctctgtttcctactgcagtacatgcgtaagacagcaacttttttcccgtgttgaatgagaccacaatttttgccc

SEQ ID NO: 35984 - protein, 340 aa, Arabidopsis thaliana
  peptide (1)..(340): Ceres Seq. ID no. 12335160
ISINRKTFLSSFGAVACETFRRFNRVMMEIRTPKTGKAKRVLESRAPKLVETGKKTLILHGTKTSATLSSVMTELYRLKKGGAIRYSRRNENIRPFESGGETSLEFFSQKTDCSIFVYGSHTKKRPDNLVLGRMYDHQVYDLIEVGIENFKSLRAFSYDKKFAPHEGTKPFICFIGEGFENVSELKHLKEVLTDLFRGEVVDNLNLTGLDRAYVCSAISPTKVFLTHCALKLKKSGSIVPRMELVEVGPSMDLVIRRNRLPNDSLMKEAMRTSKDKPKKKEKNVDQDAVLGKTGKIYMPDQKLKEMKLFDKSKGSKRERKDAKLKHKEETVAKKMKVSSE

SEQ ID NO: 35985 - protein, 314 aa, Arabidopsis thaliana
  peptide (1)..(314): Ceres Seq. ID no. 12335161
MMEIRTPKTGKAKRVLESRAPKLVETGKKTLILHGTKTSATLSSVMTELYRLKKGGAIRYSRRNENIRPFESGGETSLEFFSQKTDCSIFVYGSHTKKRPDNLVLGRMYDHQVYDLIEVGIENFKSLRAFSYDKKFAPHEGTKPFICFIGEGFENVSELKHLKEVLTDLFRGEVVDNLNLTGLDRAYVCSAISPTKVFLTHCALKLKKSGSIVPRMELVEVGPSMDLVIRRNRLPNDSLMKEAMRTSKDKPKKKEKNVDQDAVLGKTGKIYMPDQKLKEMKLFDKSKGSKRERKDAKLKHKEETVAKKMKVSSE

SEQ ID NO: 35986 - protein, 313 aa, Arabidopsis thaliana
  peptide (1)..(313): Ceres Seq. ID no. 12335162
MEIRTPKTGKAKRVLESRAPKLVETGKKTLILHGTKTSATLSSVMTELYRLKKGGAIRYSRRNENIRPFESGGETSLEFFSQKTDCSIFVYGSHTKKRPDNLVLGRMYDHQVYDLIEVGIENFKSLRAFSYDKKFAPHEGTKPFICFIGEGFENVSELKHLKEVLTDLFRGEVVDNLNLTGLDRAYVCSAISPTKVFLTHCALKLKKSGSIVPRMELVEVGPSMDLVIRRNRLPNDSLMKEAMRTSKDKPKKKEKNVDQDAVLGKTGKIYMPDQKLKEMKLFDKSKGSKRERKDAKLKHKEETVAKKMKVSSE

SEQ ID NO: 35987 - DNA, 1585 bp, Arabidopsis thaliana
  misc_feature (1)..(1585): Ceres Seq. ID no. 12327645
  misc_feature (1)..(1585): Ortholog of  Ceres SEQ ID NO 13596244 as cited in SEQ ID NO 69307
accaaaatcagattagagtttcagagacatctctcgaatacgatcatcagacaagacttaacctccatttgcacgtcttcctgctcacgacagacaaatcatgaacgaatccgacagctgaacgaattgcgtgtctgagaagatccaaatcctaattttctaccttttttttttgggaactaaggttagaatttggagcttctcgtacgtttttgcttgcctacgtttccggacaaaaaactatttgcatataaacagaacaggttctgttcatcaagacactgaagcctgatggggatggaggaagggattaaagataatgctgcatcagctcccaattcaagacctacaaaccaacttaaagctcttttaccgatgcgggtgcttcaagttttcttgttgttctttgttttggttcttggaatctcagtcattagtatgcacatgatcaagtacttaaagattcaaactttagctccatcgacattgatctctacttatgatgagagaattacgttagagagccttatcaagcctccattgaatggttggcattccatgaatgacagtgagcttctttggcgtgcttcgatggagcctcggatacttgactatccatttaaaagagttcctaaaatggcattcatgtttctcaccaaaggacctttgccatttgctccactttgggaaaggtttttcaaagggcatgagggcttttactcaatctatgttcatactttgccaaattatagatcagatttcccaagctcatctgtgttttacagaagacagatcccaagtcagcatgtagcttggggagagatgagtatgtgtgatgctgaaaggaggcttttggctaacgcgttgctcgatatctctaacgaatggtttgttttactatctgaagcgtgtattcctcttcgcggtttcaactttgtctaccgttatgtctctagatcaagatatagtttcatgggttctgttgacgaggacgggccttacgggagaggcagatatagctatgcaatgggaccagaagtaagtctaaacgagtggagaaaagggtctcagtggtttgaaataaacagagcacttgctgttgatattgttgaagacatggtttactataacaaattcaaagagttttgtagacctccttgttatgtagatgaacattacttcccaacaatgctctctattggatatccggattttctcgctaatcggacattgacttggacagattggtcaaggggtggtgctcatccagctacttttggcaaggctgatataacagagaagttcatcaagaagctgtcaagaggtaaagcttgcttctacaatgatcagccatctcaagtttgttatctttttgcaagaaagtttgctccaagcgcattgaagcctttacttaaacttgcaccaaaggttcttgggttctaattaatggatctcttgtcttctttttgttcttggtttttgttctgaaatgttcttgaacttgagtgtagcttcgtatagcatggacacaactctgatccttattgtctccttccacattgataatatagatacttcaatggcc

SEQ ID NO: 35988 - protein, 383 aa, Arabidopsis thaliana
  peptide (1)..(383): Ceres Seq. ID no. 12327646
MGMEEGIKDNAASAPNSRPTNQLKALLPMRVLQVFLLFFVLVLGISVISMHMIKYLKIQTLAPSTLISTYDERITLESLIKPPLNGWHSMNDSELLWRASMEPRILDYPFKRVPKMAFMFLTKGPLPFAPLWERFFKGHEGFYSIYVHTLPNYRSDFPSSSVFYRRQIPSQHVAWGEMSMCDAERRLLANALLDISNEWFVLLSEACIPLRGFNFVYRYVSRSRYSFMGSVDEDGPYGRGRYSYAMGPEVSLNEWRKGSQWFEINRALAVDIVEDMVYYNKFKEFCRPPCYVDEHYFPTMLSIGYPDFLANRTLTWTDWSRGGAHPATFGKADITEKFIKKLSRGKACFYNDQPSQVCYLFARKFAPSALKPLLKLAPKVLGF

SEQ ID NO: 35989 - protein, 381 aa, Arabidopsis thaliana
  peptide (1)..(381): Ceres Seq. ID no. 12327647
MEEGIKDNAASAPNSRPTNQLKALLPMRVLQVFLLFFVLVLGISVISMHMIKYLKIQTLAPSTLISTYDERITLESLIKPPLNGWHSMNDSELLWRASMEPRILDYPFKRVPKMAFMFLTKGPLPFAPLWERFFKGHEGFYSIYVHTLPNYRSDFPSSSVFYRRQIPSQHVAWGEMSMCDAERRLLANALLDISNEWFVLLSEACIPLRGFNFVYRYVSRSRYSFMGSVDEDGPYGRGRYSYAMGPEVSLNEWRKGSQWFEINRALAVDIVEDMVYYNKFKEFCRPPCYVDEHYFPTMLSIGYPDFLANRTLTWTDWSRGGAHPATFGKADITEKFIKKLSRGKACFYNDQPSQVCYLFARKFAPSALKPLLKLAPKVLGF

SEQ ID NO: 35990 - protein, 355 aa, Arabidopsis thaliana
  peptide (1)..(355): Ceres Seq. ID no. 12327648
MRVLQVFLLFFVLVLGISVISMHMIKYLKIQTLAPSTLISTYDERITLESLIKPPLNGWHSMNDSELLWRASMEPRILDYPFKRVPKMAFMFLTKGPLPFAPLWERFFKGHEGFYSIYVHTLPNYRSDFPSSSVFYRRQIPSQHVAWGEMSMCDAERRLLANALLDISNEWFVLLSEACIPLRGFNFVYRYVSRSRYSFMGSVDEDGPYGRGRYSYAMGPEVSLNEWRKGSQWFEINRALAVDIVEDMVYYNKFKEFCRPPCYVDEHYFPTMLSIGYPDFLANRTLTWTDWSRGGAHPATFGKADITEKFIKKLSRGKACFYNDQPSQVCYLFARKFAPSALKPLLKLAPKVLGF

SEQ ID NO: 35991 - DNA, 1420 bp, Arabidopsis thaliana
  misc_feature (1)..(1420): Ceres Seq. ID no. 12324182
  misc_feature (1)..(1420): Ortholog of  Ceres SEQ ID NO 13600581 as cited in SEQ ID NO 0
accagagccaccttcattcacttcacaaaccgctcggcgacaaagacgaagaagccgaggaagcaccgatacgacgattgagacttagttttgctcagattcatttaaccaccggcgccaagtgacgacgacgacggagggagcagattcgaattgtgtgaagacagcaatggagtctactgagtcatatgcggcaggttcaccggaagagctggctaagagatcccctgaaccgcatgattcttccgaagctgattctgctgagaagccaacacacattcggtttcttgtatccaatgcggcagctggttccgtcattgggaaaggtggctcgaccatcactgaatttcaggcaaagtctggggcaaggattcagctttcacgtaatcaagagtttttcccggggacgactgacagaattattatgatatcgggatcaatcaaagaagttgtcaatggactggaacttatccttgataaattgcacagtgagcttcatgctgaagatggtaatgaggttgagcctaggagaagaattagacttgtggttcctaacagttcttgtggaggtataatcggaaaaggaggggccaccatcaagtcattcattgaggaatctaaagctggtattaagatatcccctctggataataccttttatgggttgagcgataggttagtgacattatctgggaccttcgaggagcagatgcgggcaatcgatttgattttggctaagcttactgaggacgatcattactcccagaatgtgcattccccatattcatatgcagcgggatacaattcggttaactacgcacccaacggttctggaggcaagtatcaaaaccacaaggaagaagctagtaccacggtgacaattggtgttgcggatgagcatataggattggtgcttggacgtggaggaagaaacatcatggaaatcactcagatgactggtgcccgaattaaaatatcagaccgaggtgattttatgtctggaaccactgataggaaagtgagtatcacagggccacagagagcaatccaacaagctgagacaatgataaaacagaaagttgattcagccacagagagaaccaccgattgaaaccgttaagagaatccatctcggttcctatctttggtctgttgacttcatttgtggaggcttaagctatcggatggggatcattaatcatctttgagtgaggcagagatttctctctaggagctctctttcgttttatttatatgtcgacattatataatgtgtttttctctgggagagaagcagatttggagttagagaagtactattttcatttgttcttttaataactttgttgcaatttgttgaagttttgtttcccttgagttctttctgttgtaacaatttacaataaccagccattacatt

SEQ ID NO: 35992 - protein, 313 aa, Arabidopsis thaliana
  peptide (1)..(313): Ceres Seq. ID no. 12324183
MESTESYAAGSPEELAKRSPEPHDSSEADSAEKPTHIRFLVSNAAAGSVIGKGGSTITEFQAKSGARIQLSRNQEFFPGTTDRIIMISGSIKEVVNGLELILDKLHSELHAEDGNEVEPRRRIRLVVPNSSCGGIIGKGGATIKSFIEESKAGIKISPLDNTFYGLSDRLVTLSGTFEEQMRAIDLILAKLTEDDHYSQNVHSPYSYAAGYNSVNYAPNGSGGKYQNHKEEASTTVTIGVADEHIGLVLGRGGRNIMEITQMTGARIKISDRGDFMSGTTDRKVSITGPQRAIQQAETMIKQKVDSATERTTD

SEQ ID NO: 35993 - protein, 228 aa, Arabidopsis thaliana
  peptide (1)..(228): Ceres Seq. ID no. 12324184
MISGSIKEVVNGLELILDKLHSELHAEDGNEVEPRRRIRLVVPNSSCGGIIGKGGATIKSFIEESKAGIKISPLDNTFYGLSDRLVTLSGTFEEQMRAIDLILAKLTEDDHYSQNVHSPYSYAAGYNSVNYAPNGSGGKYQNHKEEASTTVTIGVADEHIGLVLGRGGRNIMEITQMTGARIKISDRGDFMSGTTDRKVSITGPQRAIQQAETMIKQKVDSATERTTD

SEQ ID NO: 35994 - DNA, 2020 bp, Arabidopsis thaliana
  misc_feature (1)..(2020): Ceres Seq. ID no. 13497076
  misc_feature (1)..(2020): Ortholog of  Ceres SEQ ID NO 12626078 as cited in SEQ ID NO 69113
acactattcgtttacactaaccacttccttatccacaccaatccagaacgttcctcaaaaagctccctccttttctctcaaaatggcgtctgcaaacgctctctcttccgcctccgtcctctgttcttcccgtcagagtaagttgggaggaggaaatcagcagcaaggtcagagagttagctacaacaagaggacaatcagacgttttagtgttagagctaatgtaaaggaaatagcttttgaccagcactctagagctgctctacaagctggtattgataagcttgctgattgtgttggtctcactcttggccctagagggaggaatgttgtgttggatgaatttggaagtcctaaggttgtgaatgatggagtcaccattgctagagctattgagttacctaatgccatggaaaatgctggtgcagcgcttattcgtgaggttgcgagtaagactaatgactctgctggtgatgggacaaccactgcgtctatccttgctcgggagataatcaaacatggattgttgagcgtcacttctggtgcgaatcccgtttcactcaagaggggaattgataagactgttcaaggtctgatcgaagagcttcagaagaaagctaggcccgtgaaaggtcgtgatgacatcagagctgtggcttctatctctgctggaaatgatgaccttatagggtcaatgattgctgatgccatcgacaaagttggacctgatggtgttttgtccattgaatcttcatcttcttttgagaccacggtcgaagttgaagaagggatggagattgacagaggttacatctcgcctcagtttgttacaaaccctgagaaactactagctgagtttgagaatgctagggtattgatcactgatcagaagatcactgcgatcaaagacatcatccctattttggagaagaccactcagcttcgtgctccgttgttgattattgcagaggatgttactggtgaagccttagctacccttgtcgtgaacaagcttcgtggtgtcctcaatgttgttgccgttaaagcgccaggatttggagaaagaagaaaagccatgcttcaagatattgcaatcttgacaggagctgagtacctagccatggacatgagcttactggttgaaaacgcaaccatagatcaattgggtattgcccgaaaagtcacgattagcaaagattcgactaccctcattgcagatgcagcttccaaggacgaattacaagctcggattgctcagctgaagaaagaactattcgagactgattctgtgtatgactcagagaagctcgctgagagaattgcgaagctatctggaggtgttgctgtcattaaagtcggagcagcaactgaaactgagcttgaggaccgtaagcttcgtatcgaggatgcaaagaacgcaacatttgctgctatcgaggaaggcatagttccaggtggtggtgctgctttggtgcatctctccactgttattcccgccattaaggagacttttgaggatgctgatgaacgtttgggagctgacatagtacaaaaggcattgctgtcaccagctgctcttattgctcagaacgctggagttgaaggagaagttgttgtggaaaagattatgttcagcgattgggagaatgggtacaacgcaatgactgatacatatgagaatctgttcgaagctggagtgattgatccggctaaagtgacaagatgtgcgctacagaacgctgcttccgtagcaggaatggtactgaccactcaggccattgttgttgacaaaccgaaacccaaggctcctgctgctgctgctcctgagggtctcatggtgtaatcaaaacacaacatcttatcatcacaatggcatctttgtctttttgcacatttgtcatccccatttatctgcaatgtttttcttttttgggggaatatgagtagtttgttaacagtatcgagaaataattatcatcttttttgtccaatggaaattgcagaaaatggttatgtatga

SEQ ID NO: 35995 - protein, 613 aa, Arabidopsis thaliana
  peptide (1)..(613): Ceres Seq. ID no. 13497077
HYSFTLTTSLSTPIQNVPQKAPSFSLKMASANALSSASVLCSSRQSKLGGGNQQQGQRVSYNKRTIRRFSVRANVKEIAFDQHSRAALQAGIDKLADCVGLTLGPRGRNVVLDEFGSPKVVNDGVTIARAIELPNAMENAGAALIREVASKTNDSAGDGTTTASILAREIIKHGLLSVTSGANPVSLKRGIDKTVQGLIEELQKKARPVKGRDDIRAVASISAGNDDLIGSMIADAIDKVGPDGVLSIESSSSFETTVEVEEGMEIDRGYISPQFVTNPEKLLAEFENARVLITDQKITAIKDIIPILEKTTQLRAPLLIIAEDVTGEALATLVVNKLRGVLNVVAVKAPGFGERRKAMLQDIAILTGAEYLAMDMSLLVENATIDQLGIARKVTISKDSTTLIADAASKDELQARIAQLKKELFETDSVYDSEKLAERIAKLSGGVAVIKVGAATETELEDRKLRIEDAKNATFAAIEEGIVPGGGAALVHLSTVIPAIKETFEDADERLGADIVQKALLSPAALIAQNAGVEGEVVVEKIMFSDWENGYNAMTDTYENLFEAGVIDPAKVTRCALQNAASVAGMVLTTQAIVVDKPKPKAPAAAAPEGLMV

SEQ ID NO: 35996 - protein, 586 aa, Arabidopsis thaliana; identical to SEQ ID NO: 22383
  peptide (1)..(586): Ceres Seq. ID no. 13497078

SEQ ID NO: 35997 - protein, 477 aa, Arabidopsis thaliana; identical to SEQ ID NO: 22384
  peptide (1)..(477): Ceres Seq. ID no. 13497079

SEQ ID NO: 35998 - DNA, 1416 bp, Arabidopsis thaliana
  misc_feature (1)..(1416): Ceres Seq. ID no. 12602627
  misc_feature (1)..(1416): Ortholog of  Ceres SEQ ID NO 13582332 as cited in SEQ ID NO 59890
attttcaaatctttaaaagttgagaccagaagaagaagaaaaaaaatcatggagatgaccgaagcttccaaacagacaacagcagaaggatcagcaaatccagaaccagaccaaatcttgagtccgagaagatcgttggagctaaaacaaaagaaatggtggatctctgtttctttatgtattttcttagtcttgctcggagattctctagtcatgcttctcttgaacttcttctatgttcaagacaatcgagaagatagtgaccaagatctacaataccgaggaacatggttgcaagctctggtccaaaacgctgcgtttccactactcattcctctgtttttcattttcccttcaccaaaacaaaaccaagaaaccaccaatactcgtttcctctcttttcgtctcatcttactttacatctctcttggtgttcttgttgctgctcacagcaaattgtttgcacttgggaaattatacgcaaactttggcgtcttcacgctgatttccgcgactcagttgatatttaccgctattttcgcagccattattaaccgttttaagttcaccagatggattatcttatcgataatcggcagcattttgatttatgttttcggtagtcctgaatttggaggagagcctgatgaaaacgaagaattctacagcatccaagcttggttaactttcgctgcttcagttgctttcgcattatctctctgtttattccaactttgtttcgagaaagtgttggtaaagacaaagagatatggtaacaagaaagtgtttagaatggtcatagagatgcaaatttgtgtctcttttgtcgcaacggttgtttgtctcgtgggtttgtttgcgagtggcgagaataaggaactgcaaggcgatagccacaggtttaagaaaggagaaacgtattacgttttgagtttgatcgggttggcattgtcgtggcaggtttgggcggtcgggctgatgggtttggtgctttatgtttcgggtgtgtttggcgatgttgttcatatgtgtacttcaccacttgtggctttgtttgttgtgttggcatttgatttcatggatgatgagtttagttggcctagaattggtactttgatagcaacagttgtggctttaggatcttacttctacactctgcataagagaaacaagaagaagatggtggagctttaccaaacagagaacaatattgacgtttagtctctcatgtcaaatgtttgtttctgtttcaaaatatgttgttgttcttctgaatgttgtaagtcaatgtctaaaacatgttgtatagatctgaaaactatggaacatatttgttaattattttgatttgattttttttttgtatttatctcttacaatattttgttaatgaggatttgtcactacaatttatct

SEQ ID NO: 35999 - protein, 406 aa, Arabidopsis thaliana
  peptide (1)..(406): Ceres Seq. ID no. 12602628
IFKSLKVETRRRRKKIMEMTEASKQTTAEGSANPEPDQILSPRRSLELKQKKWWISVSLCIFLVLLGDSLVMLLLNFFYVQDNREDSDQDLQYRGTWLQALVQNAAFPLLIPLFFIFPSPKQNQETTNTRFLSFRLILLYISLGVLVAAHSKLFALGKLYANFGVFTLISATQLIFTAIFAAIINRFKFTRWIILSIIGSILIYVFGSPEFGGEPDENEEFYSIQAWLTFAASVAFALSLCLFQLCFEKVLVKTKRYGNKKVFRMVIEMQICVSFVATVVCLVGLFASGENKELQGDSHRFKKGETYYVLSLIGLALSWQVWAVGLMGLVLYVSGVFGDVVHMCTSPLVALFVVLAFDFMDDEFSWPRIGTLIATVVALGSYFYTLHKRNKKKMVELYQTENNIDV

SEQ ID NO: 36000 - protein, 390 aa, Arabidopsis thaliana
  peptide (1)..(390): Ceres Seq. ID no. 12602629
MEMTEASKQTTAEGSANPEPDQILSPRRSLELKQKKWWISVSLCIFLVLLGDSLVMLLLNFFYVQDNREDSDQDLQYRGTWLQALVQNAAFPLLIPLFFIFPSPKQNQETTNTRFLSFRLILLYISLGVLVAAHSKLFALGKLYANFGVFTLISATQLIFTAIFAAIINRFKFTRWIILSIIGSILIYVFGSPEFGGEPDENEEFYSIQAWLTFAASVAFALSLCLFQLCFEKVLVKTKRYGNKKVFRMVIEMQICVSFVATVVCLVGLFASGENKELQGDSHRFKKGETYYVLSLIGLALSWQVWAVGLMGLVLYVSGVFGDVVHMCTSPLVALFVVLAFDFMDDEFSWPRIGTLIATVVALGSYFYTLHKRNKKKMVELYQTENNIDV

SEQ ID NO: 36001 - protein, 388 aa, Arabidopsis thaliana
  peptide (1)..(388): Ceres Seq. ID no. 12602630
MTEASKQTTAEGSANPEPDQILSPRRSLELKQKKWWISVSLCIFLVLLGDSLVMLLLNFFYVQDNREDSDQDLQYRGTWLQALVQNAAFPLLIPLFFIFPSPKQNQETTNTRFLSFRLILLYISLGVLVAAHSKLFALGKLYANFGVFTLISATQLIFTAIFAAIINRFKFTRWIILSIIGSILIYVFGSPEFGGEPDENEEFYSIQAWLTFAASVAFALSLCLFQLCFEKVLVKTKRYGNKKVFRMVIEMQICVSFVATVVCLVGLFASGENKELQGDSHRFKKGETYYVLSLIGLALSWQVWAVGLMGLVLYVSGVFGDVVHMCTSPLVALFVVLAFDFMDDEFSWPRIGTLIATVVALGSYFYTLHKRNKKKMVELYQTENNIDV

SEQ ID NO: 36002 - DNA, 1481 bp, Arabidopsis thaliana
  misc_feature (1)..(1481): Ceres Seq. ID no. 12357762
  misc_feature (1)..(1481): Ortholog of  Ceres SEQ ID NO 14308851 as cited in SEQ ID NO 55618
gattacttgtttctttgatttctccttccatagaaccgaattgttttcagtctgagatttctcctgccgagagaacgattttaatctattttcctcgagagtagaaaatggctgatggtgaagatattcaaccccttgtctgtgacaatggaactggaatggttaaggctggttttgctggggatgatgcaccgagggctgtgtttccaagtattgttggccgtcctcgccacactggagtgatggttggaatgggacagaaggatgcatatgttggcgatgaagctcaatccaagcgtggtattcttacccttaaataccctattgagcacggtattgtcaacaattgggatgatatggaaaaaatctggcatcatactttctacaatgagctccgtgttgctcccgaggagcatcctattctgctcactgaagcgcctcttaacccaaaggctaaccgtgagaagatgactcagatcatgtttgaaacctttaacgctccggctatgtatgtcgccattcaagctgtcctgtcgctttatgctagtggtcgtactactggtattgtgcttgactctggagatggtgtgagtcacacggtccctatctatgagggttacgctctcccgcatgcaatcctacgtcttgatcttgcaggtcgtgacctcacagatgctctgatgaagatcctcactgagcgtggttactctttcaccacaacagctgagcgtgaaattgtcagagacatcaaggagaagctttgctacattgctcttgactatgagcaggagcttgagacggctaaaaccagctcttctgtagagaagaactatgagttacctgatgggcaagtgatcaccattggatctgagcgtttccgttgccctgaggttctttaccagccatctatgatcggtatggagaatgctggtatccatgaaaccacctacaactccataatgaaatgtgatgttgacatcagaaaggacttgtatggtaacattgtgctcagtggtggaacaactatgttccctggaattgctgacagaatgagcaaagagatcactgctttggcaccgagcagcatgaagatcaaagtcgttgcacctcctgagaggaaatactctgtctggattggaggatccatcttggcctccctcagtaccttccagcagatgtggatcgcaaaggcagaatatgatgagtcaggcccgtcgattgttcaccggaaatgcttttgagcttgaagttaagtctgcttccggagaagccctgggggttttccagtttgtccttactgggtttttatcttcgttctctgctcttctttgtttttcttcttcaatattttcagattctggcctaagacattttgaagaatttacattatctgtttgtagtgttaaactgttgtcttgttccttttatttattttggatgacacaactgtgtttgagtgaataagaactcctgatttttcc

SEQ ID NO: 36003 - protein, 377 aa, Arabidopsis thaliana
  peptide (1)..(377): Ceres Seq. ID no. 12357763
MADGEDIQPLVCDNGTGMVKAGFAGDDAPRAVFPSIVGRPRHTGVMVGMGQKDAYVGDEAQSKRGILTLKYPIEHGIVNNWDDMEKIWHHTFYNELRVAPEEHPILLTEAPLNPKANREKMTQIMFETFNAPAMYVAIQAVLSLYASGRTTGIVLDSGDGVSHTVPIYEGYALPHAILRLDLAGRDLTDALMKILTERGYSFTTTAEREIVRDIKEKLCYIALDYEQELETAKTSSSVEKNYELPDGQVITIGSERFRCPEVLYQPSMIGMENAGIHETTYNSIMKCDVDIRKDLYGNIVLSGGTTMFPGIADRMSKEITALAPSSMKIKVVAPPERKYSVWIGGSILASLSTFQQMWIAKAEYDESGPSIVHRKCF

SEQ ID NO: 36004 - protein, 360 aa, Arabidopsis thaliana
  peptide (1)..(360): Ceres Seq. ID no. 12357764
MVKAGFAGDDAPRAVFPSIVGRPRHTGVMVGMGQKDAYVGDEAQSKRGILTLKYPIEHGIVNNWDDMEKIWHHTFYNELRVAPEEHPILLTEAPLNPKANREKMTQIMFETFNAPAMYVAIQAVLSLYASGRTTGIVLDSGDGVSHTVPIYEGYALPHAILRLDLAGRDLTDALMKILTERGYSFTTTAEREIVRDIKEKLCYIALDYEQELETAKTSSSVEKNYELPDGQVITIGSERFRCPEVLYQPSMIGMENAGIHETTYNSIMKCDVDIRKDLYGNIVLSGGTTMFPGIADRMSKEITALAPSSMKIKVVAPPERKYSVWIGGSILASLSTFQQMWIAKAEYDESGPSIVHRKCF

SEQ ID NO: 36005 - protein, 332 aa, Arabidopsis thaliana
  peptide (1)..(332): Ceres Seq. ID no. 12357765
MVGMGQKDAYVGDEAQSKRGILTLKYPIEHGIVNNWDDMEKIWHHTFYNELRVAPEEHPILLTEAPLNPKANREKMTQIMFETFNAPAMYVAIQAVLSLYASGRTTGIVLDSGDGVSHTVPIYEGYALPHAILRLDLAGRDLTDALMKILTERGYSFTTTAEREIVRDIKEKLCYIALDYEQELETAKTSSSVEKNYELPDGQVITIGSERFRCPEVLYQPSMIGMENAGIHETTYNSIMKCDVDIRKDLYGNIVLSGGTTMFPGIADRMSKEITALAPSSMKIKVVAPPERKYSVWIGGSILASLSTFQQMWIAKAEYDESGPSIVHRKCF

SEQ ID NO: 36006 - DNA, 1291 bp, Arabidopsis thaliana
  misc_feature (1)..(1291): Ceres Seq. ID no. 12334289
  misc_feature (1)..(1291): Ortholog of  Ceres SEQ ID NO 13582350 as cited in SEQ ID NO 56734
  misc_feature (1)..(1291): Ortholog of  Ceres SEQ ID NO 13598527 as cited in SEQ ID NO 64914
caaaattcggtcaaaaacaaaagaatctaaaaatagcaagttcatcgtttgatattaaagtttaacaagaagaatcttgaaagccgtcacgtacagatctgaagaatattctcaaggatagagagagaaatggcgacggacttcaagtctttaccagtcatcgacatctctcgtttactcctcaagtgtgatgatcccgacatggcagaggatgtcggtgtggccgaggttgtccagcaactggataaagcttgtcgggacgccggattcttctacgtgataggccatggaatatcagaggatgttattaacaaggttagagagatcactcgtgagttctttaagcttccttatgaagagaaacttaaaatcaaaatgactccagctgctggatacagaggatatcagagaattggagaaaatgtaaccaaaggaataccagatattcatgaagccattgattgttacaaagagattaagcaggggaagtatggggatataggcaaagttatggaagggccaaaccagtggccagagaatcctcaagagtttaaagagttgatggaggagtatattaagctatgtacagatctttctagaaagattttgagaggaatctccttagctcttgctggatcaccttatgagttcgagggaaagatggctggtgatcctttttgggtgatgcgtcttattggttatccaggtgctgagttcacaaatggccaacctgaaaatgatattggatgtggagctcacactgactatggcttgttaactcttgtgaatcaagatgatgacaaaactgctctgcaggtgagaaacttgggcggtgagtggatatcagccattccaatccctggatcgtttgtttgcaacatcggcgacatgttaaagatactttcaaacggagtatacgaatccacacttcatagagtgatcaataactctcctcaataccgtgtttgtgtcgcattcttctatgagactaacttcgacgcggtggtggagccattggatatatgtaaacagaagtaccctggaggaagaggaggatgccaagttttcaaaagagctgtgtatggagagcatctcgtaagtaaagtccagaccaactttgctatgtaatggaaggcagatctctctctccttctttgtacacaatacaccaacttcatcttaaagtttgatttgtaataatagtaaggtacttctttacttctgtgttatcaatggatacacatgtatttgcttcaaaaaataaaatgaaaaaggtatttagtttgttggc

SEQ ID NO: 36007 - protein, 332 aa, Arabidopsis thaliana
  peptide (1)..(332): Ceres Seq. ID no. 12334290
MATDFKSLPVIDISRLLLKCDDPDMAEDVGVAEVVQQLDKACRDAGFFYVIGHGISEDVINKVREITREFFKLPYEEKLKIKMTPAAGYRGYQRIGENVTKGIPDIHEAIDCYKEIKQGKYGDIGKVMEGPNQWPENPQEFKELMEEYIKLCTDLSRKILRGISLALAGSPYEFEGKMAGDPFWVMRLIGYPGAEFTNGQPENDIGCGAHTDYGLLTLVNQDDDKTALQVRNLGGEWISAIPIPGSFVCNIGDMLKILSNGVYESTLHRVINNSPQYRVCVAFFYETNFDAVVEPLDICKQKYPGGRGGCQVFKRAVYGEHLVSKVQTNFAM

SEQ ID NO: 36008 - protein, 308 aa, Arabidopsis thaliana
  peptide (1)..(308): Ceres Seq. ID no. 12334291
MAEDVGVAEVVQQLDKACRDAGFFYVIGHGISEDVINKVREITREFFKLPYEEKLKIKMTPAAGYRGYQRIGENVTKGIPDIHEAIDCYKEIKQGKYGDIGKVMEGPNQWPENPQEFKELMEEYIKLCTDLSRKILRGISLALAGSPYEFEGKMAGDPFWVMRLIGYPGAEFTNGQPENDIGCGAHTDYGLLTLVNQDDDKTALQVRNLGGEWISAIPIPGSFVCNIGDMLKILSNGVYESTLHRVINNSPQYRVCVAFFYETNFDAVVEPLDICKQKYPGGRGGCQVFKRAVYGEHLVSKVQTNFAM

SEQ ID NO: 36009 - protein, 250 aa, Arabidopsis thaliana
  peptide (1)..(250): Ceres Seq. ID no. 12334292
MTPAAGYRGYQRIGENVTKGIPDIHEAIDCYKEIKQGKYGDIGKVMEGPNQWPENPQEFKELMEEYIKLCTDLSRKILRGISLALAGSPYEFEGKMAGDPFWVMRLIGYPGAEFTNGQPENDIGCGAHTDYGLLTLVNQDDDKTALQVRNLGGEWISAIPIPGSFVCNIGDMLKILSNGVYESTLHRVINNSPQYRVCVAFFYETNFDAVVEPLDICKQKYPGGRGGCQVFKRAVYGEHLVSKVQTNFAM

SEQ ID NO: 36010 - DNA, 794 bp, Arabidopsis thaliana
  misc_feature (1)..(794): Ceres Seq. ID no. 12393483
  misc_feature (1)..(794): Ortholog of  Ceres SEQ ID NO 14306814 as cited in SEQ ID NO 56370
  misc_feature (1)..(794): Ortholog of  Ceres SEQ ID NO 13662830 as cited in SEQ ID NO 61566
  misc_feature (1)..(794): Ortholog of  Ceres SEQ ID NO 14309275 as cited in SEQ ID NO 0
gagttggaccagtcggaggattagggtttcaacggagactcactagtcgatctccgatcctttcttctacccgcccgaaatccgtcgaaacttctcttctttaccattgatttgcctcgtctcagctcaattctcttccgttgctgcttcgtttagttgttgcttcgcttcagtactctggtggtgggagagatgaatcacggccaacaatctggtgaggcaaagcatgaagatgatgctgctcttacagagttccttgcttctctgatggattatactcctactattcctgatgatttagtggagcactacttggctaagagtggatttcagtgccccgacgtacgattgataaggctagttgctgtggctacacaaaagtttgttgcagatgttgccagtgacgcccttcagcattgcaaggctagaccagcaccagttgtgaaagacaaaaaacagcaaaaggataagcgtttggtattgacaatggaagatctttcaaaagctttgcgtgagtatggtgtgaacgtgaagcatccagaatattttgctgatagcccttcgactggaatggaccctgcaacaagggacgaatagaaaccaggaattcctcaaaatctttgcctagtaaggacggtcatgtgtctcagatccctgattctctgttgtgtttcagttaaaaacaaaactcacttgtcttgctagtcctcaattactacattacatgtatattcgtttgttgtttgttctctggtgatttttggggttctacatcacttatccaccattcttgc

SEQ ID NO: 36011 - protein, 134 aa, Arabidopsis thaliana
  peptide (1)..(134): Ceres Seq. ID no. 12393484
MNHGQQSGEAKHEDDAALTEFLASLMDYTPTIPDDLVEHYLAKSGFQCPDVRLIRLVAVATQKFVADVASDALQHCKARPAPVVKDKKQQKDKRLVLTMEDLSKALREYGVNVKHPEYFADSPSTGMDPATRDE

SEQ ID NO: 36012 - protein, 109 aa, Arabidopsis thaliana
  peptide (1)..(109): Ceres Seq. ID no. 12393485
MDYTPTIPDDLVEHYLAKSGFQCPDVRLIRLVAVATQKFVADVASDALQHCKARPAPVVKDKKQQKDKRLVLTMEDLSKALREYGVNVKHPEYFADSPSTGMDPATRDE

SEQ ID NO: 36013 - DNA, 853 bp, Arabidopsis thaliana
  misc_feature (1)..(853): Ceres Seq. ID no. 13493733
  misc_feature (1)..(853): Ortholog of  Ceres SEQ ID NO 12611082 as cited in SEQ ID NO 55853
  misc_feature (1)..(853): Ortholog of  Ceres SEQ ID NO 13664306 as cited in SEQ ID NO 61670
taatcccccccccccccccgatccacaaaaagccattccctctctcaactctctgaatatttttcttcttacgatttacaaatttccgatgctgtgacattaacgtctgagaacagagaaacacttcaaatctttgaattcgtatgtgcgacggagacggaggagccatcagtttcgaaaatggcgtgcgaaggtggaggatctaacgtcagatctagctactacaccattctcgggattcgtaaagatgcctctgtttccgatatccgcactgcttatcgtaagctagctatgaaatggcatccggatagatatgctcgaaatcctggagtcgccggagaagctaaacgtcggtttcaacaaatccaggaagcctattctgttttgaatgatgagaataagaggtcaatgtacgatgttggactatatgatcctcatgaagatgatgacgatgacttctgtgatttcatgcaagagatgatctcaatgatgaacaatgtcaaagacgcgggagagagcttggaagacttgcaacgaatgttcacggatatggttggtggagatggcgtgagctatgactgtaacaataatccaaagggcaacaaaagaccacgtgtcaatatctcgaggagtagtgctgcgatgcgttaaggcttacttcttttgtgtatgagtgtcgtgttgtatcaaaatttcaattccatgttcaattgtctagaccataaaataaattatctgtgaaaaccaactagaactaggtagaatctttggaatcccacatgccccaatcactaatgtatctctcatgatttggttgattttaaagattcgaaaattattcatgtattgttgc

SEQ ID NO: 36014 - protein, 156 aa, Arabidopsis thaliana
  peptide (1)..(156): Ceres Seq. ID no. 13493734
MACEGGGSNVRSSYYTILGIRKDASVSDIRTAYRKLAMKWHPDRYARNPGVAGEAKRRFQQIQEAYSVLNDENKRSMYDVGLYDPHEDDDDDFCDFMQEMISMMNNVKDAGESLEDLQRMFTDMVGGDGVSYDCNNNPKGNKRPRVNISRSSAAMR

SEQ ID NO: 36015 - protein, 119 aa, Arabidopsis thaliana
  peptide (1)..(119): Ceres Seq. ID no. 13493735
MKWHPDRYARNPGVAGEAKRRFQQIQEAYSVLNDENKRSMYDVGLYDPHEDDDDDFCDFMQEMISMMNNVKDAGESLEDLQRMFTDMVGGDGVSYDCNNNPKGNKRPRVNISRSSAAMR

SEQ ID NO: 36016 - protein, 80 aa, Arabidopsis thaliana
  peptide (1)..(80): Ceres Seq. ID no. 13493736
MYDVGLYDPHEDDDDDFCDFMQEMISMMNNVKDAGESLEDLQRMFTDMVGGDGVSYDCNNNPKGNKRPRVNISRSSAAMR

SEQ ID NO: 36017 - DNA, 771 bp, Arabidopsis thaliana
  misc_feature (1)..(771): Ceres Seq. ID no. 12393376
  misc_feature (1)..(771): Ortholog of  Ceres SEQ ID NO 13595158 as cited in SEQ ID NO 51008
  misc_feature (1)..(771): Ortholog of  Ceres SEQ ID NO 13581682 as cited in SEQ ID NO 57913
  misc_feature (1)..(771): Ortholog of  Ceres SEQ ID NO 14304144 as cited in SEQ ID NO 59152
  misc_feature (1)..(771): Ortholog of  Ceres SEQ ID NO 13662050 as cited in SEQ ID NO 61580
  misc_feature (1)..(771): Ortholog of  Ceres SEQ ID NO 14309388 as cited in SEQ ID NO 0
aactttttcaaaaaaaggaaaaaaaacagagctcactcattattatctctctaaaaaccctagctttctccatgggctttcccgtaggttacacagaggttttcttaccgaagcttttcgtacaaacgctttcgattctcggattcatcagaaccatcgtcttctctatcttccgcttcttgggtctctcagattttctcgaaatggatcaaacctggcccgattacacatcgtacccgacccgaatacccgaaacccgctcacctttctccgcactcctaattagagagatcctaccggttatcaaattcgaagagttaacgaattccggcgaagatctaccggaaaactgcgccgtttgtctatacgaattcgaaggagaacaagagatccggtggctgagaaattgcagacatatatttcaccggagctgtcttgaccgttggatggatcatgatcagaagacgtgtccactttgtagaacaccgtttgttccagatgagatgcaagaagagtttaatcaacggctatgggctgcttctggtgttcatgattttcactgtcccgtgaccgaattattatagaagaagccacgcttttctatctttttctgtgtcccttatgttcttttttgttttgactttcacccctctacttttgatgttgcttttttcacccctcttactgacatttagacttgccacgcttttatgtgtgtatatactccttacatatgaatgagagatgagcaataaatattaccgagacagg

SEQ ID NO: 36018 - protein, 193 aa, Arabidopsis thaliana
  peptide (1)..(193): Ceres Seq. ID no. 12393377
LFQKKEKKQSSLIIISLKTLAFSMGFPVGYTEVFLPKLFVQTLSILGFIRTIVFSIFRFLGLSDFLEMDQTWPDYTSYPTRIPETRSPFSALLIREILPVIKFEELTNSGEDLPENCAVCLYEFEGEQEIRWLRNCRHIFHRSCLDRWMDHDQKTCPLCRTPFVPDEMQEEFNQRLWAASGVHDFHCPVTELL

SEQ ID NO: 36019 - protein, 170 aa, Arabidopsis thaliana
  peptide (1)..(170): Ceres Seq. ID no. 12393378
MGFPVGYTEVFLPKLFVQTLSILGFIRTIVFSIFRFLGLSDFLEMDQTWPDYTSYPTRIPETRSPFSALLIREILPVIKFEELTNSGEDLPENCAVCLYEFEGEQEIRWLRNCRHIFHRSCLDRWMDHDQKTCPLCRTPFVPDEMQEEFNQRLWAASGVHDFHCPVTELL

SEQ ID NO: 36020 - protein, 126 aa, Arabidopsis thaliana
  peptide (1)..(126): Ceres Seq. ID no. 12393379
MDQTWPDYTSYPTRIPETRSPFSALLIREILPVIKFEELTNSGEDLPENCAVCLYEFEGEQEIRWLRNCRHIFHRSCLDRWMDHDQKTCPLCRTPFVPDEMQEEFNQRLWAASGVHDFHCPVTELL

SEQ ID NO: 36021 - DNA, 1117 bp, Arabidopsis thaliana
  misc_feature (1)..(1117): Ceres Seq. ID no. 12334123
  misc_feature (1)..(1117): Ortholog of  Ceres SEQ ID NO 13660872 as cited in SEQ ID NO 60830
aaaaatttcaatctttggctcacttctttgtttatctcatagctcttcaccaaaaccaatattttctcctttgttgttctttcttttctatcaaaactttctacttaaaatatcattcctttaaacaatgataagcaaggatccaagatcgagtttacctccagggtttcgatttcatccaacagatgaagaactcattctccattacctaaggaagaaagtttcctcttccccagtcccgctttcgattatcgccgatgtcgatatctacaaatccgatccatgggatttaccagctaaggctccatttggggagaaagagtggtattttttcagtccgagggataggaaatatccaaacggagcaagaccaaacagagcagctgcgtctggatattggaaagcaaccggaacaaataaattgattgcggtaccaaatggtgaagggtttcatgaaaacattgctggatgattgggttctttgccggatttacaagaaatcacacgcttcattgtcatcacctgatgttgctttggtcacaagcaatcaagagcatgaggaaaatgacaacgaaccattcgtagaccgcggaacctttttgccaaatttgcaaaatgatcaaccccttaaacgccagaagtcttcttgttcgttctcaaacttactagacgctacagatttgacgtttctcgcaaattttctaaacgaaaccccggaaaatcgttctgaatcagatttttctttcatgattggcaatttctctaatcctgacatttacggaaaccattacttggatcagaagttaccgcagttgagctctcccacttcagagacaagcggcatcggaagcaaaagagagagagtggattttgcggaagaaacgataaacgcttcgaagaagatgatgaacacatatagttacaataatagtatagatcaaatggatcatagtatgatgcaacaacctagtttcctgaaccaggaactcatgatgagttctcaccttcaatatcaaggctagagagaatattaatttgaaaacctaatcacgaattagggatcattcggtatgtgattgaaaagtaggagtcgttgttagtaatttaccaaactatt

SEQ ID NO: 36022 - protein, 194 aa, Arabidopsis thaliana
  peptide (1)..(194): Ceres Seq. ID no. 12334124
MVKGFMKTLLDDWVLCRIYKKSHASLSSPDVALVTSNQEHEENDNEPFVDRGTFLPNLQNDQPLKRQKSSCSFSNLLDATDLTFLANFLNETPENRSESDFSFMIGNFSNPDIYGNHYLDQKLPQLSSPTSETSGIGSKRERVDFAEETINASKKMMNTYSYNNSIDQMDHSMMQQPSFLNQELMMSSHLQYQG

SEQ ID NO: 36023 - protein, 189 aa, Arabidopsis thaliana
  peptide (1)..(189): Ceres Seq. ID no. 12334125
MKTLLDDWVLCRIYKKSHASLSSPDVALVTSNQEHEENDNEPFVDRGTFLPNLQNDQPLKRQKSSCSFSNLLDATDLTFLANFLNETPENRSESDFSFMIGNFSNPDIYGNHYLDQKLPQLSSPTSETSGIGSKRERVDFAEETINASKKMMNTYSYNNSIDQMDHSMMQQPSFLNQELMMSSHLQYQG

SEQ ID NO: 36024 - protein, 114 aa, Arabidopsis thaliana
  peptide (1)..(114): Ceres Seq. ID no. 12334126
MISKDPRSSLPPGFRFHPTDEELILHYLRKKVSSSPVPLSIIADVDIYKSDPWDLPAKAPFGEKEWYFFSPRDRKYPNGARPNRAAASGYWKATGTNKLIAVPNGEGFHENIAG

SEQ ID NO: 36025 - DNA, 690 bp, Arabidopsis thaliana
  misc_feature (1)..(690): Ceres Seq. ID no. 12333682
  misc_feature (1)..(690): Ortholog of  Ceres SEQ ID NO 12612272 as cited in SEQ ID NO 55946
  misc_feature (1)..(690): Ortholog of  Ceres SEQ ID NO 15169960 as cited in SEQ ID NO 57591
atcagaaatcgaaaaatcaaagttctcaagaagatatcaacaaaaaaaaagtaaattctttaaaatgtcgatgattccaagtttcttcaacaacaacagacgaagcaacatctttgatccattctctcttgacgtatgggatccattcaaggaactaacatcatcatcactttctcgtgagaactcagcgatcgtgaacgcacgtgtggactggagagagacgcctgaggcgcacgtgtttaaagctgacttgcctggattgaagaaggaggaagttaaagttgagattgaggaggatagtgttttgaagatcagtggagagagacacgtggagaaagaagataagaatgacacgtggcaccgtgtggagagatcgagtggacagtttacgaggaggtttaggttgccggagaatgtgaagatggatcaggttaaggctgcgatggagaatggtgtgttgactgttacggtgcctaaggctgagactaagaaggctgatgttaagtctattcagatctctggttgagtaatgggttcgagttttatcatcggagttgcttgtgtttttgtcatggttatggttcatgttttacttgagtgtgtgagtcctctatctaaattataataatctccgattgagctatgaattatgatgtatcggatacatttgatcctaatgaagtatggaat

SEQ ID NO: 36026 - protein, 174 aa, Arabidopsis thaliana
  peptide (1)..(174): Ceres Seq. ID no. 12333683
SEIEKSKFSRRYQQKKSKFFKMSMIPSFFNNNRRSNIFDPFSLDVWDPFKELTSSSLSRENSAIVNARVDWRETPEAHVFKADLPGLKKEEVKVEIEEDSVLKISGERHVEKEDKNDTWHRVERSSGQFTRRFRLPENVKMDQVKAAMENGVLTVTVPKAETKKADVKSIQISG

SEQ ID NO: 36027 - protein, 153 aa, Arabidopsis thaliana
  peptide (1)..(153): Ceres Seq. ID no. 12333684
MSMIPSFFNNNRRSNIFDPFSLDVWDPFKELTSSSLSRENSAIVNARVDWRETPEAHVFKADLPGLKKEEVKVEIEEDSVLKISGERHVEKEDKNDTWHRVERSSGQFTRRFRLPENVKMDQVKAAMENGVLTVTVPKAETKKADVKSIQISG

SEQ ID NO: 36028 - protein, 151 aa, Arabidopsis thaliana
  peptide (1)..(151): Ceres Seq. ID no. 12333685
MIPSFFNNNRRSNIFDPFSLDVWDPFKELTSSSLSRENSAIVNARVDWRETPEAHVFKADLPGLKKEEVKVEIEEDSVLKISGERHVEKEDKNDTWHRVERSSGQFTRRFRLPENVKMDQVKAAMENGVLTVTVPKAETKKADVKSIQISG

SEQ ID NO: 36029 - DNA, 1350 bp, Arabidopsis thaliana
  misc_feature (1)..(1350): Ceres Seq. ID no. 12333686
  misc_feature (1)..(1350): Ortholog of  Ceres SEQ ID NO 13598528 as cited in SEQ ID NO 64938
aaacactgtgagagagttgaccaaaatcgacccagtgggaggactaggtttatcgaaagctccagttttcatagataaatccagtaaaattatacacgcaaattctagtttcttagagcaaagctttgttgaattgatagcttgaatttgggaatggacggagaagagcttaccgagcaggagactgccttgtacgaccgccagattagggtttggggcgctaatgctcagagaagattgaccaaagctcatatcttggtatctggaattaaggggactgttgctgagttttgcaagaacattgtgctggcaggagttggttcagtgactttaatggatgatcgtttagcaaacatggaggccttgaacgctaactttttgattccgcctgatgaaaatgtttacagtggcaaaactgtggctgagatttgtagtgattcactcaaggatttcaaccctatggtccgtgtttccgtagagaaaggtgatttgtcaatgcttggcactgatttttttgagcagtttgatgtcgtagttataggctatggttctcgtgctaccaaaaaatatgtcaatgaaaaatgtcggaagttaaagaaacgtgtcgcattctatacagtcgattgtagagactcatgtggtgaaatctttgtggacctccaagattacaagtacacaaagaaaaagcttgaagagatggtggaatgcgaactaaattttccaagttttcaggaagctatatcggtaccatggaaaccgattcctcggagaacagcaaagctctactttgctatgagagtaatagaagtgtttgaagagagtgaagggcgtaaacatggagaatgttcgctactcgatcttgccagagtcttggaaatcaaaaagcaactctgtgaggcaaactctgtgagcgagagccatataccagatattctcttggagagacttatcactggtactactgaattcccgccagtttgtgccattgtgggaggaatattagcacaggaggtgatcaaagcagtatcaggcaaaggagacccgttgaaaaacttcttctactatgatggtgaagatgggaaaggtgtgatggaagacatttccgactcttttacctcttaaacaaccagtgggccttgatttagtttaaactctataatctctgagattccatgtatatctcaatcgtttgttttttgccttcacattatgaacaaatttaatgcagaatttagtggaggatcagttgtgattttccttcggtaaaatcattttcagttattgacatttgaattgttcaatttcaaatttcaaatattataattcaattcaaagactagctaagttttt

SEQ ID NO: 36030 - protein, 322 aa, Arabidopsis thaliana
  peptide (1)..(322): Ceres Seq. ID no. 12333687
MDGEELTEQETALYDRQIRVWGANAQRRLTKAHILVSGIKGTVAEFCKNIVLAGVGSVTLMDDRLANMEALNANFLIPPDENVYSGKTVAEICSDSLKDFNPMVRVSVEKGDLSMLGTDFFEQFDVVVIGYGSRATKKYVNEKCRKLKKRVAFYTVDCRDSCGEIFVDLQDYKYTKKKLEEMVECELNFPSFQEAISVPWKPIPRRTAKLYFAMRVIEVFEESEGRKHGECSLLDLARVLEIKKQLCEANSVSESHIPDILLERLITGTTEFPPVCAIVGGILAQEVIKAVSGKGDPLKNFFYYDGEDGKGVMEDISDSFTS

SEQ ID NO: 36031 - protein, 262 aa, Arabidopsis thaliana
  peptide (1)..(262): Ceres Seq. ID no. 12333688
MDDRLANMEALNANFLIPPDENVYSGKTVAEICSDSLKDFNPMVRVSVEKGDLSMLGTDFFEQFDVVVIGYGSRATKKYVNEKCRKLKKRVAFYTVDCRDSCGEIFVDLQDYKYTKKKLEEMVECELNFPSFQEAISVPWKPIPRRTAKLYFAMRVIEVFEESEGRKHGECSLLDLARVLEIKKQLCEANSVSESHIPDILLERLITGTTEFPPVCAIVGGILAQEVIKAVSGKGDPLKNFFYYDGEDGKGVMEDISDSFTS

SEQ ID NO: 36032 - protein, 255 aa, Arabidopsis thaliana
  peptide (1)..(255): Ceres Seq. ID no. 12333689
MEALNANFLIPPDENVYSGKTVAEICSDSLKDFNPMVRVSVEKGDLSMLGTDFFEQFDVVVIGYGSRATKKYVNEKCRKLKKRVAFYTVDCRDSCGEIFVDLQDYKYTKKKLEEMVECELNFPSFQEAISVPWKPIPRRTAKLYFAMRVIEVFEESEGRKHGECSLLDLARVLEIKKQLCEANSVSESHIPDILLERLITGTTEFPPVCAIVGGILAQEVIKAVSGKGDPLKNFFYYDGEDGKGVMEDISDSFTS

SEQ ID NO: 36033 - DNA, 1192 bp, Arabidopsis thaliana
  misc_feature (1)..(1192): Ceres Seq. ID no. 12606733
  misc_feature (1)..(1192): Ortholog of  Ceres SEQ ID NO 12484482 as cited in SEQ ID NO 53324
  misc_feature (1)..(1192): Ortholog of  Ceres SEQ ID NO 15176234 as cited in SEQ ID NO 54949
  misc_feature (1)..(1192): Ortholog of  Ceres SEQ ID NO 14314507 as cited in SEQ ID NO 59337
ctcaacatacacaaaacactaaaagtagaagaaaaatggcgactcttaaggtttctgattctgttcctgctccttctgatgatgctgagcaattgagaaccgcttttgaaggatggggtacaaacgaggacttgatcatatcaatcttggctcacagaagtgctgaacagaggaaagtgatcaggcaagcataccatgaaacctacggtgaagaccttctcaagactcttgacaaggagctctctaacgacttcgagagagctatcttgttgtggactcttgaacccggtgagcgtgatgctttattggctaatgaagctacaaaaagatggacttcaagcaaccaagtgcttatggaagtagcttgcacaaggacatcaacgcagctgcttcacgcgaggcaagcttaccatgctcgctacaagaagtctcttgaagaggacgtggctcaccacactaccggtgacttcagaaagcttttggtctctcttgttacctcatacaggtacgaaggagatgaagtgaacatgacattggctaagcaagaagctaagctggtccatgagaaaatcaaggacaagcactacaatgatgaggatgttattagaatcttgtccacaagaagcaaagctcagatcaatgctacttttaaccgttaccaagatgatcatggcgaggaaattctcaagagtcttgaggaaggagatgatgatgacaagttccttgcacttttgaggtcaaccattcagtgcttgacaagaccagagctttactttgtcgatgttcttcgttcagcaatcaacaaaactggaactgatgaaggagcactcactagaattgtgaccacaagagctgagattgacttgaaggtcattggagaggagtaccagcgcaggaacagcattcctttggagaaagctattaccaaagacactcgtggagattacgagaagatgctcgtcgcacttctcggtgaagatgatgcttaatcaatcaatcctccacagagaaacataagctgctctacagcttctgttatctcttatctccctctctctctctttgatgagtttcaaatcgtttgattttgtttctacaaaaaccttgtttgtttctgttgtgtgttttgagttcctaaataatgcaaaagagagagacagagagaaccagtgtggtctcttaagttatatac

SEQ ID NO: 36034 - protein, 328 aa, Arabidopsis thaliana
  peptide (1)..(328): Ceres Seq. ID no. 12606734
QHTQNTKSRRKMATLKVSDSVPAPSDDAEQLRTAFEGWGTNEDLIISILAHRSAEQRKVIRQAYHETYGEDLLKTLDKELSNDFERAILLWTLEPGERDALLANEATKRWTSSNQVLMEVACTRTSTQLLHARQAYHARYKKSLEEDVAHHTTGDFRKLLVSLVTSYRYEGDEVNMTLAKQEAKLVHEKIKDKHYNDEDVIRILSTRSKAQINATFNRYQDDHGEEILKSLEEGDDDDKFLALLRSTIQCLTRPELYFVDVLRSAINKTGTDEGALTRIVTTRAEIDLKVIGEEYQRRNSIPLEKAITKDTRGDYEKMLVALLGEDDA

SEQ ID NO: 36035 - protein, 317 aa, Arabidopsis thaliana; identical to SEQ ID NO: 35542
  peptide (1)..(317): Ceres Seq. ID no. 12606735

SEQ ID NO: 36036 - protein, 211 aa, Arabidopsis thaliana; identical to SEQ ID NO: 24550
  peptide (1)..(211): Ceres Seq. ID no. 12606736

SEQ ID NO: 36037 - DNA, 743 bp, Arabidopsis thaliana
  misc_feature (1)..(743): Ceres Seq. ID no. 13592706
  misc_feature (1)..(743): Ortholog of  Ceres SEQ ID NO 15179194 as cited in SEQ ID NO 0
gaagtcagtaagtaaacgagcaaaagaagaagagaaacaacaagaagtagtaatggcttcctctatgctctcctccgccgctgtggttacatccccggctcaggccaccatggtcgctccattcaccggcttgaagtcatccgctgcattcccggtcacccgcaagaccaacaaggacatcacttccatcgcaagcaacgggggaagagttagctgcatgaaggtgtggccaccaattggaaagaagaagtttgagactctatcttacctccctgaccttagtgacgtcgaattggctaaggaagttgactaccttctccgcaacaagtggattccttgtgttgaattcgagttagagcacggatttgtgtaccgtgagcacggaaacactcccggatactacgatggacggtactggacaatgtggaagcttccattgttcggatgcaccgactccgctcaagtgttgaaggaagttgaagaatgcaagaaggagtacccgggcgccttcattaggatcatcggattcgacaacacacgtcaagtccaatgcatcagtttcattgcctacaagcccccaagcttcaccgaagcttaatttcttttctaaaacattcttatgaattatctctgctcatttcatttcctattgtctgtgttctttttctctttatgagacaatttctatcggattgtcaaatgtctgatttatgaatatgtaatttatatatccgtgcgtcttg

SEQ ID NO: 36038 - protein, 198 aa, Arabidopsis thaliana
  peptide (1)..(198): Ceres Seq. ID no. 13592707
KSVSKRAKEEEKQQEVVMASSMLSSAAVVTSPAQATMVAPFTGLKSSAAFPVTRKTNKDITSIASNGGRVSCMKVWPPIGKKKFETLSYLPDLSDVELAKEVDYLLRNKWIPCVEFELEHGFVYREHGNTPGYYDGRYWTMWKLPLFGCTDSAQVLKEVEECKKEYPGAFIRIIGFDNTRQVQCISFIAYKPPSFTEA

SEQ ID NO: 36039 - protein, 181 aa, Arabidopsis thaliana
  peptide (1)..(181): Ceres Seq. ID no. 13592708
MASSMLSSAAVVTSPAQATMVAPFTGLKSSAAFPVTRKTNKDITSIASNGGRVSCMKVWPPIGKKKFETLSYLPDLSDVELAKEVDYLLRNKWIPCVEFELEHGFVYREHGNTPGYYDGRYWTMWKLPLFGCTDSAQVLKEVEECKKEYPGAFIRIIGFDNTRQVQCISFIAYKPPSFTEA

SEQ ID NO: 36040 - protein, 177 aa, Arabidopsis thaliana
  peptide (1)..(177): Ceres Seq. ID no. 13592709
MLSSAAVVTSPAQATMVAPFTGLKSSAAFPVTRKTNKDITSIASNGGRVSCMKVWPPIGKKKFETLSYLPDLSDVELAKEVDYLLRNKWIPCVEFELEHGFVYREHGNTPGYYDGRYWTMWKLPLFGCTDSAQVLKEVEECKKEYPGAFIRIIGFDNTRQVQCISFIAYKPPSFTEA

SEQ ID NO: 36041 - DNA, 1365 bp, Arabidopsis thaliana
  misc_feature (1)..(1365): Ceres Seq. ID no. 12371989
  misc_feature (1)..(1365): Ortholog of  Ceres SEQ ID NO 13597638 as cited in SEQ ID NO 65448
  misc_feature (1)..(1365): Ortholog of  Ceres SEQ ID NO 14302772 as cited in SEQ ID NO 69055
aaagcaacaaaaacttaacccatttcttcttctttttttgtttctctctcacaaacacaacaaatatggaatacagctgtgtagacgacagtagtacaacgtcagaatctctctccatctctactactccaaagccgacaacgacgacggagaagaaactctcttctccgccggcgacgtcgatgcgtctctacagaatgggaagcggcggaagcagcgtcgttttggattcagagaacggcgtcgagaccgagtcacgtaagcttccttcgtcgaaatataaaggcgttgtgcctcagcctaacggaagatggggagctcagatttacgagaagcatcagcgagtttggctcggtactttcaacgaggaagaagaagctgcgtcttcttacgacatcgccgtgaggagattccgcggccgcgacgccgtcactaacttcaaatctcaagttgatggaaacgacgccgaatcggcttttcttgacgctcattctaaagctgagatcgtggatatgttgaggaaacacacttacgccgatgagtttgagcagagtagacggaagtttgttaacggcgacggaaaacgctctgggttggagacggcgacgtacggaaacgacgctgttttgagagcgcgtgaggttttgttcgagaagactgttacgccgagcgacgtcgggaagctgaaccgtttagtgataccgaaacaacacgcggagaagcattttccgttaccggcgatgacgacggcgatggggatgaatccgtctccgacgaaaggcgttttgattaacttggaagatagaacagggaaagtgtggcggttccgttacagttactggaacagcagtcaaagttacgtgttgaccaagggctggagccggttcgttaaagagaagaatcttcgagccggtgatgtggtttgtttcgagagatcaaccggaccagaccggcaattgtatatccactggaaagtccggtctagtccggttcagactgtggttaggctattcggagtcaacattttcaatgtgagtaacgagaaaccaaacgacgtcgcagtagagtgtgttggcaagaagagatctcgggaagatgatttgttttcgttagggtgttccaagaagcaggcgattatcaacatcttgtgacaaattctttttttttggttttttttcttcaatttgtttctcctttttcaatattttgtattgaaatgacaagttgtaaattaggacaagacaagaaaaaatgacaactagacaaaatagtttttgtttacatctaatttaggatctgttttttcaccctttcctgaaatatgatatgtgttctcctccttaatctaataatcttgtttaatct

SEQ ID NO: 36042 - protein, 382 aa, Arabidopsis thaliana
  peptide (1)..(382): Ceres Seq. ID no. 12371990
SNKNLTHFFFFFCFSLTNTTNMEYSCVDDSSTTSESLSISTTPKPTTTTEKKLSSPPATSMRLYRMGSGGSSVVLDSENGVETESRKLPSSKYKGVVPQPNGRWGAQIYEKHQRVWLGTFNEEEEAASSYDIAVRRFRGRDAVTNFKSQVDGNDAESAFLDAHSKAEIVDMLRKHTYADEFEQSRRKFVNGDGKRSGLETATYGNDAVLRAREVLFEKTVTPSDVGKLNRLVIPKQHAEKHFPLPAMTTAMGMNPSPTKGVLINLEDRTGKVWRFRYSYWNSSQSYVLTKGWSRFVKEKNLRAGDVVCFERSTGPDRQLYIHWKVRSSPVQTVVRLFGVNIFNVSNEKPNDVAVECVGKKRSREDDLFSLGCSKKQAIINIL

SEQ ID NO: 36043 - protein, 361 aa, Arabidopsis thaliana
  peptide (1)..(361): Ceres Seq. ID no. 12371991
MEYSCVDDSSTTSESLSISTTPKPTTTTEKKLSSPPATSMRLYRMGSGGSSVVLDSENGVETESRKLPSSKYKGVVPQPNGRWGAQIYEKHQRVWLGTFNEEEEAASSYDIAVRRFRGRDAVTNFKSQVDGNDAESAFLDAHSKAEIVDMLRKHTYADEFEQSRRKFVNGDGKRSGLETATYGNDAVLRAREVLFEKTVTPSDVGKLNRLVIPKQHAEKHFPLPAMTTAMGMNPSPTKGVLINLEDRTGKVWRFRYSYWNSSQSYVLTKGWSRFVKEKNLRAGDVVCFERSTGPDRQLYIHWKVRSSPVQTVVRLFGVNIFNVSNEKPNDVAVECVGKKRSREDDLFSLGCSKKQAIINIL

SEQ ID NO: 36044 - protein, 322 aa, Arabidopsis thaliana
  peptide (1)..(322): Ceres Seq. ID no. 12371992
MRLYRMGSGGSSVVLDSENGVETESRKLPSSKYKGVVPQPNGRWGAQIYEKHQRVWLGTFNEEEEAASSYDIAVRRFRGRDAVTNFKSQVDGNDAESAFLDAHSKAEIVDMLRKHTYADEFEQSRRKFVNGDGKRSGLETATYGNDAVLRAREVLFEKTVTPSDVGKLNRLVIPKQHAEKHFPLPAMTTAMGMNPSPTKGVLINLEDRTGKVWRFRYSYWNSSQSYVLTKGWSRFVKEKNLRAGDVVCFERSTGPDRQLYIHWKVRSSPVQTVVRLFGVNIFNVSNEKPNDVAVECVGKKRSREDDLFSLGCSKKQAIINIL

SEQ ID NO: 36045 - DNA, 1370 bp, Arabidopsis thaliana
  misc_feature (1)..(1370): Ceres Seq. ID no. 12324809
  misc_feature (1)..(1370): Ortholog of  Ceres SEQ ID NO 13595652 as cited in SEQ ID NO 56757
aaaatcagtcacgaaaacccccaaatccacagattaattagggttttcgatttctctgatgaaactgagaagaatctctcattagggttcttcattcttcagagggatttctcatatctctctcattgagcttgctaaagctgaaatctgagtttgaaattggaattcagattcccatcccatgttgacctcttcttgctcttcttcgtctctcctctgccatcgcccagctctctctagttcgcgttccaagtttagggttccttgtcgaactgttttctctcctgctcttaccaagatttcccctttaactgcttcttcaccttctaagtccgccaagcataaatggaagattttgtgttttagaaatgaagattctgctcccgagaatccggagcattttgtgcctgaggaattagttaagccagatcaagattctccatgtacagataaaacagattggaaggcaacttttcaaaaggctgcagatgcagttttgaaggccattgggactcgttggaaggtaccatggactgtcgagaccattgtgcaggtaatgcttctgtgggtagccgctttctggttcattggttcatggatgatcccattcatggctcatatatcaggtttccacaaagaatccctaacatttagaggccaagctttgttcagtctgataaccgatgtaacagaaggcctagccgggattgctatcctccaccgttgcctctccatgttccgtccacttgcaagtgattggttccgctttacccttaaaggaaactggcaactagatgttatcataggctgtttcatgttccctttcgttaaccggctctcccaattaaacctaaacctcttgccactcccaccaacctcaagtccagtctcactctcaagtgtcgagcagtctataatggctagagaccctgtggcaatggcactgtatgcagttgtagtatcaatttgtgcaccggtttgggaagagatagtgttcagagggttcttgttaccgtctctaactaggtacatgccagtttggtgtgcgattcttgtgagttcgattgcatttgctttggcacatttcaatgtgcagaggatgttaccattggtgttccttggagtggtattgggtttgatattcgcaaggtcaaggaacttgttaccttcaatgctgttgcatagcttgtggaacggctttgtattcatggaattgatgcgatgatgactatcttttgtaggtgtcttgtttcttattcttcttgtaattgattcaaagtatgatgttagcttttatttttttataataaatggacagttcaattgtacaaagataaaaccaaaaaaggtcaaaaagaaattctaatttt

SEQ ID NO: 36046 - protein, 347 aa, Arabidopsis thaliana
  peptide (1)..(347): Ceres Seq. ID no. 12324810
MLTSSCSSSSLLCHRPALSSSRSKFRVPCRTVFSPALTKISPLTASSPSKSAKHKWKILCFRNEDSAPENPEHFVPEELVKPDQDSPCTDKTDWKATFQKAADAVLKAIGTRWKVPWTVETIVQVMLLWVAAFWFIGSWMIPFMAHISGFHKESLTFRGQALFSLITDVTEGLAGIAILHRCLSMFRPLASDWFRFTLKGNWQLDVIIGCFMFPFVNRLSQLNLNLLPLPPTSSPVSLSSVEQSIMARDPVAMALYAVVVSICAPVWEEIVFRGFLLPSLTRYMPVWCAILVSSIAFALAHFNVQRMLPLVFLGVVLGLIFARSRNLLPSMLLHSLWNGFVFMELMR

SEQ ID NO: 36047 - protein, 222 aa, Arabidopsis thaliana
  peptide (1)..(222): Ceres Seq. ID no. 12324811
MLLWVAAFWFIGSWMIPFMAHISGFHKESLTFRGQALFSLITDVTEGLAGIAILHRCLSMFRPLASDWFRFTLKGNWQLDVIIGCFMFPFVNRLSQLNLNLLPLPPTSSPVSLSSVEQSIMARDPVAMALYAVVVSICAPVWEEIVFRGFLLPSLTRYMPVWCAILVSSIAFALAHFNVQRMLPLVFLGVVLGLIFARSRNLLPSMLLHSLWNGFVFMELMR

SEQ ID NO: 36048 - protein, 208 aa, Arabidopsis thaliana
  peptide (1)..(208): Ceres Seq. ID no. 12324812
MIPFMAHISGFHKESLTFRGQALFSLITDVTEGLAGIAILHRCLSMFRPLASDWFRFTLKGNWQLDVIIGCFMFPFVNRLSQLNLNLLPLPPTSSPVSLSSVEQSIMARDPVAMALYAVVVSICAPVWEEIVFRGFLLPSLTRYMPVWCAILVSSIAFALAHFNVQRMLPLVFLGVVLGLIFARSRNLLPSMLLHSLWNGFVFMELMR

SEQ ID NO: 36049 - DNA, 795 bp, Arabidopsis thaliana
  misc_feature (1)..(795): Ceres Seq. ID no. 12561477
  misc_feature (1)..(795): Ortholog of  Ceres SEQ ID NO 12610341 as cited in SEQ ID NO 56073
atgattaatgtctgaaaaatttgatatttgaagcgaatcaacaacaacagtcgggttcgtgaaaaaaaaagatttgatcggctaaacttggtcggtttatcgtggaaggacttgtcaatggcagacgtacctggatacctgcgcacttgtttggatatggggaagatagctttcttagcaatccttgtatctacagggattgtgttgcagattctggcttgtgctctgttcaataactggtggccaatgctaagtgttataatgtatgtgctcctcccaatgcctttgctcttctttggtggatcagacagtacatctctattcaacgagtcagataatagttggatcaatgcagccaagttcttgactggtgcatcagcagttggaagcgtcgcgataccatcgattctaaaacacgccggactcatcggttggggcgcattagcccttgatctctcatcctacgttgtcttcctcgtggctattttgggttacatttgcataggagatgccagtgacaactattacagctacatttaaaaagacacacacaaattcatcatcatttgtttaaacctcaacaaagtctcagccttttatcacttccccgttcgattgatgcttcgaaacgaaaacatcttgtttctatggaatgactcactgattggattttcacaagtttaagagtttgtgtgtcaagtgtatgtatgaatgattttttttttgggtggttttgttacgttttgatgtatagaacatatttattatttggtggaatatatataaattttcttt

SEQ ID NO: 36050 - protein, 140 aa, Arabidopsis thaliana; identical to SEQ ID NO: 27802
  peptide (1)..(140): Ceres Seq. ID no. 12561478

SEQ ID NO: 36051 - protein, 127 aa, Arabidopsis thaliana; identical to SEQ ID NO: 27803
  peptide (1)..(127): Ceres Seq. ID no. 12561479

SEQ ID NO: 36052 - protein, 97 aa, Arabidopsis thaliana; identical to SEQ ID NO: 27804
  peptide (1)..(97): Ceres Seq. ID no. 12561480

SEQ ID NO: 36053 - DNA, 753 bp, Arabidopsis thaliana
  misc_feature (1)..(753): Ceres Seq. ID no. 13621980
  misc_feature (1)..(753): Ortholog of  Ceres SEQ ID NO 15176693 as cited in SEQ ID NO 1078
  misc_feature (1)..(753): Ortholog of  Ceres SEQ ID NO 12615074 as cited in SEQ ID NO 62676
  misc_feature (1)..(753): Ortholog of  Ceres SEQ ID NO 13598819 as cited in SEQ ID NO 0
  misc_feature (1)..(753): Ortholog of  Ceres SEQ ID NO 13600371 as cited in SEQ ID NO 0
aagtctacaaaccaaaagcacgctacagaagaagaggaagaagaagaagaagcagagacaacaagaagaagaagaaacagtctcatctcgccggagaagaagaaagatgtcgtggcaatcatacgtcgatgaccatctcatgtgcgaggtcgaaggcaaccacctcacacacgccgccatcttcggccaagacggcagtgtctgggctcagagctcagctttccctcagttgaagcctgcagagatagcaggaatcaacaaagactttgaagaagccggacatcttgccccaaccgggctattccttggcggtgagaagtacatggttgtccaaggtgaggctggagccgtcatccgagggaaaaagggacctggtggagtcactatcaagaagactactcaagctctagtctttggtatctatgatgaaccgatgaccggagggcaatgcaacttggtcgtggagaggctcggcgattaccttatcgagtctggtctctaagttcactcaaagtgcttcaaacaaatttcatttttcgggttctttcttcactagagaagcacccttctgccatgtattgtgatttgattgttgttgtgcatcaaacaaagttattatactcttaaaaagaacaaagaaacaatcatatttgttatggttttgatcctctcctatgatggctcttatgtttttctcttgtactgtatttcgtaatgtataattacgctttggaataaaaatttgagtttgtg

SEQ ID NO: 36054 - protein, 166 aa, Arabidopsis thaliana
  peptide (1)..(166): Ceres Seq. ID no. 13621981
SLQTKSTLQKKRKKKKKQRQQEEEETVSSRRRRRKMSWQSYVDDHLMCEVEGNHLTHAAIFGQDGSVWAQSSAFPQLKPAEIAGINKDFEEAGHLAPTGLFLGGEKYMVVQGEAGAVIRGKKGPGGVTIKKTTQALVFGIYDEPMTGGQCNLVVERLGDYLIESGL

SEQ ID NO: 36055 - protein, 131 aa, Arabidopsis thaliana; identical to SEQ ID NO: 30808
  peptide (1)..(131): Ceres Seq. ID no. 13621982

SEQ ID NO: 36056 - protein, 120 aa, Arabidopsis thaliana; identical to SEQ ID NO: 30809
  peptide (1)..(120): Ceres Seq. ID no. 13621983

SEQ ID NO: 36057 - DNA, 860 bp, Arabidopsis thaliana
  misc_feature (1)..(860): Ceres Seq. ID no. 12393628
  misc_feature (1)..(860): Ortholog of  Ceres SEQ ID NO 13662677 as cited in SEQ ID NO 63824
gcacagtatgtgttttgacttcttcgcgtcggcgatattatccagaaacagtagtgtcgaagaagaagaagaagaagaaggagagattctgagtttagggttttgtttgtgttgcttcgaattgagcagctatggcttccgtgttgctacttcttctggtgttcgtgtttgatctcattgcttttggtcttgctgttgctgcagagcaacgaagaaccacctggcaaatttctagagaatcaagagatttgagctactgtgtgtatgacaaggacatagcaacgggtctcggagtcggttctttcttggtcttattagcgagtcagctcttaataatggtggcgagccgatgtttatgctgtggaagagcattgacaccaagtggttcaagatcttgggcaatttttctcttcatcaccacctgggttttcttcttcatagcacaagtgtgtttacttgctggctctgtacgaaacgcttaccatacaaagtaccgtgtctactttggtaacacttccccttcttgtcgatcactgaggaaaggcgtgtttggggctggagcagcattcatagtgctcacggggattgtctccgagctttactatgtgaccctttcgagggccaaagactttcaaccttcaagagatcccggtatccgaatgagtagcctgtagaacttacacctgctttgtagatttagaatagttatgttcattgttgttatcatcttactatcttaggtcattgttgttatgattttaatagtatggaggaaactaacattattttcaatttcttaaaatatatgtacctatcaaaaacgatagattgaaaacaataaagaaccataaagttgatat

SEQ ID NO: 36058 - protein, 180 aa, Arabidopsis thaliana
  peptide (1)..(180): Ceres Seq. ID no. 12393629
MASVLLLLLVFVFDLIAFGLAVAAEQRRTTWQISRESRDLSYCVYDKDIATGLGVGSFLVLLASQLLIMVASRCLCCGRALTPSGSRSWAIFLFITTWVFFFIAQVCLLAGSVRNAYHTKYRVYFGNTSPSCRSLRKGVFGAGAAFIVLTGIVSELYYVTLSRAKDFQPSRDPGIRMSSL

SEQ ID NO: 36059 - protein, 112 aa, Arabidopsis thaliana
  peptide (1)..(112): Ceres Seq. ID no. 12393630
MVASRCLCCGRALTPSGSRSWAIFLFITTWVFFFIAQVCLLAGSVRNAYHTKYRVYFGNTSPSCRSLRKGVFGAGAAFIVLTGIVSELYYVTLSRAKDFQPSRDPGIRMSSL

SEQ ID NO: 36060 - DNA, 1894 bp, Arabidopsis thaliana
  misc_feature (1)..(1894): Ceres Seq. ID no. 12338010
  misc_feature (1)..(1894): Ortholog of  Ceres SEQ ID NO 13600220 as cited in SEQ ID NO 0
aacaaattcctacaccaatatctttagctagagagaaaaaaagagtgaggaaactagagagagagaccacccaataatggtgaggttcgagaaggttcatttagtgttagggttagctctggttctaactctggtcggagctccgaccaaagcccaaggacctgtttgcggtgcaggcctgcctgacaaatttagcagattaaacttccctgaaggcttcatttggggaaccgcaacagcagcatttcaggttgaaggagctgttaatgaaggttgcagaggtccaagcatgtgggatactttcactaagaagttcccacatagatgtgaaaatcataacgctgatgttgctgtggatttctatcatcgttacaaggaagatatccagttgatgaaagaccttaacactgatgcttttagactttctattgcgtggcccagaatattcccccatggaaggatgtctaagggaataagcaaagtgggagtccaattctaccacgacctcatcgatgagcttctcaaaaacaatataataccattagttacagtctttcattgggatactccccaagacttggaagatgaatatggtggtttcttaagtggtcgcatcgtgcaagattttaccgaatatgcgaatttcactttccacgaatatggacacaaagtgaaacattggatcacatttaacgagccatgggtgtttagtcgtgccggttacgacaacggaaagaaagctccgggacgttgttcgccgtacatccccggttatggacagcattgtcaggatgggcggtctggatacgaagcttatcaagtcagtcacaacttactcttgtcgcatgcttacgctgttgacgcattcagaaactgcaaacagtgtgctggaggtaaaattggaattgcacacagtccagcttggttcgaaccacaagaccttgagcatgttggaggttccattgaacgtgtgcttgatttcatcctaggatggcatttggctccaacaacttatggagattatccacaatcgatgaaggatcgtgtcggtcatagattgccaaaattcacagaagctgagaagaagttgctaaagggttctacagattacgtaggaatgaattactatacttcagtgtttgcaaaagaaattagccctgatcctaagagtccgagttggacgactgattctcttgttgattgggatagcaagagtgtggatggatacaaaattggtagcaagccgtttaatggtaaactggatgtgtattcaaaaggtttgagataccttttgaagtatattaaggataactatggcgacccagaagttatcattgccgagaatggatacggagaagaccttggagagaagcacaatgacgtaaactttgggacacaagatcacaacagaaaatattatatccaaaggcatctcttgagtatgcacgacgccatttgcaaggacaaagtgaacgttacgggatactttgtgtggtctttgatggacaactttgagtggcaagatgggtacaaggcgaggttcggactttactacatcgatttccagaacaacttgacccgtcaccaaaaagtttcgggcaaatggtattccgaattcctcaaaccacagtttccaacctccaagctgagggaagaactctagatgatcaagaatcctatcgggacaaaataattgagtacaagagtcttgaagatgttgttgaggataatatcagtttgtgtgttctatggatcgttttcatctaccggtccttcctatgttagaaggacttgtgagttgttcgagttttaataatatcaataaatgtcttcttttttaatatatgttgagttaataattaaatctgcttatcgaaaagaacagataaaatag

SEQ ID NO: 36061 - protein, 528 aa, Arabidopsis thaliana [sequence omitted]

SEQ ID NO: 36062 - protein, 457 aa, Arabidopsis thaliana
  peptide (1)..(457): Ceres Seq. ID no. 12338012
MWDTFTKKFPHRCENHNADVAVDFYHRYKEDIQLMKDLNTDAFRLSIAWPRIFPHGRMSKGISKVGVQFYHDLIDELLKNNIIPLVTVFHWDTPQDLEDEYGGFLSGRIVQDFTEYANFTFHEYGHKVKHWITFNEPWVFSRAGYDNGKKAPGRCSPYIPGYGQHCQDGRSGYEAYQVSHNLLLSHAYAVDAFRNCKQCAGGKIGIAHSPAWFEPQDLEHVGGSIERVLDFILGWHLAPTTYGDYPQSMKDRVGHRLPKFTEAEKKLLKGSTDYVGMNYYTSVFAKEISPDPKSPSWTTDSLVDWDSKSVDGYKIGSKPFNGKLDVYSKGLRYLLKYIKDNYGDPEVIIAENGYGEDLGEKHNDVNFGTQDHNRKYYIQRHLLSMHDAICKDKVNVTGYFVWSLMDNFEWQDGYKARFGLYYIDFQNNLTRHQKVSGKWYSEFLKPQFPTSKLREEL

SEQ ID NO: 36063 - protein, 423 aa, Arabidopsis thaliana
  peptide (1)..(423): Ceres Seq. ID no. 12338013
MKDLNTDAFRLSIAWPRIFPHGRMSKGISKVGVQFYHDLIDELLKNNIIPLVTVFHWDTPQDLEDEYGGFLSGRIVQDFTEYANFTFHEYGHKVKHWITFNEPWVFSRAGYDNGKKAPGRCSPYIPGYGQHCQDGRSGYEAYQVSHNLLLSHAYAVDAFRNCKQCAGGKIGIAHSPAWFEPQDLEHVGGSIERVLDFILGWHLAPTTYGDYPQSMKDRVGHRLPKFTEAEKKLLKGSTDYVGMNYYTSVFAKEISPDPKSPSWTTDSLVDWDSKSVDGYKIGSKPFNGKLDVYSKGLRYLLKYIKDNYGDPEVIIAENGYGEDLGEKHNDVNFGTQDHNRKYYIQRHLLSMHDAICKDKVNVTGYFVWSLMDNFEWQDGYKARFGLYYIDFQNNLTRHQKVSGKWYSEFLKPQFPTSKLREEL

SEQ ID NO: 36064 - DNA, 1227 bp, Arabidopsis thaliana
  misc_feature (1)..(1227): Ceres Seq. ID no. 12334796
  misc_feature (1)..(1227): Ortholog of  Ceres SEQ ID NO 12778054 as cited in SEQ ID NO 63215
  misc_feature (1)..(1227): Ortholog of  Ceres SEQ ID NO 14303185 as cited in SEQ ID NO 67203
acactttggatagctgccgccgaagttttgtgcaatggcgacgaaaccgacgtttcagctgttttcttcttctcaaggttctggtctaggtttagggttccttgattcatcagagccagctcttcctccacctcctcctcctgttgaagtattatccttcgaggtgtcttcctccactgatttcgaagtggataaattgactatcggcgagatcactcttttgaagggtcgtgtgagcactaaagaggtttttggattgcctaattcagatttggttcctggagtctatgaaggcgggcttaagctttgggaaggatcgattgatcttgttaaagctcttgagaaagaatcacaaaccggaaacttatcattttccggaaagcgggttctcgagcttggatgtggtcatgcacttccaggaatctatgcgtgtctcaagggttcagatgctgttcatttccaggacttcaatgctgaggttcttcgatgtctcaccattccgaatctgaatgctaatctgtctgagaagtcttcctctgtctcagtaagtgaaacagaagtacgcttctttgctggtgagtggagtgaagttcatcaggttcttccactagttaatagtgatggtgagactaataagaagggtggttatgacatcattctaatggctgagacgatatattccatctccgctcagaaaagtcaatatgaattgattaaaaggtgtctggcgtatcctgatggagcagtgtatatggctgcaaagaagtactatttcggggtcggtggagggacaaggcaattcttgtctatgatagagaaagacggtgctcttgcttcaacgttggtgtctcaagtcacagatggttcctcaaatgtcagagaggtatggaagctttcgtacaagtaagtcgaagctatactggaattcagtgtccaacgatctgattttagtggatttgggttgctcataaaaatgagtggaaattcaaaatctctcatccatgtgtttagcttatagactctcctgactgtgttataataattgcttagtttttcattttggtacattttctggcttaacgaaaggcttatgtgatctgccgttgattctcaccggaccaaagttccaaactaagctttagttggagtcgcagtttatatattgtaaatctctcacatgattagttatgcttttgagaataaatccaccagctcgacctgtcttgc

SEQ ID NO: 36065 - protein, 290 aa, Arabidopsis thaliana
  peptide (1)..(290): Ceres Seq. ID no. 12334797
MATKPTFQLFSSSQGSGLGLGFLDSSEPALPPPPPPVEVLSFEVSSSTDFEVDKLTIGEITLLKGRVSTKEVFGLPNSDLVPGVYEGGLKLWEGSIDLVKALEKESQTGNLSFSGKRVLELGCGHALPGIYACLKGSDAVHFQDFNAEVLRCLTIPNLNANLSEKSSSVSVSETEVRFFAGEWSEVHQVLPLVNSDGETNKKGGYDIILMAETIYSISAQKSQYELIKRCLAYPDGAVYMAAKKYYFGVGGGTRQFLSMIEKDGALASTLVSQVTDGSSNVREVWKLSYK

SEQ ID NO: 36066 - DNA, 1289 bp, Arabidopsis thaliana
  misc_feature (1)..(1289): Ceres Seq. ID no. 12321766
  misc_feature (1)..(1289): Ortholog of  Ceres SEQ ID NO 13654054 as cited in SEQ ID NO 67735
gagagttctggtttctgcatctctctccttcttcgtttagactttagccattgaaggtcgcttcgattcgaaatcatggcggccgtaccgagaggcctcctttctcgaatcaatcagtttctatcaatacggtctataactccttcatcctctgaatctcttcctcattgtagtagcttctttctcctccgacgattcagctccgatactgggttgatggacggtggtggatctgatattatcggggctcagacccgaatcattgaggcgaaacaaggtgagatgtctagtagatccaagaggactgggatcatcgccgttaagtgtgggatgactgcgctctgggacaaatggggaaagaggattccgatttctattctttgggttgatgataatatcgtctctcaggttaaaactgttgagaaagaaggcatttttgcgttacagatcggatgtgggcaaaagaaaccgaagcatttgtcaaaagctgtggtggggcatttcagagcacaaggtgtgccgttaaagaggaagttgagggaatttcctgtgactgaagacgctcttcttcctgttggtacttcactcggtgtccgccattttgttccgggacagtacgttgatgtcactgggatcactcgaggaaaaggttttcagggatgcatgaaaagacatggtttcagtggaatgccggcatcacatggtgcttcattgtcccatcgaagcgggggttccacagggcaaagagatgctcctggaaaggtgttcaagggcagaaagatggctgggagaatgggtgcagatcagaggacagtaaagaacgtttgggtctacaagatcgatcctgcgaggaacctcatgtgggtgagaggacaagttcctggtgcagaaggaaactttgtgttcataaaagatgcatggtgcaagaaaccagacatctcaaagcttccgtttccaacttacttagctccagaagatgaagatccatcagaattagaaccgttggttgcagatcttggagaagttgacccatttatgttggcagagtgatgaaaacagcatgatcttgatctttatttgggcttttacaatgattagagaccagaaagaagctgtggaagtgaaggaatcacagagctaaagctttttgcagatgaatttgtctttttcttattttagttgtttggatgtatgatttgaaaacgattaaatagaggaatttaggcttgctcgcatttgttatatcacaatgcttaagagtttgcaataagcaatgaggaaaacacaag

SEQ ID NO: 36067 - protein, 324 aa, Arabidopsis thaliana
  peptide (1)..(324): Ceres Seq. ID no. 12321767
MAAVPRGLLSRINQFLSIRSITPSSSESLPHCSSFFLLRRFSSDTGLMDGGGSDIIGAQTRIIEAKQGEMSSRSKRTGIIAVKCGMTALWDKWGKRIPISILWVDDNIVSQVKTVEKEGIFALQIGCGQKKPKHLSKAVVGHFRAQGVPLKRKLREFPVTEDALLPVGTSLGVRHFVPGQYVDVTGITRGKGFQGCMKRHGFSGMPASHGASLSHRSGGSTGQRDAPGKVFKGRKMAGRMGADQRTVKNVWVYKIDPARNLMWVRGQVPGAEGNFVFIKDAWCKKPDISKLPFPTYLAPEDEDPSELEPLVADLGEVDPFMLAE

SEQ ID NO: 36068 - protein, 277 aa, Arabidopsis thaliana
  peptide (1)..(277): Ceres Seq. ID no. 12321768
MDGGGSDIIGAQTRIIEAKQGEMSSRSKRTGIIAVKCGMTALWDKWGKRIPISILWVDDNIVSQVKTVEKEGIFALQIGCGQKKPKHLSKAVVGHFRAQGVPLKRKLREFPVTEDALLPVGTSLGVRHFVPGQYVDVTGITRGKGFQGCMKRHGFSGMPASHGASLSHRSGGSTGQRDAPGKVFKGRKMAGRMGADQRTVKNVWVYKIDPARNLMWVRGQVPGAEGNFVFIKDAWCKKPDISKLPFPTYLAPEDEDPSELEPLVADLGEVDPFMLAE

SEQ ID NO: 36069 - protein, 255 aa, Arabidopsis thaliana
  peptide (1)..(255): Ceres Seq. ID no. 12321769
MSSRSKRTGIIAVKCGMTALWDKWGKRIPISILWVDDNIVSQVKTVEKEGIFALQIGCGQKKPKHLSKAVVGHFRAQGVPLKRKLREFPVTEDALLPVGTSLGVRHFVPGQYVDVTGITRGKGFQGCMKRHGFSGMPASHGASLSHRSGGSTGQRDAPGKVFKGRKMAGRMGADQRTVKNVWVYKIDPARNLMWVRGQVPGAEGNFVFIKDAWCKKPDISKLPFPTYLAPEDEDPSELEPLVADLGEVDPFMLAE

SEQ ID NO: 36070 - DNA, 964 bp, Arabidopsis thaliana
  misc_feature (1)..(964): Ceres Seq. ID no. 13647095
  misc_feature (1)..(964): Ortholog of  Ceres SEQ ID NO 13591776 as cited in SEQ ID NO 20695
  misc_feature (1)..(964): Ortholog of  Ceres SEQ ID NO 13595072 as cited in SEQ ID NO 55971
atcataactcacactctctcttcaatcctttcctttcattgtagttaaacaaagattacgattatggccacatcagctatccaacaatcctccttcgccggccaaacggctctcaagccctccagcgacctcatccaaaaggtgggcgtcttgggcggtggccgtgtgaccatgcgtcgtaccgtcaagtctactccccaaagcatttggtatggaccagaccgtcccaagtacttgggaccattctcggagaacacaccgtcttacttaactggagaataccccggagactacggttgggacaccgctggactctcggctgacccggagacattcgctaagaaccgtgagcttgaagtaatccacagcagatgggctatgttgggtgctctcggatgcacattccctgagattctctccaagaacggtgttaaattcggagaagccgtgtggttcaaggcaggctctcagattttctcagaaggaggtcttgattacctcggaaaccctaacttgatccacgcgcaaagcatcttaagccatttgggctgttcaagttgtgctcatggggttcattgaaggctacagaatcggaggtggaccactcggagaaggacttgacccgctttaycccggaggtgcgttcgacccattgaacttggctgaggatccagaggctttctctgagctgaaggtgaaggagctcaagaacggtcgtcttgccatgttctctatgtttggattctttgtccaagccattgttactggtaaaggycccattgagaacttrtttgatcatttggctgatcctgtggctaacaacgcctggtyttacgctactaactttgtccccggaaagtaawtatcttttawgtatttgcytmataatctctcygctttgtaaactygtgattgtgtaatattgacgtttgatgygaatttggcacttaatgatgtttcttgg

SEQ ID NO: 36071 - protein, 171 aa, Arabidopsis thaliana
  peptide (1)..(171): Ceres Seq. ID no. 15218720
MATSAIQQSSFAGQTALKPSSDLIQKVGVLGGGRVTMRRTVKSTPQSIWYGPDRPKYLGPFSENTPSYLTGEYPGDYGWDTAGLSADPETFAKNRELEVIHSRWAMLGALGCTFPEILSKNGVKFGEAVWFKAGSQIFSEGGLDYLGNPNLIHAQSILSHLGCSSCAHGVH

SEQ ID NO: 36072 - protein, 135 aa, Arabidopsis thaliana
  peptide (1)..(135): Ceres Seq. ID no. 15218721
MRRTVKSTPQSIWYGPDRPKYLGPFSENTPSYLTGEYPGDYGWDTAGLSADPETFAKNRELEVIHSRWAMLGALGCTFPEILSKNGVKFGEAVWFKAGSQIFSEGGLDYLGNPNLIHAQSILSHLGCSSCAHGVH

SEQ ID NO: 36073 - protein, 98 aa, Arabidopsis thaliana
  peptide (1)..(98): Ceres Seq. ID no. 15218722
  misc_feature (22)..(22): Xaa is any aa, unknown or other
  misc_feature (70)..(70): Xaa is any aa, unknown or other
  misc_feature (75)..(75): Xaa is any aa, unknown or other
  misc_feature (89)..(89): Xaa is any aa, unknown or other
MGFIEGYRIGGGPLGEGLDPLXPGGAFDPLNLAEDPEAFSELKVKELKNGRLAMFSMFGFFVQAIVTGKXPIENXFDHLADPVANNAWXYATNFVPGK

SEQ ID NO: 36074 - DNA, 939 bp, Arabidopsis thaliana
  misc_feature (1)..(939): Ceres Seq. ID no. 12333678
  misc_feature (1)..(939): Ortholog of  Ceres SEQ ID NO 13638849 as cited in SEQ ID NO 52046
  misc_feature (1)..(939): Ortholog of  Ceres SEQ ID NO 13599613 as cited in SEQ ID NO 0
aaaaagtacgaaaggaaaatatgagtgaggagaagaggaagcaacacttcgtgctagtacatggtgcgtgccacggcgcatggtgctggtacaaggttaagcctcttctcgaggctttgggccatcgtgtaaccgccttagacctagctgcttccggtatagacacaaccaggtcaatcactgacatttctacatgtgaacaatattctgagccattgatgcagctaatgacttcattgccgaatgatgagaaggttgtactcgttggtcatagctttggaggtttgagtttagccttagccatggataagtttcccgataaaatctctgtctctgtcttcgtgactgcattcatgcccgacaccaaacactcaccatcgttcgtcgaggaaaagtttgcaagcagcatgacaccagaaggatggatgggctctgagctcgagacatatggttcagataattccggcttgtctgtgttcttcagcaccgacttcatgaagcaccgtctctaccaactttctcctgtggaggatcttgagcttggattgcttctaaagaggcctagttcattgtttattaatgaattatcgaagatggagaacttttctgagaaagggtatggatctgttcctcgagcttacattgtgtgcaaagaggacaacattatctcggaagaccatcaacgatggatgatccataattatccggcgaatttagtgattgagatggaagagactgatcatatgccaatgttttgcaaacctcaactactaagtgaccatctattggcaatcgctgacaatttctgttaaataatattttgatgaaaatgtatttggagtggatacaatcaaacgtgttctaaaatggatcttcataaaggttcaaacttatttcttagttcttactatggttgaaatgagaaacctaagtcaatcg

SEQ ID NO: 36075 - protein, 269 aa, Arabidopsis thaliana
  peptide (1)..(269): Ceres Seq. ID no. 12333679
KVRKENMSEEKRKQHFVLVHGACHGAWCWYKVKPLLEALGHRVTALDLAASGIDTTRSITDISTCEQYSEPLMQLMTSLPNDEKVVLVGHSFGGLSLALAMDKFPDKISVSVFVTAFMPDTKHSPSFVEEKFASSMTPEGWMGSELETYGSDNSGLSVFFSTDFMKHRLYQLSPVEDLELGLLLKRPSSLFINELSKMENFSEKGYGSVPRAYIVCKEDNIISEDHQRWMIHNYPANLVIEMEETDHMPMFCKPQLLSDHLLAIADNFC

SEQ ID NO: 36076 - protein, 263 aa, Arabidopsis thaliana
  peptide (1)..(263): Ceres Seq. ID no. 12333680
MSEEKRKQHFVLVHGACHGAWCWYKVKPLLEALGHRVTALDLAASGIDTTRSITDISTCEQYSEPLMQLMTSLPNDEKVVLVGHSFGGLSLALAMDKFPDKISVSVFVTAFMPDTKHSPSFVEEKFASSMTPEGWMGSELETYGSDNSGLSVFFSTDFMKHRLYQLSPVEDLELGLLLKRPSSLFINELSKMENFSEKGYGSVPRAYIVCKEDNIISEDHQRWMIHNYPANLVIEMEETDHMPMFCKPQLLSDHLLAIADNFC

SEQ ID NO: 36077 - protein, 197 aa, Arabidopsis thaliana
  peptide (1)..(197): Ceres Seq. ID no. 12333681
MQLMTSLPNDEKVVLVGHSFGGLSLALAMDKFPDKISVSVFVTAFMPDTKHSPSFVEEKFASSMTPEGWMGSELETYGSDNSGLSVFFSTDFMKHRLYQLSPVEDLELGLLLKRPSSLFINELSKMENFSEKGYGSVPRAYIVCKEDNIISEDHQRWMIHNYPANLVIEMEETDHMPMFCKPQLLSDHLLAIADNFC

SEQ ID NO: 36078 - DNA, 647 bp, Arabidopsis thaliana
  misc_feature (1)..(647): Ceres Seq. ID no. 12334215
  misc_feature (1)..(647): Ortholog of  Ceres SEQ ID NO 15179051 as cited in SEQ ID NO 0
tcgaaaatcatcaatacaaacttagtagtgtattctttatacgtataataacatcccttgtgatcaaacaagtaaaccattcaaaagatgaaaggaagaattttgattttgagtttgctcataatgagtctggtcatggcacaagttcaagtagaagcaaagatctgctgcccttccaaccaagctagaaatggctatagtgtatgccgtataaggttttccaagggaaggtgtatgcaagtgagtggatgccaaaactctgatacatgccctcgaggttgggtaaacgccattctcgaaaactcagctgatgctaccaatgagcactgcaagttagggtgtgaaacttctgtgtgtggtgccatgaacactctccagaactctgatgcaagtgaaattgtgaatggagcgtcggaacaatgtgccaagggatgttctattttctgtaccaagagctatgtagtcccacctgggccgcctaaactgttgtaatggtcgtatatgtgaaaaaacaaatgctagactcttgctattctggtttgtgtgtgtgtgtgtgcatgtgtcgtagaaggtttgttcgatcactagattgtacatgccctctacttcctataacctaaataaagagttaaacgtacgtgtctttt

SEQ ID NO: 36079 - protein, 134 aa, Arabidopsis thaliana
  peptide (1)..(134): Ceres Seq. ID no. 12334216
MKGRILILSLLIMSLVMAQVQVEAKICCPSNQARNGYSVCRIRFSKGRCMQVSGCQNSDTCPRGWVNAILENSADATNEHCKLGCETSVCGAMNTLQNSDASEIVNGASEQCAKGCSIFCTKSYVVPPGPPKLL

SEQ ID NO: 36080 - protein, 122 aa, Arabidopsis thaliana
  peptide (1)..(122): Ceres Seq. ID no. 12334217
MSLVMAQVQVEAKICCPSNQARNGYSVCRIRFSKGRCMQVSGCQNSDTCPRGWVNAILENSADATNEHCKLGCETSVCGAMNTLQNSDASEIVNGASEQCAKGCSIFCTKSYVVPPGPPKLL

SEQ ID NO: 36081 - protein, 118 aa, Arabidopsis thaliana
  peptide (1)..(118): Ceres Seq. ID no. 12334218
MAQVQVEAKICCPSNQARNGYSVCRIRFSKGRCMQVSGCQNSDTCPRGWVNAILENSADATNEHCKLGCETSVCGAMNTLQNSDASEIVNGASEQCAKGCSIFCTKSYVVPPGPPKLL

SEQ ID NO: 36082 - DNA, 3323 bp, Arabidopsis thaliana
  misc_feature (1)..(3323): Ceres Seq. ID no. 13488061
  misc_feature (1)..(3323): Ortholog of  Ceres SEQ ID NO 12593464 as cited in SEQ ID NO 69039
  misc_feature (1)..(3323): Ortholog of  Ceres SEQ ID NO 13596244 as cited in SEQ ID NO 69307
acttgggatttaaataccacttttttgcttcttgtacccctgcttcatcatcacgcacacctctcttaacttcttcgatctcttctttttctctacacgattcgattgattcaagtatcaatcaatcgaatccgagataagtcatgagtttcttcaaatgggtttcttttgttttgatccttcacttgcttaatccgactctgatttcatgttcctctaatgggttatctcaaataccttcaaagtttcttactttggctaaaaggaatgattttttcgattggatggttggaatcagaaggagaatccatgagaatccagagttaggttatgaggaagtagagacatctaagcttgttagagcagagttggagaagatgggtgtttcttataagtacccagttgctgttactggtgttgttgggtatgttggaactggtcatgctccttttgttgctttaagggctgatatggatgcacttgctatgcaggaaatggtggaatgggaacacaagagtaaggttccagggaagatgcacgcttgtggacatgacgctcacactacgatgcttctcggtgctgcaaaattgctcaaagaacatgaagaagagctacagggcacagtggttctagttttccaaccagctgaggaaggaggaggaggtgcaaagaagattgtggaggctggagtgttggagaatgtgagtgcaatctttggattacatgtcacaaatcaattggcattaggtcaagtgagctcgagagagggtcctatgttggctggtagtggctttttcaaagctaagataagcgggaaaggaggccacgcagctcttccgcagcataccatagatccgatactggcagcttcaaatgttattgttagcttacaacacctcgtttcacgagaggcagatcctttagactctcaggtggttacagttgctaaatttgaaggcggtggtgctttcaatgtgattcctgactctgttactatcggtggtacattccgagctttttcaactaaaagctttatgcaactcaagaaaagaattgagcaggttatcacaaggcaagcgagcgtgaatatgtgtaatgcaacagtggatttcattgaagaggagaaaccttttttcccaccaactgtaaatgacaaagccttacaccagtttttcaagaacgtttcaggcgatatgttagggattgagaattacgtcgagatgcaaccattaatgggatcagaagatttctctttctaccaacaagcaatcccgggacattttagcttcgttggaatgcaaaacaaagctcgttcaccaatggcgagccctcactcgccgtactttgaagttaacgaagaattactaccttatggtgcttcccttcatgcttccatggccacaagatatcttcttgaactaaaagcttcaactctaaataagagtaacaaaaaagatgaactttgatgccaacaaacattggcttctcctattcttctactctgaaaaatgtcaaaacatggtaacagttttttcttttttacagagcctgccatgtaaagattaataaattgttatgcagtgtcaagcttctattaaatccaagaaatgttattactgcaaacaaaaacagatttgggccattgcaatgacagagctgaaacggtcaatttaaacaaatcagattgagagatttcagaagattcgacgcataaacaaatgctaaaattcgagagcttgttaacatgtctaactgataaagattcaatttttctttcttgttttttcttcttcttctttagattcaagttctgatctttgcttctttgaaaatcacaaatcttttcttctgggtttctataaaaaacccattttttgttgttgtcgtacaaacatttcccgtaaagattggatttttgtgtaagcatttgaagatagctaagaaagtgagaagcttttagatgaaagtgatggtaatggagatggaggaatgtgttaaagaaaatggttcatcaacacctaaatctagagtcacaaaccaatctagagctctcttaccgttgcgtctgcttcagattctgttattgtttcttgttttgactcttgggatctctgttgttagtatacacatgatcaagtttttgaagattcaacgtttagatcctgtggctccaattactttgctctctacgtataatcatgagagtgttactttagatagctttattagacctccttccaatgtttggcacacaatgaatgatagtgaattgctttggcgtgcttctatagagccgcaaagaaatggttatccgtttaaacgtgtccctaaattggctttcatgtttcttgccaaaggtcctttaccatttgctccactttgggagaagttctgtaaaggacatgagggtctttattctatctatgttcattcgttgcctagttacaaatcggatttttcgaggtcgtctgtgttttacagaagatatatccctagtcaggctgtggcatggggagagatgagtatgggtgaagcagagaggaggcttttggctaatgcgttgcttgatatctctaatgaatggtttgttctgctgtctgaatcatgcattcctctgcgaggtttcagctttatctatagttatgtctctgaatcaagatatagttttatgggtgctgctgatgaggaaggacctgatggaagaggcagatacaggacagaaatggaacctgagatcacactaagccagtggcgaaaagggtctcagtggtttgaaattaaccggaaactcgctgttgagattgttcaagacactacttactatcccaaattcaaagagttttgtagacctccatgctatgtagatgaacattacttcccaacaatgttgtctatgaaacatcgggttttgcttgctaataggacattgacatggacagattggtcacgtggtggtgctcatccagctacttttggtaaggctgatgtaacggaaagttttctcaagaagcttacaggagccaaatcttgcctctacaatgatcatcagtctcaaatctgttatctctttgccagaaagtttgctccaagcgcattggagcctttactgcaacttgcacccaagattcttgagttaggctctaacatatcttccactcgtcactcttggtatttgttttgagaagttcttgagtttagagtatgatcatggaccgaactgatcattagttaatctcctctttcacaatgatattacaggtattgtgaaggttaaacatattttttgacatgacagattattgaataaagggagttttgagtcc

SEQ ID NO: 36083 - protein, 440 aa, Arabidopsis thaliana
  peptide (1)..(440): Ceres Seq. ID no. 13488062
MSFFKWVSFVLILHLLNPTLISCSSNGLSQIPSKFLTLAKRNDFFDWMVGIRRRIHENPELGYEEVETSKLVRAELEKMGVSYKYPVAVTGVVGYVGTGHAPFVALRADMDALAMQEMVEWEHKSKVPGKMHACGHDAHTTMLLGAAKLLKEHEEELQGTVVLVFQPAEEGGGGAKKIVEAGVLENVSAIFGLHVTNQLALGQVSSREGPMLAGSGFFKAKISGKGGHAALPQHTIDPILAASNVIVSLQHLVSREADPLDSQVVTVAKFEGGGAFNVIPDSVTIGGTFRAFSTKSFMQLKKRIEQVITRQASVNMCNATVDFIEEEKPFFPPTVNDKALHQFFKNVSGDMLGIENYVEMQPLMGSEDFSFYQQAIPGHFSFVGMQNKARSPMASPHSPYFEVNEELLPYGASLHASMATRYLLELKASTLNKSNKKDEL

SEQ ID NO: 36084 - protein, 406 aa, Arabidopsis thaliana
  peptide (1)..(406): Ceres Seq. ID no. 13488063
MKVMVMEMEECVKENGSSTPKSRVTNQSRALLPLRLLQILLLFLVLTLGISVVSIHMIKFLKIQRLDPVAPITLLSTYNHESVTLDSFIRPPSNVWHTMNDSELLWRASIEPQRNGYPFKRVPKLAFMFLAKGPLPFAPLWEKFCKGHEGLYSIYVHSLPSYKSDFSRSSVFYRRYIPSQAVAWGEMSMGEAERRLLANALLDISNEWFVLLSESCIPLRGFSFIYSYVSESRYSFMGAADEEGPDGRGRYRTEMEPEITLSQWRKGSQWFEINRKLAVEIVQDTTYYPKFKEFCRPPCYVDEHYFPTMLSMKHRVLLANRTLTWTDWSRGGAHPATFGKADVTESFLKKLTGAKSCLYNDHQSQICYLFARKFAPSALEPLLQLAPKILELGSNISSTRHSWYLF

SEQ ID NO: 36085 - protein, 403 aa, Arabidopsis thaliana
  peptide (1)..(403): Ceres Seq. ID no. 13488064
MVMEMEECVKENGSSTPKSRVTNQSRALLPLRLLQILLLFLVLTLGISVVSIHMIKFLKIQRLDPVAPITLLSTYNHESVTLDSFIRPPSNVWHTMNDSELLWRASIEPQRNGYPFKRVPKLAFMFLAKGPLPFAPLWEKFCKGHEGLYSIYVHSLPSYKSDFSRSSVFYRRYIPSQAVAWGEMSMGEAERRLLANALLDISNEWFVLLSESCIPLRGFSFIYSYVSESRYSFMGAADEEGPDGRGRYRTEMEPEITLSQWRKGSQWFEINRKLAVEIVQDTTYYPKFKEFCRPPCYVDEHYFPTMLSMKHRVLLANRTLTWTDWSRGGAHPATFGKADVTESFLKKLTGAKSCLYNDHQSQICYLFARKFAPSALEPLLQLAPKILELGSNISSTRHSWYLF

SEQ ID NO: 36086 - DNA, 786 bp, Arabidopsis thaliana
  misc_feature (1)..(786): Ceres Seq. ID no. 13490015
  misc_feature (1)..(786): Ortholog of  Ceres SEQ ID NO 12610177 as cited in SEQ ID NO 52181
tttcttcgtttctttgcaaaagaccagcgataattatgaacaaaggcggtggatccggtggcggatccggtggaggaagcggtccaacggccgccgccgccgccgcggctttacagaagcaaaaggcgttgttacagagagtggagactgacatcacatctgtcgtcgataacttcacgcagatcgtcaatgtttcaagggtgagtgatccgccggtgaagaactcgcaggagacatacatgatggagatgcgagcttctagaatggttcaagcagctgattctcttttgaaactcgtatcagaacttaagcaaacagcgatattttcaggatttgcatcactaaacgatcatgtagaacaaagaatagaagagtttgatcaagaggccgagaagacaaatcgattgttggctagaattgctgatgatgcatctgccaatcttaaagagctcgagtctcactattactcttctgctcagagattgactctagacatctgatattagaatgcctggagacaccagaggaaacagataaaacaattggttcataaaccagaggaaacggccatcgaaggatatgcagtttgaagtcatggacaacgttttggactatcctttcccacattgatcatatttcctctctcaattcgcatattacttagcaatcttaaatgttccagtctgatgaacaagcgtttgatgttttcatcaatcattagtgatttttttgctgttatcctcttgtatgttttgataattacgtgaaattacattctcttaacct

SEQ ID NO: 36087 - protein, 165 aa, Arabidopsis thaliana
  peptide (1)..(165): Ceres Seq. ID no. 13490016
SSFLCKRPAIIMNKGGGSGGGSGGGSGPTAAAAAAALQKQKALLQRVETDITSVVDNFTQIVNVSRVSDPPVKNSQETYMMEMRASRMVQAADSLLKLVSELKQTAIFSGFASLNDHVEQRIEEFDQEAEKTNRLLARIADDASANLKELESHYYSSAQRLTLDI

SEQ ID NO: 36088 - protein, 154 aa, Arabidopsis thaliana
  peptide (1)..(154): Ceres Seq. ID no. 13490017
MNKGGGSGGGSGGGSGPTAAAAAAALQKQKALLQRVETDITSVVDNFTQIVNVSRVSDPPVKNSQETYMMEMRASRMVQAADSLLKLVSELKQTAIFSGFASLNDHVEQRIEEFDQEAEKTNRLLARIADDASANLKELESHYYSSAQRLTLDI

SEQ ID NO: 36089 - protein, 86 aa, Arabidopsis thaliana
  peptide (1)..(86): Ceres Seq. ID no. 13490018
MMEMRASRMVQAADSLLKLVSELKQTAIFSGFASLNDHVEQRIEEFDQEAEKTNRLLARIADDASANLKELESHYYSSAQRLTLDI

SEQ ID NO: 36090 - DNA, 691 bp, Arabidopsis thaliana
  misc_feature (1)..(691): Ceres Seq. ID no. 12369923
  misc_feature (1)..(691): Ortholog of  Ceres SEQ ID NO 12610267 as cited in SEQ ID NO 51993
  misc_feature (1)..(691): Ortholog of  Ceres SEQ ID NO 13495070 as cited in SEQ ID NO 53216
  misc_feature (1)..(691): Ortholog of  Ceres SEQ ID NO 12598241 as cited in SEQ ID NO 61025
  misc_feature (1)..(691): Ortholog of  Ceres SEQ ID NO 13661333 as cited in SEQ ID NO 61620
  misc_feature (1)..(691): Ortholog of  Ceres SEQ ID NO 15173749 as cited in SEQ ID NO 61775
  misc_feature (1)..(691): Ortholog of  Ceres SEQ ID NO 13596812 as cited in SEQ ID NO 62283
  misc_feature (1)..(691): Ortholog of  Ceres SEQ ID NO 13623021 as cited in SEQ ID NO 0
  misc_feature (1)..(691): Ortholog of  Ceres SEQ ID NO 14302179 as cited in SEQ ID NO 0
aaacccccccaatcctcctcactcttccctatcctcttcatttttcccaatcatcaaacacaagattagagttcgattctccaaagaaaatatggctaattcagcgtctgggatgcatgtgaatgatgaatgcaagattaagttcttagagttgaaagcaaagaggacttacaggttcattgtgttcaaaattgatgagaaggcacagcaagtgcaaatagaaaagcttgggaatccagaagaaacttacgacgattttaccagctctatccccgatgacgaatgccgatacgctgtctacgattttgatttcaccacagaggacaattgtcagaagagcaagatctttttcatcgcgtggtcacctgatacatcgagagttcggagtaagatgttgtatgcaagctcaaaagacaggttcaagagagaaatggaaggaattcaagttgaattgcaagcaactgatcctagtgagatgagccttgacatcatcaaaggacgactcaatctctgagcaacaacaacattctaatgcatcctttattcgtttcaaattgttaagctttaacatgccattttcttggaccatttctgcttttgcttgtccgctatattacattttgtgtggattcaatgtctttaaattgttttgtttttcacaagaaagaaaaaaaagaatgataattatttt

SEQ ID NO: 36091 - protein, 170 aa, Arabidopsis thaliana
  peptide (1)..(170): Ceres Seq. ID no. 12369924
NPPNPPHSSLSSSFFPIIKHKIRVRFSKENMANSASGMHVNDECKIKFLELKAKRTYRFIVFKIDEKAQQVQIEKLGNPEETYDDFTSSIPDDECRYAVYDFDFTTEDNCQKSKIFFIAWSPDTSRVRSKMLYASSKDRFKREMEGIQVELQATDPSEMSLDIIKGRLNL

SEQ ID NO: 36092 - protein, 140 aa, Arabidopsis thaliana
  peptide (1)..(140): Ceres Seq. ID no. 12369925
MANSASGMHVNDECKIKFLELKAKRTYRFIVFKIDEKAQQVQIEKLGNPEETYDDFTSSIPDDECRYAVYDFDFTTEDNCQKSKIFFIAWSPDTSRVRSKMLYASSKDRFKREMEGIQVELQATDPSEMSLDIIKGRLNL

SEQ ID NO: 36093 - protein, 133 aa, Arabidopsis thaliana
  peptide (1)..(133): Ceres Seq. ID no. 12369926
MHVNDECKIKFLELKAKRTYRFIVFKIDEKAQQVQIEKLGNPEETYDDFTSSIPDDECRYAVYDFDFTTEDNCQKSKIFFIAWSPDTSRVRSKMLYASSKDRFKREMEGIQVELQATDPSEMSLDIIKGRLNL

SEQ ID NO: 36094 - DNA, 1620 bp, Arabidopsis thaliana; identical to SEQ ID NO: 22730
  misc_feature (1)..(1620): Ceres Seq. ID no. 12322395
  misc_feature (1)..(1620): Ortholog of  Ceres SEQ ID NO 14312212 as cited in SEQ ID NO 54399
  misc_feature (1)..(1620): Ortholog of  Ceres SEQ ID NO 15225341 as cited in SEQ ID NO 55222
  misc_feature (1)..(1620): Ortholog of  Ceres SEQ ID NO 14311755 as cited in SEQ ID NO 57271
  misc_feature (1)..(1620): Ortholog of  Ceres SEQ ID NO 15171156 as cited in SEQ ID NO 58259
  misc_feature (1)..(1620): Ortholog of  Ceres SEQ ID NO 14302212 as cited in SEQ ID NO 66507
  misc_feature (1)..(1620): Ortholog of  Ceres SEQ ID NO 13653980 as cited in SEQ ID NO 69253

SEQ ID NO: 36095 - protein, 388 aa, Arabidopsis thaliana; identical to SEQ ID NO: 22731
  peptide (1)..(388): Ceres Seq. ID no. 12322396

SEQ ID NO: 36096 - protein, 250 aa, Arabidopsis thaliana; identical to SEQ ID NO: 22732
  peptide (1)..(250): Ceres Seq. ID no. 12322397

SEQ ID NO: 36097 - protein, 249 aa, Arabidopsis thaliana; identical to SEQ ID NO: 22733
  peptide (1)..(249): Ceres Seq. ID no. 12322398

SEQ ID NO: 36098 - DNA, 621 bp, Arabidopsis thaliana
  misc_feature (1)..(621): Ceres Seq. ID no. 12334211
  misc_feature (1)..(621): Ortholog of  Ceres SEQ ID NO 13583505 as cited in SEQ ID NO 62240
actttcgagtatcgagtcgtcgttcttcttcttcctctgagagagagatctgcggaaaacgaaagcgagatttatcaggttcggtgattctttgtggagaagaagctcgcgataagtcaacatgagcaagccaatggaagaggataccaatcagggcaagactgaggaagaggaattcaacaccgggccactctctgttcttatgatgagcgtcaagaataacactcaggttttaatcaattgccggaacaacaggaaacttcttgggcgagtgagggcgtttgacagacactgcaacatggttcttgaaaatgtcagagagatgtggactgaggttccgaaaactgggaaaggcaagaagaaagcacttccggtgaacagagatcggttcataagcaagatgtttctacgtggagactcggtcattatcgtcctcaggaatccaaaatgagaggaagagagacttaagagacatgttccttgtttgttgtgctaaaactgataaattcttgtaggtagtagcatcttttaaagttattcgtcacattttcgtttatgtccgaattgacaagatcttttaaagatcttttaaagacatgttccttgtttgttgtttgttcg

SEQ ID NO: 36099 - protein, 109 aa, Arabidopsis thaliana; identical to SEQ ID NO: 22047
  peptide (1)..(109): Ceres Seq. ID no. 12334212

SEQ ID NO: 36100 - protein, 105 aa, Arabidopsis thaliana; identical to SEQ ID NO: 22048
  peptide (1)..(105): Ceres Seq. ID no. 12334213

SEQ ID NO: 36101 - protein, 82 aa, Arabidopsis thaliana; identical to SEQ ID NO: 22049
  peptide (1)..(82): Ceres Seq. ID no. 12334214

SEQ ID NO: 36102 - DNA, 1282 bp, Arabidopsis thaliana
  misc_feature (1)..(1282): Ceres Seq. ID no. 13490127
  misc_feature (1)..(1282): Ortholog of  Ceres SEQ ID NO 13596048 as cited in SEQ ID NO 68476
  misc_feature (1)..(1282): Ortholog of  Ceres SEQ ID NO 12589137 as cited in SEQ ID NO 0
agatcaaccaaaggaagcgaagaagaagaagactttatacactctcgacgctattgatttcgtctgtgcagttttgtttctctatcagttagttttaaagatgagttcttcagagagtgtggaaaacgagtgcatgtgttgggctgcaagagatccatctggtcttctttctcctcatactatcactcgcaggtctgttacaactgacgatgtttcactcacaatcactcattgtggagtgtgttacgctgatgttatctggagtagaaaccaacatggagactccaagtaccctttggttcctgggcatgagattgctggaatagtgactaaggttgggcctaatgttcaacgattcaaagttggagaccatgttggtgttggaacgtatgttaactcctgcagggagtgtgaatattgtaatgaaggacaagaagttaattgtgcgaaaggagtttttactttcaatggcattgatcatgatggctctgttactaaaggaggctactctagtcacattgttgttcatgaaaggtactgctacaagatacctgtggactatcccttggaatcagctgcaccattactctgtgctggaatcacggtttatgctcctatgatgcgtcacaatatgaatcaacctggtaaatctcttggggtgatcgggctaggtggtcttggacacatggcggttaagtttggcaaggcttttggacttagtgttacggtttttagcaccagcatttccaagaaagaagaagctttgaatctgctaggagctgagaatttcgttatctcatctgaccatgaccagatgaaggcactagagaaatctctagactttctagttgacacagcatctggtgatcacgcgtttgatccttacatgtctctcttgaagattgctggaacttatgtattggttggtttcccaagtgaaattaaaatcagtcctgccaatctcaatcttggtatgagaatgctcgctggaagtgtaaccggggggaccaaaataacacagcaaatgttagatttctgtgcagctcataagatttatccaaacatagaggtgattcccattcaaaagataaacgaagctctcgaaagagtggtgaagaaggacatcaagtaccgtttcgtgattgacatcaagaactccctcaaatagatgttgctcaaaggaaggaataatggagtctgtaataagagaataatactcactgctacaatctttattacgtattttctcgtttttcattagtaaagcaaataaattaagact

SEQ ID NO: 36103 - protein, 388 aa, Arabidopsis thaliana
  peptide (1)..(388): Ceres Seq. ID no. 13490128
DQPKEAKKKKTLYTLDAIDFVCAVLFLYQLVLKMSSSESVENECMCWAARDPSGLLSPHTITRRSVTTDDVSLTITHCGVCYADVIWSRNQHGDSKYPLVPGHEIAGIVTKVGPNVQRFKVGDHVGVGTYVNSCRECEYCNEGQEVNCAKGVFTFNGIDHDGSVTKGGYSSHIVVHERYCYKIPVDYPLESAAPLLCAGITVYAPMMRHNMNQPGKSLGVIGLGGLGHMAVKFGKAFGLSVTVFSTSISKKEEALNLLGAENFVISSDHDQMKALEKSLDFLVDTASGDHAFDPYMSLLKIAGTYVLVGFPSEIKISPANLNLGMRMLAGSVTGGTKITQQMLDFCAAHKIYPNIEVIPIQKINEALERVVKKDIKYRFVIDIKNSLK

SEQ ID NO: 36104 - protein, 355 aa, Arabidopsis thaliana; identical to SEQ ID NO: 23334
  peptide (1)..(355): Ceres Seq. ID no. 13490129

SEQ ID NO: 36105 - protein, 344 aa, Arabidopsis thaliana; identical to SEQ ID NO: 23335
  peptide (1)..(344): Ceres Seq. ID no. 13490130

SEQ ID NO: 36106 - DNA, 952 bp, Arabidopsis thaliana
  misc_feature (1)..(952): Ceres Seq. ID no. 12334005
  misc_feature (1)..(952): Ortholog of  Ceres SEQ ID NO 12616101 as cited in SEQ ID NO 63367
ctgaagaacgaagaaccgtctctaaaactccgacgaacgaaaaatgaagtcattagcttcgccgccgtgtctccgcctgataccgacggcacaccgtcagctcaattcgcgtcaatcttcctccgcctgttatatacacggtggctcttctgtgaacaaatccaataatctctcattctcctcatccacatccggatttgcgtcaccactagctgtagagaaggaattacgctcttcattcgtacagacggctgctgttcgccatgttacggggtctcttatcagaggcgaaggtcttagattcgccatcgtggtagctcgtttcaatgaggttgtgactaagttgcttttggaaggagcgattgagactttcaagaagtattcagtcagagaagaagacattgaagttatttgggttcctggcagctttgaaattggtgttgttgcacaaaatcttgggaaatcgggaaaatttcatgctgttttatgtatcggcgctgtgataagaggagataccacacattatgatgctgttgccaactctgctgcgtctggagtactttctgctagcataaattcaggcgttccatgcatatttggtgtactgacttgcgaggacatggatcaggctctgaatcgatctggtggcaaagccggcaataagggagctgaaactgctttgacggcgctcgaaatggcgtcgttgtttgagcaccacctgaaatagctcggctcgttcgatggatgaacatgatcacgtatgagaacctcttgatgttgtcccatttggttacaatccagtctctgaaattgtttgtacctcaaagattgtcaaaatgttttacccttggttacaaaatcatttaaacgcttttgtaagcttctggccttgttttttttttttgaatcgtatgataataataattcctccgaattttgggggtctttctgt

SEQ ID NO: 36107 - protein, 227 aa, Arabidopsis thaliana
  peptide (1)..(227): Ceres Seq. ID no. 12334006
MKSLASPPCLRLIPTAHRQLNSRQSSSACYIHGGSSVNKSNNLSFSSSTSGFASPLAVEKELRSSFVQTAAVRHVTGSLIRGEGLRFAIVVARFNEVVTKLLLEGAIETFKKYSVREEDIEVIWVPGSFEIGVVAQNLGKSGKFHAVLCIGAVIRGDTTHYDAVANSAASGVLSASINSGVPCIFGVLTCEDMDQALNRSGGKAGNKGAETALTALEMASLFEHHLK

SEQ ID NO: 36108 - DNA, 611 bp, Arabidopsis thaliana
  misc_feature (1)..(611): Ceres Seq. ID no. 12393243
  misc_feature (1)..(611): Ortholog of  Ceres SEQ ID NO 12610243 as cited in SEQ ID NO 56206
aacaacacaacttcagctttaagacagctaaaactaaatacaaagaaacagagatgggtttggttacagaggaggtgagagctaaggcagagatgtacaccggagatgagatatgtagagagaagacaaagtgtttcctcaaggaaatatctatgcccaatggtttattaccattgaaggatatagaagaggttgggtatgacagagagtcaggtgttgtatggctgaagcagaagaagagcatcactcacaagttcacagagatagataagcttgtctcctatggaaccgaagtcacagcttttatagtcccagaagaacctccaaggaggaacctgccaaagaggaacctgccaaggagaagagcagcgaagccaccgaggccaaggaggctgttgcaatcaaggaggctgtcgcagtcaaagaggcggcctaatcagctcagcttcagcagataaaagagacccgaatttttaagtgtacttcaagaatttgaacaaatcatggagagttagtgtttctcactgctctaactatcatgtattatctacctaccacttgttgctgcttgttttacctgtaataagatatcaatatcatcctgttccacc

SEQ ID NO: 36109 - protein, 151 aa, Arabidopsis thaliana
  peptide (1)..(151): Ceres Seq. ID no. 12393244
QHNFSFKTAKTKYKETEMGLVTEEVRAKAEMYTGDEICREKTKCFLKEISMPNGLLPLKDIEEVGYDRESGVVWLKQKKSITHKFTEIDKLVSYGTEVTAFIVPEEPPRRNLPKRNLPRRRAAKPPRPRRLLQSRRLSQSKRRPNQLSFSR

SEQ ID NO: 36110 - protein, 134 aa, Arabidopsis thaliana
  peptide (1)..(134): Ceres Seq. ID no. 12393245
MGLVTEEVRAKAEMYTGDEICREKTKCFLKEISMPNGLLPLKDIEEVGYDRESGVVWLKQKKSITHKFTEIDKLVSYGTEVTAFIVPEEPPRRNLPKRNLPRRRAAKPPRPRRLLQSRRLSQSKRRPNQLSFSR

SEQ ID NO: 36111 - protein, 121 aa, Arabidopsis thaliana
  peptide (1)..(121): Ceres Seq. ID no. 12393246
MYTGDEICREKTKCFLKEISMPNGLLPLKDIEEVGYDRESGVVWLKQKKSITHKFTEIDKLVSYGTEVTAFIVPEEPPRRNLPKRNLPRRRAAKPPRPRRLLQSRRLSQSKRRPNQLSFSR

SEQ ID NO: 36112 - DNA, 768 bp, Arabidopsis thaliana
  misc_feature (1)..(768): Ceres Seq. ID no. 12738418
  misc_feature (1)..(768): Ortholog of  Ceres SEQ ID NO 14308727 as cited in SEQ ID NO 58726
  misc_feature (1)..(768): Ortholog of  Ceres SEQ ID NO 13663517 as cited in SEQ ID NO 66850
aatcttagggtttcgcgagatctcactctcactgagatagcttagcaatggagcagtcagaagagggtcaacagcaacagcaacagggagtgatggattatgtacctcctcatgcttatcagagtgggccagtaaatgcagcttcccatatggcattccaacaagctcaccacttccaccaccaccatcagcagcaacaacagaagcagcttcagatgttctgggctaaccaaatgcaagagatcgagcataccactgatttcaagaaccacacccttcccctagcccgcatcaagaagatcatgaaagctgatgaagatgtgaggatgatctctgcggaggctcctgtgatttttgccaaggcctgtgagatgttcattttggagctcactctacgtgcttggatccacaccgaggagaacaagaggaggaccttgcagaagaacgacatcgccgctgccatttccaggaccgacgttgatttccttgtggacataatcccgagggacgagctgaaagaagaaggtttaggcgtgaccaaagggaccataccatcggtggtgggttccccgccatactattacttgcaacaacaggggatgatgcaacactggccccaggagcaacaccctgatgagtcttaaaacttttcccctttcgtttgtttggttgtatcgtagtaaggtagctctgctctgctgggaaccatttctattgtgttctgtaatgacatagtagtatatccccagtctatatctatggcaatgc

SEQ ID NO: 36113 - protein, 198 aa, Arabidopsis thaliana
  peptide (1)..(198): Ceres Seq. ID no. 12738419
MEQSEEGQQQQQQGVMDYVPPHAYQSGPVNAASHMAFQQAHHFHHHHQQQQQKQLQMFWANQMQEIEHTTDFKNHTLPLARIKKIMKADEDVRMISAEAPVIFAKACEMFILELTLRAWIHTEENKRRTLQKNDIAAAISRTDVDFLVDIIPRDELKEEGLGVTKGTIPSVVGSPPYYYLQQQGMMQHWPQEQHPDES

SEQ ID NO: 36114 - protein, 183 aa, Arabidopsis thaliana
  peptide (1)..(183): Ceres Seq. ID no. 12738420
MDYVPPHAYQSGPVNAASHMAFQQAHHFHHHHQQQQQKQLQMFWANQMQEIEHTTDFKNHTLPLARIKKIMKADEDVRMISAEAPVIFAKACEMFILELTLRAWIHTEENKRRTLQKNDIAAAISRTDVDFLVDIIPRDELKEEGLGVTKGTIPSVVGSPPYYYLQQQGMMQHWPQEQHPDES

SEQ ID NO: 36115 - protein, 164 aa, Arabidopsis thaliana
  peptide (1)..(164): Ceres Seq. ID no. 12738421
MAFQQAHHFHHHHQQQQQKQLQMFWANQMQEIEHTTDFKNHTLPLARIKKIMKADEDVRMISAEAPVIFAKACEMFILELTLRAWIHTEENKRRTLQKNDIAAAISRTDVDFLVDIIPRDELKEEGLGVTKGTIPSVVGSPPYYYLQQQGMMQHWPQEQHPDES

SEQ ID NO: 36116 - DNA, 600 bp, Arabidopsis thaliana
  misc_feature (1)..(600): Ceres Seq. ID no. 12323078
  misc_feature (1)..(600): Ortholog of  Ceres SEQ ID NO 15168326 as cited in SEQ ID NO 60146
aaaaacattagaagaagaaatagaaatgagagctctcttgtgctcacaccgtttactaccattatcatctctctcaagaacaaccgtcaaaaccaaatctcacaatccaaaaaccctatatcctaacaacaaaccaagatgggaatccaagctccacgctggacctaaagggtttcaatcttctagaacctctgaaaaacccggccggccagacccggacccggaagacgatcccccgatacctcaagaagtgttcgagaggatgatggggaggattgtggtgtctgtgggaacaccactgggcttgggagtggcgatcttgaaagtactcgaagttttgaaggatagaaacgtctgggacgtgcctttgtgggttccatacttgaccacactcgtgacctttggttcgtcggctcttgggattgcgtacggaagcttgtccacaaacctggacccggccaagactaactctctttttggactcaaagaggcaaaggagaattgggtagagatgtggaaagaggaccaataatggtaatgtattaatgataataatcttgatttttctttgggaaagtctcataaaaacttttaagctgg

SEQ ID NO: 36117 - protein, 176 aa, Arabidopsis thaliana
  peptide (1)..(176): Ceres Seq. ID no. 12323079
KTLEEEIEMRALLCSHRLLPLSSLSRTTVKTKSHNPKTLYPNNKPRWESKLHAGPKGFQSSRTSEKPGRPDPDPEDDPPIPQEVFERMMGRIVVSVGTPLGLGVAILKVLEVLKDRNVWDVPLWVPYLTTLVTFGSSALGIAYGSLSTNLDPAKTNSLFGLKEAKENWVEMWKEDQ

SEQ ID NO: 36118 - protein, 168 aa, Arabidopsis thaliana
  peptide (1)..(168): Ceres Seq. ID no. 12323080
MRALLCSHRLLPLSSLSRTTVKTKSHNPKTLYPNNKPRWESKLHAGPKGFQSSRTSEKPGRPDPDPEDDPPIPQEVFERMMGRIVVSVGTPLGLGVAILKVLEVLKDRNVWDVPLWVPYLTTLVTFGSSALGIAYGSLSTNLDPAKTNSLFGLKEAKENWVEMWKEDQ

SEQ ID NO: 36119 - protein, 89 aa, Arabidopsis thaliana
  peptide (1)..(89): Ceres Seq. ID no. 12323081
MMGRIVVSVGTPLGLGVAILKVLEVLKDRNVWDVPLWVPYLTTLVTFGSSALGIAYGSLSTNLDPAKTNSLFGLKEAKENWVEMWKEDQ

SEQ ID NO: 36120 - DNA, 989 bp, Arabidopsis thaliana
  misc_feature (1)..(989): Ceres Seq. ID no. 12327130
  misc_feature (1)..(989): Ortholog of  Ceres SEQ ID NO 14303321 as cited in SEQ ID NO 54639
aaaataatattcaaattcaaaatctgtccaaattcatctagggtttctgataaaacagacgaagaagatccaaattcgctaacaatgggaggtgaaggagaagatctagagccactttttgattatcgtcgtgttcagccagcgaatttcgtttgtatcgatgatgatgatgatgatgcctcggtgacgccaattccgaagaaagcgaaaacttcacaaacagttgagaagttagatgatgatgtgaaagtgattgaagttacgggtgatgacgattggttgcttcctccaccaaaggttatcttcgacaaaagtaaagactctgttgaagattcaactattaaagcattgaggtcgaagaagatggagctcatgtcatttacaaaaactgtaggagatgtgatgcaggaagttgaggagtctgctaaaagggaagttgaagaatctcgcaatccatcttcagagactgctgctcagttaccatcagagcctacgaatgacagggccaagattgttattacaatacaggacaaagatggacagaagacactccgggtgtttgcggacgagaaatttgagagggttatcaaactgtatacagataaagctaagcttgacccgcaaaatcttgtatttatttttgacggtgataagattgatccatcaaccactccttctgaacttggcatggaggatcatgatatgattgaagtgcacaccaaaaaaacttgacaaataggcgctaatcggaatctggaatgtcaaatctgttccatcttttgcgaaaaaccagagttttgtacatcaacatgggcatgggaagggatctctctgctaacatctggtgtttgtatctgtgacctttctcattttatcggaattttgtttctttctttctttcactctttctgtcactctttattaggcgtgtataatatataaggtaaaccaaaccattttgattttaactaatcctattgaatccaatc

SEQ ID NO: 36121 - protein, 243 aa, Arabidopsis thaliana
  peptide (1)..(243): Ceres Seq. ID no. 12327131
KIIFKFKICPNSSRVSDKTDEEDPNSLTMGGEGEDLEPLFDYRRVQPANFVCIDDDDDDASVTPIPKKAKTSQTVEKLDDDVKVIEVTGDDDWLLPPPKVIFDKSKDSVEDSTIKALRSKKMELMSFTKTVGDVMQEVEESAKREVEESRNPSSETAAQLPSEPTNDRAKIVITIQDKDGQKTLRVFADEKFERVIKLYTDKAKLDPQNLVFIFDGDKIDPSTTPSELGMEDHDMIEVHTKKT

SEQ ID NO: 36122 - protein, 215 aa, Arabidopsis thaliana
  peptide (1)..(215): Ceres Seq. ID no. 12327132
MGGEGEDLEPLFDYRRVQPANFVCIDDDDDDASVTPIPKKAKTSQTVEKLDDDVKVIEVTGDDDWLLPPPKVIFDKSKDSVEDSTIKALRSKKMELMSFTKTVGDVMQEVEESAKREVEESRNPSSETAAQLPSEPTNDRAKIVITIQDKDGQKTLRVFADEKFERVIKLYTDKAKLDPQNLVFIFDGDKIDPSTTPSELGMEDHDMIEVHTKKT

SEQ ID NO: 36123 - protein, 122 aa, Arabidopsis thaliana
  peptide (1)..(122): Ceres Seq. ID no. 12327133
MELMSFTKTVGDVMQEVEESAKREVEESRNPSSETAAQLPSEPTNDRAKIVITIQDKDGQKTLRVFADEKFERVIKLYTDKAKLDPQNLVFIFDGDKIDPSTTPSELGMEDHDMIEVHTKKT

SEQ ID NO: 36124 - DNA, 1020 bp, Arabidopsis thaliana
  misc_feature (1)..(1020): Ceres Seq. ID no. 12562601
  misc_feature (1)..(1020): Ortholog of  Ceres SEQ ID NO 12598739 as cited in SEQ ID NO 64558
  misc_feature (1)..(1020): Ortholog of  Ceres SEQ ID NO 13586862 as cited in SEQ ID NO 0
agagctaataagatccgattcggaagtttctttgacatcaaaacacaaacccggaaagcttcgtctgccatttttcattcttctaagccctagctcaaagctttctctctcaaatccgccatgactaaacagcacgcgaactggtctccttacgataacaatggaggaacatgtgtggccatcgctggatcggattactgtgttatcgccgccgatactcggatgtctactggttacagtattcttagtcgcgattactccaaaatccataaactagcggacagagctgttttgtcttcctctggcttccaggctgatgtgaaagctttgcagaaggttctcaaatccagacacttgatctatcaacatcagcataacaagcagatgagctgtcctgcaatggcccagcttctctccaacacgctttatttcaagcggtttttcccctactatgcctttaatgttctaggagggcttgacgaggaaggaaaagggtgtgtctttacttacgacgctgttggctcatacgagagagttggatacggtgctcaaggttctggttccacactcatcatgcctttccttgacaatcagctcaagtctccaagtcctcttttgctacctaaacaggattcaaacacgcccctttccgaagctgaagcagttgacttggttaaaactgttttcgcatctgccacagagagggatatctacactggagacaagcttgagattatgatacttaaggccgacggtatcaagaccgaactcatggacctgaggaaagactaagctcctttagtgcatttagccaaccttatcggtttgttatttcacttcaacatcgagcttcctgagttgtagaactcgtatgaaatgctactgggtttgatattttacagttaaaatcatgactcgtgtttgaagtttctccaaaactgtttccttatgtatgagaatcactcgaatccttgtcttaaatcaatgtttctctcactatttatggcaatgtttttacat

SEQ ID NO: 36125 - protein, 223 aa, Arabidopsis thaliana
  peptide (1)..(223): Ceres Seq. ID no. 12562602
MTKQHANWSPYDNNGGTCVAIAGSDYCVIAADTRMSTGYSILSRDYSKIHKLADRAVLSSSGFQADVKALQKVLKSRHLIYQHQHNKQMSCPAMAQLLSNTLYFKRFFPYYAFNVLGGLDEEGKGCVFTYDAVGSYERVGYGAQGSGSTLIMPFLDNQLKSPSPLLLPKQDSNTPLSEAEAVDLVKTVFASATERDIYTGDKLEIMILKADGIKTELMDLRKD

SEQ ID NO: 36126 - protein, 189 aa, Arabidopsis thaliana
  peptide (1)..(189): Ceres Seq. ID no. 12562603
MSTGYSILSRDYSKIHKLADRAVLSSSGFQADVKALQKVLKSRHLIYQHQHNKQMSCPAMAQLLSNTLYFKRFFPYYAFNVLGGLDEEGKGCVFTYDAVGSYERVGYGAQGSGSTLIMPFLDNQLKSPSPLLLPKQDSNTPLSEAEAVDLVKTVFASATERDIYTGDKLEIMILKADGIKTELMDLRKD

SEQ ID NO: 36127 - protein, 135 aa, Arabidopsis thaliana; identical to SEQ ID NO: 22828
  peptide (1)..(135): Ceres Seq. ID no. 12562604

SEQ ID NO: 36128 - DNA, 749 bp, Arabidopsis thaliana
  misc_feature (1)..(749): Ceres Seq. ID no. 12340498
  misc_feature (1)..(749): Ortholog of  Ceres SEQ ID NO 13638769 as cited in SEQ ID NO 51773
  misc_feature (1)..(749): Ortholog of  Ceres SEQ ID NO 12583723 as cited in SEQ ID NO 58297
  misc_feature (1)..(749): Ortholog of  Ceres SEQ ID NO 12623263 as cited in SEQ ID NO 60988
  misc_feature (1)..(749): Ortholog of  Ceres SEQ ID NO 15225568 as cited in SEQ ID NO 61512
  misc_feature (1)..(749): Ortholog of  Ceres SEQ ID NO 13664236 as cited in SEQ ID NO 66530
  misc_feature (1)..(749): Ortholog of  Ceres SEQ ID NO 13590249 as cited in SEQ ID NO 68385
  misc_feature (1)..(749): Ortholog of  Ceres SEQ ID NO 12635807 as cited in SEQ ID NO 0
  misc_feature (1)..(749): Ortholog of  Ceres SEQ ID NO 15179245 as cited in SEQ ID NO 0
accaaccccctctcgcactctccgccaccttcttccctaattctctctctctcgctacctctctacgtgataaacaagaatggcgactgtacgaatctcctccactagcatgaccaaggccgttcttagaagccagacaaccaacaagctcattactaacaagagctacaacttatctgttggatcaacgaaaagggtttcgagatcttttggtttgaaatgctcagcgaattctggtggtgctacgatgtcggcggtatacaaggtcaagctcttaggacctgatggtcaagaagatgagtttgaggttcaagatgatcagtacatcttggatgcagctgaagaggcaggagttgacttgccttactcttgcagagccggtgcgtgttctacttgcgcgggtcagattgtgtccggcaacgttgaccagtcggatggttcgtttctcgaggatagccacttggagaagggttatgttttgacttgtgtggcttacccacagtctgactgtgtgatccatacccacaaggaaactgaactcttctaagtcaaagtctctctatttggtaatgatgaaaaaattgttatttgagtgatctttttagatattatggttatcagtttcgttctacggatttgtgtggttttaaaggtatgcatttgtatgaaaatgactcaagatatgccttttagtgttcatgaatcgtcaccgggtcgcaattggttaataaaatggttaagtttcaacc

SEQ ID NO: 36129 - protein, 155 aa, Arabidopsis thaliana
  peptide (1)..(155): Ceres Seq. ID no. 12340499
MATVRISSTSMTKAVLRSQTTNKLITNKSYNLSVGSTKRVSRSFGLKCSANSGGATMSAVYKVKLLGPDGQEDEFEVQDDQYILDAAEEAGVDLPYSCRAGACSTCAGQIVSGNVDQSDGSFLEDSHLEKGYVLTCVAYPQSDCVIHTHKETELF

SEQ ID NO: 36130 - protein, 145 aa, Arabidopsis thaliana
  peptide (1)..(145): Ceres Seq. ID no. 12340500
MTKAVLRSQTTNKLITNKSYNLSVGSTKRVSRSFGLKCSANSGGATMSAVYKVKLLGPDGQEDEFEVQDDQYILDAAEEAGVDLPYSCRAGACSTCAGQIVSGNVDQSDGSFLEDSHLEKGYVLTCVAYPQSDCVIHTHKETELF

SEQ ID NO: 36131 - protein, 99 aa, Arabidopsis thaliana
  peptide (1)..(99): Ceres Seq. ID no. 12340501
MSAVYKVKLLGPDGQEDEFEVQDDQYILDAAEEAGVDLPYSCRAGACSTCAGQIVSGNVDQSDGSFLEDSHLEKGYVLTCVAYPQSDCVIHTHKETELF

SEQ ID NO: 36132 - DNA, 1613 bp, Arabidopsis thaliana
  misc_feature (1)..(1613): Ceres Seq. ID no. 12325334
  misc_feature (1)..(1613): Ortholog of  Ceres SEQ ID NO 14313373 as cited in SEQ ID NO 67312
aattctgggaggagagaggccgccggaggagagagaaaaagagttgggggattgctttttgatttctccttctccatcttcgacctcgagagaagctaaaaatggcagaagaagcggatacgaacatcgagatctggaagattaagaaactaatcaagggacttgaatcagctagaggtaatggaacgagtatgatctctcttattatgcctcctcgtgatcaagtatctcgtgtcacaaagatgcttggtgatgaatatggaactgcttcaaacattaagagtcgagtcaatcgtcaatctgttttgtctgccattacttctgctcaacaaaggttgaagctttacaacaaggttcctactaatggtcttgttctctataccggcaccattgttaatgatgacggtaaagagaagaaggtgacgtttgatttcgagccctttaggccgattaatgcttccttgtacctttgtgacaacaagttccatactgaggcattgaacgagcttcttgagtctgatgacaagtttggtttcattgttatggatggtaatgggacactgtttggaactttgagtgggaatactagagaggttcttcataagtttactgttgatctcccgaagaagcacggaagaggaggacagtctgcacttcgttttgcccgtcttaggatggagaagagacacaattatgttaggaaaaccgctgagcttgctacacagttttacatcaatccagctacgagtcagcctaatgtctctggtctgatccttgctggttcagctgatttcaaaactgagctcagtcaatcagagttgtttgatcctcgtcttcaagctaagatattgaatgttgttgatgtttcttacggaggtgaaaacggtttcaaccaagcgattgagctgtctgctgagattctatccaatgtgaagttcatacaggagaagaaactgattgggaagtactttgaggagataagtcaagataccgggaaatacgttttcggtgtggaggatactctaaaggctctagaaatgggtgctatcgaaacccttatcgtgtgggagaatctggacataaacaggtatgagctaaagaacagtacgacaggagaaatggtggtgaaacactttgggaaagatcaagagtctgatacaagcaacttccatgattcagagactaacgcggagctagaagtacaggagaagatgcctctactcgaatggtttgcaaatgagtacaaacgtttcggctgcactcttgagtttgtgactaacaaatcccaagaagggtcacagttttgcagaggttttggtgggattggtggtatgttacgttaccagcttgacatgaggacatttgatgagttatcagatactgaagtttacgaagattctgattaaagtgggaaaacttttggtgatggtttcagatcgatacagtgagggaaaatgtggcataaagatggtcttttatcaacaaagaagagagatttaagtttcttgttttctatagaacattaaaaagcttgactctttctttctgttagacaatttgtgttgtaatttttgaggattttaaacatctttttgttgttcttctggttttat

SEQ ID NO: 36133 - protein, 434 aa, Arabidopsis thaliana
  peptide (1)..(434): Ceres Seq. ID no. 12325335
MAEEADTNIEIWKIKKLIKGLESARGNGTSMISLIMPPRDQVSRVTKMLGDEYGTASNIKSRVNRQSVLSAITSAQQRLKLYNKVPTNGLVLYTGTIVNDDGKEKKVTFDFEPFRPINASLYLCDNKFHTEALNELLESDDKFGFIVMDGNGTLFGTLSGNTREVLHKFTVDLPKKHGRGGQSALRFARLRMEKRHNYVRKTAELATQFYINPATSQPNVSGLILAGSADFKTELSQSELFDPRLQAKILNVVDVSYGGENGFNQAIELSAEILSNVKFIQEKKLIGKYFEEISQDTGKYVFGVEDTLKALEMGAIETLIVWENLDINRYELKNSTTGEMVVKHFGKDQESDTSNFHDSETNAELEVQEKMPLLEWFANEYKRFGCTLEFVTNKSQEGSQFCRGFGGIGGMLRYQLDMRTFDELSDTEVYEDSD

SEQ ID NO: 36134 - protein, 404 aa, Arabidopsis thaliana
  peptide (1)..(404): Ceres Seq. ID no. 12325336
MISLIMPPRDQVSRVTKMLGDEYGTASNIKSRVNRQSVLSAITSAQQRLKLYNKVPTNGLVLYTGTIVNDDGKEKKVTFDFEPFRPINASLYLCDNKFHTEALNELLESDDKFGFIVMDGNGTLFGTLSGNTREVLHKFTVDLPKKHGRGGQSALRFARLRMEKRHNYVRKTAELATQFYINPATSQPNVSGLILAGSADFKTELSQSELFDPRLQAKILNVVDVSYGGENGFNQAIELSAEILSNVKFIQEKKLIGKYFEEISQDTGKYVFGVEDTLKALEMGAIETLIVWENLDINRYELKNSTTGEMVVKHFGKDQESDTSNFHDSETNAELEVQEKMPLLEWFANEYKRFGCTLEFVTNKSQEGSQFCRGFGGIGGMLRYQLDMRTFDELSDTEVYEDSD

SEQ ID NO: 36135 - protein, 399 aa, Arabidopsis thaliana
  peptide (1)..(399): Ceres Seq. ID no. 12325337
MPPRDQVSRVTKMLGDEYGTASNIKSRVNRQSVLSAITSAQQRLKLYNKVPTNGLVLYTGTIVNDDGKEKKVTFDFEPFRPINASLYLCDNKFHTEALNELLESDDKFGFIVMDGNGTLFGTLSGNTREVLHKFTVDLPKKHGRGGQSALRFARLRMEKRHNYVRKTAELATQFYINPATSQPNVSGLILAGSADFKTELSQSELFDPRLQAKILNVVDVSYGGENGFNQAIELSAEILSNVKFIQEKKLIGKYFEEISQDTGKYVFGVEDTLKALEMGAIETLIVWENLDINRYELKNSTTGEMVVKHFGKDQESDTSNFHDSETNAELEVQEKMPLLEWFANEYKRFGCTLEFVTNKSQEGSQFCRGFGGIGGMLRYQLDMRTFDELSDTEVYEDSD

SEQ ID NO: 36136 - DNA, 1012 bp, Arabidopsis thaliana
  misc_feature (1)..(1012): Ceres Seq. ID no. 13499975
  misc_feature (1)..(1012): Ortholog of  Ceres SEQ ID NO 12557497 as cited in SEQ ID NO 43
  misc_feature (1)..(1012): Ortholog of  Ceres SEQ ID NO 15177850 as cited in SEQ ID NO 51765
  misc_feature (1)..(1012): Ortholog of  Ceres SEQ ID NO 15169084 as cited in SEQ ID NO 59115
  misc_feature (1)..(1012): Ortholog of  Ceres SEQ ID NO 12635723 as cited in SEQ ID NO 0
actattattctaaaatccaaaaaaactatatgttataacattggaatcatcagtctctaagcagtatcacaccaactcaatatggctaccaccactgcagcagcagcctcaggtatttttgggatccggattcaagatcctagacctggaaccggtagggtccaagcccggttcgggttcagtttcggaaaaaagaaaccggctccaccgccaaagaaatcaaggcaggtccaagacgatggagacagactagtttggttccccggcgcaaacccgccggaatggttggacggatcgatgatcggagaccgtggatttgatccgtttggtttaggtaaaccggctgagtatcttcagtacgatttcgatggacttgaccaaaaccttgccaagaacgtggcgggtgacatcatcgggatcatccaagaatcttcggagatcaaaccgacgccgtttcagccgtacactgaagtctttgggatccaacggttcagagaatgtgagctgatccatggaaggtgggccatgcttggcactctaggcgccatcgccgtagaggctcttacaggaattgcatggcaagacgccggaaaggtggaattggtggaaggatcatcgtatttgggacaaccattgccgttctcgttgacgacgttgatatggatagaagtgttagtggtcggatacattgagttccaacgtaactctgaactggatccagagaaacggatttacccgggtgggtattttgacccgttgggactcgcggctgatccagagaagttggatactttgaagctggctgagataaagcactctcgtctcgctatggtcgcatttctcatctttgctcttcaggcggcctttaccggcaaaggccctgtcagcttccttgccacctttaacaattagttaatgaacctttctatctttattttatcaaaataaaattatacttcaaaaactgtataatgcatgttacgctatacttataaagaagtcttttattgtt

SEQ ID NO: 36137 - protein, 276 aa, Arabidopsis thaliana
  peptide (1)..(276): Ceres Seq. ID no. 13499976
MATTTAAAASGIFGIRIQDPRPGTGRVQARFGFSFGKKKPAPPPKKSRQVQDDGDRLVWFPGANPPEWLDGSMIGDRGFDPFGLGKPAEYLQYDFDGLDQNLAKNVAGDIIGIIQESSEIKPTPFQPYTEVFGIQRFRECELIHGRWAMLGTLGAIAVEALTGIAWQDAGKVELVEGSSYLGQPLPFSLTTLIWIEVLVVGYIEFQRNSELDPEKRIYPGGYFDPLGLAADPEKLDTLKLAEIKHSRLAMVAFLIFALQAAFTGKGPVSFLATFNN

SEQ ID NO: 36138 - protein, 204 aa, Arabidopsis thaliana
  peptide (1)..(204): Ceres Seq. ID no. 13499977
MIGDRGFDPFGLGKPAEYLQYDFDGLDQNLAKNVAGDIIGIIQESSEIKPTPFQPYTEVFGIQRFRECELIHGRWAMLGTLGAIAVEALTGIAWQDAGKVELVEGSSYLGQPLPFSLTTLIWIEVLVVGYIEFQRNSELDPEKRIYPGGYFDPLGLAADPEKLDTLKLAEIKHSRLAMVAFLIFALQAAFTGKGPVSFLATFNN

SEQ ID NO: 36139 - DNA, 1187 bp, Arabidopsis thaliana
  misc_feature (1)..(1187): Ceres Seq. ID no. 12674479
  misc_feature (1)..(1187): Ortholog of  Ceres SEQ ID NO 14310369 as cited in SEQ ID NO 54765
  misc_feature (1)..(1187): Ortholog of  Ceres SEQ ID NO 13596474 as cited in SEQ ID NO 62169
  misc_feature (1)..(1187): Ortholog of  Ceres SEQ ID NO 13598714 as cited in SEQ ID NO 62656
  misc_feature (1)..(1187): Ortholog of  Ceres SEQ ID NO 13596969 as cited in SEQ ID NO 63375
  misc_feature (1)..(1187): Ortholog of  Ceres SEQ ID NO 13584480 as cited in SEQ ID NO 64751
  misc_feature (1)..(1187): Ortholog of  Ceres SEQ ID NO 13597519 as cited in SEQ ID NO 64759
  misc_feature (1)..(1187): Ortholog of  Ceres SEQ ID NO 13596362 as cited in SEQ ID NO 67877
  misc_feature (1)..(1187): Ortholog of  Ceres SEQ ID NO 13587054 as cited in SEQ ID NO 0
atcttaaaactcccaagtaacaaaaatggctatctcaaagcttattcctactcttgtgctctttgttttgttctcttttgatgttagtgttgctcatccaggtctaggatttggatggggaagtaatagtcccattggaggatctttttactcaaatctttacccacaattttaccagttctcttgtccacaagctgatgagattgttatgacggtgctcgaaaaagccatagctaaagaaccaagaatggcagcatctttactcagacttcacttccacgactgcttcgttcagggctgtgatgcatcaatcttgttggatgatagtgcaaccataagaagtgaaaagaatgctggaccaaacaagaactccgttagagggtttcaagtaatcgacgagatcaaagccaaacttgagcaagcttgtcctcaaactgtctcctgcgccgacattctagctctagctgctcgtggctcaactatactgagtggtggaccatcatgggagcttccactagggaggagagactcgaggaccgctagccttaatggcgcaaacacgaacattcctgcacctaactcaactattcaaaatctcttaaccatgttccaacgtaaaggtttgaacgaagaagaccttgtttccctatcaggaggacatacgattggagtagcgaggtgcacaacgtttaaacaaagactatacaatcaaaacggtaataaccaaccagacgagacgctagagaggtcttactactatggtctcaggtcaatttgtccaccaacaggcggtgacaacaatatttcacctctagacttagcctctcctgcaagattcgacaacacatacttcaagctccttctatggggcaaaggcttattgacatcagatgaagtgcttctcactggcaatgtaggcaagactggtgcattagtgaaagcttatgccgaagacgagagacttttcttccaacaattcgcaaagtcgatggttaacatgggaaacattcagcctcttactggttttaatggtgagatcaggaagagttgtcatgtgattaactaaagaaactgtgtgtttttgcattattattgtattaaggggtgattaagaataagtcgtgttatgtttttcgatatgttagtgatctaattaacgtctttgaatgaaaatggacggttgtttt

SEQ ID NO: 36140 - protein, 346 aa, Arabidopsis thaliana
  peptide (1)..(346): Ceres Seq. ID no. 12674480
MAISKLIPTLVLFVLFSFDVSVAHPGLGFGWGSNSPIGGSFYSNLYPQFYQFSCPQADEIVMTVLEKAIAKEPRMAASLLRLHFHDCFVQGCDASILLDDSATIRSEKNAGPNKNSVRGFQVIDEIKAKLEQACPQTVSCADILALAARGSTILSGGPSWELPLGRRDSRTASLNGANTNIPAPNSTIQNLLTMFQRKGLNEEDLVSLSGGHTIGVARCTTFKQRLYNQNGNNQPDETLERSYYYGLRSICPPTGGDNNISPLDLASPARFDNTYFKLLLWGKGLLTSDEVLLTGNVGKTGALVKAYAEDERLFFQQFAKSMVNMGNIQPLTGFNGEIRKSCHVIN

SEQ ID NO: 36141 - protein, 285 aa, Arabidopsis thaliana
  peptide (1)..(285): Ceres Seq. ID no. 12674481
MTVLEKAIAKEPRMAASLLRLHFHDCFVQGCDASILLDDSATIRSEKNAGPNKNSVRGFQVIDEIKAKLEQACPQTVSCADILALAARGSTILSGGPSWELPLGRRDSRTASLNGANTNIPAPNSTIQNLLTMFQRKGLNEEDLVSLSGGHTIGVARCTTFKQRLYNQNGNNQPDETLERSYYYGLRSICPPTGGDNNISPLDLASPARFDNTYFKLLLWGKGLLTSDEVLLTGNVGKTGALVKAYAEDERLFFQQFAKSMVNMGNIQPLTGFNGEIRKSCHVIN

SEQ ID NO: 36142 - protein, 272 aa, Arabidopsis thaliana
  peptide (1)..(272): Ceres Seq. ID no. 12674482
MAASLLRLHFHDCFVQGCDASILLDDSATIRSEKNAGPNKNSVRGFQVIDEIKAKLEQACPQTVSCADILALAARGSTILSGGPSWELPLGRRDSRTASLNGANTNIPAPNSTIQNLLTMFQRKGLNEEDLVSLSGGHTIGVARCTTFKQRLYNQNGNNQPDETLERSYYYGLRSICPPTGGDNNISPLDLASPARFDNTYFKLLLWGKGLLTSDEVLLTGNVGKTGALVKAYAEDERLFFQQFAKSMVNMGNIQPLTGFNGEIRKSCHVIN

SEQ ID NO: 36143 - DNA, 673 bp, Arabidopsis thaliana
  misc_feature (1)..(673): Ceres Seq. ID no. 12396942
  misc_feature (1)..(673): Ortholog of  Ceres SEQ ID NO 12612272 as cited in SEQ ID NO 55946
  misc_feature (1)..(673): Ortholog of  Ceres SEQ ID NO 15169960 as cited in SEQ ID NO 57591
attcgaagagagttctagcaaaacaaaacaaaacagagcaaacagagtaagcgaaacgatgtctctagttccgaccttttttggaggccgaagaacaaacgtgttcgacccattttcactagacgtatgggatccgttcgaaggattcttgacgcccgggttgacaaacgcacctgccaaggacgtggcagcgttcacaaacgctaaagtggactggagggagacacctgaagcgcatgtgttcaaggcggacgtgcctgggcttaagaaggaagaggtgaaggtggaggttgaagatggtaacatacttcagataagcggtgagaggagcagtgagaatgaagagaagagtgacacatggcaccgtgtggagcggtcaagtgggaagttcatgaggaggtttcggttgccagagaatgcaaaggtggaggaagtaaaggcgagtatggagaatggggtgttgtcggttacggtgccgaaagttcaggagagtaagccggaggtcaagtccgttgatatctctggttaagaggaactctgaagttggaaagcttaagacagtaatatgtgatagtgtgaaataaatggtgcgactttcctttcttctttttcttgtaatcaccaatctcgttgtatcaatataagtaatcgtaataaaagagtgttttgatac

SEQ ID NO: 36144 - protein, 175 aa, Arabidopsis thaliana
  peptide (1)..(175): Ceres Seq. ID no. 12396943
FEESSSKTKQNRANRVSETMSLVPTFFGGRRTNVFDPFSLDVWDPFEGFLTPGLTNAPAKDVAAFTNAKVDWRETPEAHVFKADVPGLKKEEVKVEVEDGNILQISGERSSENEEKSDTWHRVERSSGKFMRRFRLPENAKVEEVKASMENGVLSVTVPKVQESKPEVKSVDISG

SEQ ID NO: 36145 - protein, 156 aa, Arabidopsis thaliana
  peptide (1)..(156): Ceres Seq. ID no. 12396944
MSLVPTFFGGRRTNVFDPFSLDVWDPFEGFLTPGLTNAPAKDVAAFTNAKVDWRETPEAHVFKADVPGLKKEEVKVEVEDGNILQISGERSSENEEKSDTWHRVERSSGKFMRRFRLPENAKVEEVKASMENGVLSVTVPKVQESKPEVKSVDISG

SEQ ID NO: 36146 - DNA, 1040 bp, Arabidopsis thaliana; identical to SEQ ID NO: 34910
  misc_feature (1)..(1040): Ceres Seq. ID no. 13501435
  misc_feature (1)..(1040): Ortholog of  Ceres SEQ ID NO 13583137 as cited in SEQ ID NO 60857

SEQ ID NO: 36147 - protein, 231 aa, Arabidopsis thaliana; identical to SEQ ID NO: 34911
  peptide (1)..(231): Ceres Seq. ID no. 13501436

SEQ ID NO: 36148 - protein, 230 aa, Arabidopsis thaliana; identical to SEQ ID NO: 34912
  peptide (1)..(230): Ceres Seq. ID no. 13501437

SEQ ID NO: 36149 - DNA, 747 bp, Arabidopsis thaliana
  misc_feature (1)..(747): Ceres Seq. ID no. 12678432
  misc_feature (1)..(747): Ortholog of  Ceres SEQ ID NO 12623521 as cited in SEQ ID NO 61505
atggcttcgtctctcaccactagattatcggcggtaatcggatctcgacggagttttccgatcgtcggagcgttttgcgttctgtcaactctctcaatctcttctctttcttcttcatctcccttcaaatcgggttgtgcacagtctttctctgttgttcctctcttaaggtctaagtttagcagtaaggctttttcttcgtcgatcagaatggaggagagcagcaaaactgtgcccagcattgttgtctatgtcactgttcctaacagagaagcagggaagaagttggctaacagcattgtccaggaaaagcttgcagcgtgtgtgaacattgtgcctggcattgaatcggtgtacgagtgggaggggaaggttcagagtgattcagaggagctcctgataatcaaaacaaggcaatcccttctagaacctctaaccgagcatgtcaatgcaaatcacgaatacgatgtgccagaagtaattgcgttgcccatcactggtgggagcgacaagtatttagaatggttgaaaaacagtacaaggaactgagatctcgacatctcgtagctgcccatcgtcaatggctttctagtattagtttcttttacatttcagtaacctctgtattaaagataaaacgtgtgaagtgtaatactggaccagttcgtcaaatgaaataaacaatgacattgttccatataatggatggacatttgcttaaaagatttcagatcaagtctttgattc

SEQ ID NO: 36150 - protein, 182 aa, Arabidopsis thaliana
  peptide (1)..(182): Ceres Seq. ID no. 12678433
MASSLTTRLSAVIGSRRSFPIVGAFCVLSTLSISSLSSSSPFKSGCAQSFSVVPLLRSKFSSKAFSSSIRMEESSKTVPSIVVYVTVPNREAGKKLANSIVQEKLAACVNIVPGIESVYEWEGKVQSDSEELLIIKTRQSLLEPLTEHVNANHEYDVPEVIALPITGGSDKYLEWLKNSTRN

SEQ ID NO: 36151 - protein, 112 aa, Arabidopsis thaliana
  peptide (1)..(112): Ceres Seq. ID no. 12678434
MEESSKTVPSIVVYVTVPNREAGKKLANSIVQEKLAACVNIVPGIESVYEWEGKVQSDSEELLIIKTRQSLLEPLTEHVNANHEYDVPEVIALPITGGSDKYLEWLKNSTRN

SEQ ID NO: 36152 - DNA, 1059 bp, Arabidopsis thaliana
  misc_feature (1)..(1059): Ceres Seq. ID no. 12395617
  misc_feature (1)..(1059): Ortholog of  Ceres SEQ ID NO 14303831 as cited in SEQ ID NO 52976
  misc_feature (1)..(1059): Ortholog of  Ceres SEQ ID NO 12619453 as cited in SEQ ID NO 65952
aaagccattgtttcagttgatgatggtgatgatatctcttcacttctctactccgccgctagcttttctcaaatctgattccaattccagatttctcaagaaccctaatcctaatgttatccaattcaccccaaaatcccaacttcttttcccccaacgtctcaatttcaacaccggaacaaatttaaaccggcgaactctgagttgctatgggattaaggattcaagtgagacaacaaagtctgcgccgtcattagactccggcgacggtggcggcggaggaggtgacggcggagatgctggtggtgatgatgataaaggtgaagtggaggaaaaaaacagactttttccggaatggttggattttacctcggatgatgcacagactgtgtttgtggctatagctgtatcgttggcgtttcgttattttatcgcagaaccaagatatattccttctttgtctatgtatcctacctttgatgttggagacagattagttgcagagaaggtgagttattatttcaggaagccttgtgcaaatgatattgtcatctttaaaagtccaccagttcttcaggaagttgggtatactgatgccgatgtatttattaaacggattattgccaaagaaggtgaccttgtggaggtacataatgggaaactgatggttaatggtgttgctaggaatgaaaaattcatcttagagcctcctggttatgaaatgacaccaattagggtaccggaaaattcagtctttgtgatgggtgataaccggaataacagttatgattcgcatgtgtggggtcctctgcctttgaagaatatcattggacggtcagtttttcggtattggccaccaaacagagtaagcgggacagtgctagaaggtggctgtgctgtggataagcaatagaacatattgtaacgttttgattcggcatgtcttcatttgaaacacttgtgcagataaaaacgaaaacaatgtacctttttatgaaggagagagttgcacatttgaattggattgcagattaatgaggaaacaagaaattcttattt

SEQ ID NO: 36153 - protein, 303 aa, Arabidopsis thaliana
  peptide (1)..(303): Ceres Seq. ID no. 12395618
KPLFQLMMVMISLHFSTPPLAFLKSDSNSRFLKNPNPNVIQFTPKSQLLFPQRLNFNTGTNLNRRTLSCYGIKDSSETTKSAPSLDSGDGGGGGGDGGDAGGDDDKGEVEEKNRLFPEWLDFTSDDAQTVFVAIAVSLAFRYFIAEPRYIPSLSMYPTFDVGDRLVAEKVSYYFRKPCANDIVIFKSPPVLQEVGYTDADVFIKRIIAKEGDLVEVHNGKLMVNGVARNEKFILEPPGYEMTPIRVPENSVFVMGDNRNNSYDSHVWGPLPLKNIIGRSVFRYWPPNRVSGTVLEGGCAVDKQ

SEQ ID NO: 36154 - protein, 297 aa, Arabidopsis thaliana
  peptide (1)..(297): Ceres Seq. ID no. 12395619
MMVMISLHFSTPPLAFLKSDSNSRFLKNPNPNVIQFTPKSQLLFPQRLNFNTGTNLNRRTLSCYGIKDSSETTKSAPSLDSGDGGGGGGDGGDAGGDDDKGEVEEKNRLFPEWLDFTSDDAQTVFVAIAVSLAFRYFIAEPRYIPSLSMYPTFDVGDRLVAEKVSYYFRKPCANDIVIFKSPPVLQEVGYTDADVFIKRIIAKEGDLVEVHNGKLMVNGVARNEKFILEPPGYEMTPIRVPENSVFVMGDNRNNSYDSHVWGPLPLKNIIGRSVFRYWPPNRVSGTVLEGGCAVDKQ

SEQ ID NO: 36155 - protein, 296 aa, Arabidopsis thaliana
  peptide (1)..(296): Ceres Seq. ID no. 12395620
MVMISLHFSTPPLAFLKSDSNSRFLKNPNPNVIQFTPKSQLLFPQRLNFNTGTNLNRRTLSCYGIKDSSETTKSAPSLDSGDGGGGGGDGGDAGGDDDKGEVEEKNRLFPEWLDFTSDDAQTVFVAIAVSLAFRYFIAEPRYIPSLSMYPTFDVGDRLVAEKVSYYFRKPCANDIVIFKSPPVLQEVGYTDADVFIKRIIAKEGDLVEVHNGKLMVNGVARNEKFILEPPGYEMTPIRVPENSVFVMGDNRNNSYDSHVWGPLPLKNIIGRSVFRYWPPNRVSGTVLEGGCAVDKQ

SEQ ID NO: 36156 - DNA, 1194 bp, Arabidopsis thaliana
  misc_feature (1)..(1194): Ceres Seq. ID no. 12337726
  misc_feature (1)..(1194): Ortholog of  Ceres SEQ ID NO 15169372 as cited in SEQ ID NO 58778
aaatcttcttcttcctctcttgtctctctcgctctctctcttctacattgtttcttgaggtcaatccattaaaaatgggattatattcactaatcacaggaagaaaaggaccaagtggatttggttcagcttcaacagctgaagaggttactcaagggattgatgcaactaatctcactgcaattatcacaagagggacaggaggaatagggatggagacagcgagagtgctgtcgaagagaggtgctcatgtggtgatcggtgcccgaaacatgggagctgcagaaaacgccaaaacagagattctcagacaaaacgcaaacgcacgtgtcactcttcttcaattagatctctcttccatcaaatccatcaaagcctttgttcgtgaatttcatgccctccatcttcctctcaatctcctcataaacaatgcaggagtaatgttctgtccataccaactctctgaagatggaatcgaattgcagtttgctacaaatcacattggtcactttctgttgacaaacttgctcttggacacaatgaagaacacagctaaaaccagtggtgttgaaggaagaattttgaatgtatcatctgtagctcatatctatacttaccaagaaggaatccaattcgacagcatcaatgacatttgcagttactcggataagcgagcttacggacaatcgaaactagccaatatattgcatgctaatgagctctcccgtcagcttcaggaagaaggagtaaacataacagcaaattcagttcaccctggtcttattctcaccaatctcttccaacacactgctcttttaatgaggttcttgaagttcttcagcttctacttgtggaaaaatatacctcagggagcagcaacaacatgttatgttgctctgcatccaagtgtgaagggagtaacaggaaagtactttgctgattgcaacgaagtcactccaagcaaacttgctagagatgagactttggcacagaaactctgggatttcagtgttaagctcattaactcggtttctaaaaagaactacctcggtttcgatgacaccacttgaatctctacggtgttcttgttgaatgttacctaaagagtgaaaaaaaagtaagaacaagtagagattgtgatgtttctttccacattatcgtatggtaactcatgagatgcattgttgtatgctc

SEQ ID NO: 36157 - protein, 355 aa, Arabidopsis thaliana
  peptide (1)..(355): Ceres Seq. ID no. 12337727
IFFFLSCLSRSLSSTLFLEVNPLKMGLYSLITGRKGPSGFGSASTAEEVTQGIDATNLTAIITRGTGGIGMETARVLSKRGAHVVIGARNMGAAENAKTEILRQNANARVTLLQLDLSSIKSIKAFVREFHALHLPLNLLINNAGVMFCPYQLSEDGIELQFATNHIGHFLLTNLLLDTMKNTAKTSGVEGRILNVSSVAHIYTYQEGIQFDSINDICSYSDKRAYGQSKLANILHANELSRQLQEEGVNITANSVHPGLILTNLFQHTALLMRFLKFFSFYLWKNIPQGAATTCYVALHPSVKGVTGKYFADCNEVTPSKLARDETLAQKLWDFSVKLINSVSKKNYLGFDDTT

SEQ ID NO: 36158 - protein, 331 aa, Arabidopsis thaliana
  peptide (1)..(331): Ceres Seq. ID no. 12337728
MGLYSLITGRKGPSGFGSASTAEEVTQGIDATNLTAIITRGTGGIGMETARVLSKRGAHVVIGARNMGAAENAKTEILRQNANARVTLLQLDLSSIKSIKAFVREFHALHLPLNLLINNAGVMFCPYQLSEDGIELQFATNHIGHFLLTNLLLDTMKNTAKTSGVEGRILNVSSVAHIYTYQEGIQFDSINDICSYSDKRAYGQSKLANILHANELSRQLQEEGVNITANSVHPGLILTNLFQHTALLMRFLKFFSFYLWKNIPQGAATTCYVALHPSVKGVTGKYFADCNEVTPSKLARDETLAQKLWDFSVKLINSVSKKNYLGFDDTT

SEQ ID NO: 36159 - protein, 285 aa, Arabidopsis thaliana
  peptide (1)..(285): Ceres Seq. ID no. 12337729
METARVLSKRGAHVVIGARNMGAAENAKTEILRQNANARVTLLQLDLSSIKSIKAFVREFHALHLPLNLLINNAGVMFCPYQLSEDGIELQFATNHIGHFLLTNLLLDTMKNTAKTSGVEGRILNVSSVAHIYTYQEGIQFDSINDICSYSDKRAYGQSKLANILHANELSRQLQEEGVNITANSVHPGLILTNLFQHTALLMRFLKFFSFYLWKNIPQGAATTCYVALHPSVKGVTGKYFADCNEVTPSKLARDETLAQKLWDFSVKLINSVSKKNYLGFDDTT

SEQ ID NO: 36160 - DNA, 720 bp, Arabidopsis thaliana
  misc_feature (1)..(720): Ceres Seq. ID no. 12334547
  misc_feature (1)..(720): Ortholog of  Ceres SEQ ID NO 13594023 as cited in SEQ ID NO 55192
  misc_feature (1)..(720): Ortholog of  Ceres SEQ ID NO 15174297 as cited in SEQ ID NO 0
agtttagattctttatccgactactttgttcatcggttttgtttttctttttgtcttccggaaggcgaattacatgtcggaagcagcacagctcagaagaggtctaaagcctaaagggaagacttatgggttgaccaatcagaagagacgagagatcagagagatctttgatcttttcgacatagacggttcaggtagcatcgatgctagcgagctcaacgttgctatgaggtctcttggatttgagatgaataatcagcaaataaacgaattgatggcagaagtagataaaaaccaaagtggagccatagatttcgacgaatttgtgcatatgatgacaaccaaattcggagaacgagactccatagacgaattgtctaaggcgtttaagatcattgaccacgacaatagtgggaagatttcacctcgtgatataaagatgattgctaaagaattgggagaaaatttcacagataatgatatagaagaaatgatcgaagaagcagaccgtgacaaagatggagaagttaacttggaggagttcatgaagatgatgaagagaacctctttcggctaagtataaatcaattagtaatggttgtgaataatatttgttaatcaccttgatttataataataaagaagtttgatttgtggcttggtcgaataaaaatgtattgttgtataaaaataataatgtaattcacatccattattttg

SEQ ID NO: 36161 - protein, 167 aa, Arabidopsis thaliana
  peptide (1)..(167): Ceres Seq. ID no. 12334548
MSEAAQLRRGLKPKGKTYGLTNQKRREIREIFDLFDIDGSGSIDASELNVAMRSLGFEMNNQQINELMAEVDKNQSGAIDFDEFVHMMTTKFGERDSIDELSKAFKIIDHDNSGKISPRDIKMIAKELGENFTDNDIEEMIEEADRDKDGEVNLEEFMKMMKRTSFG

SEQ ID NO: 36162 - protein, 116 aa, Arabidopsis thaliana
  peptide (1)..(116): Ceres Seq. ID no. 12334549
MRSLGFEMNNQQINELMAEVDKNQSGAIDFDEFVHMMTTKFGERDSIDELSKAFKIIDHDNSGKISPRDIKMIAKELGENFTDNDIEEMIEEADRDKDGEVNLEEFMKMMKRTSFG

SEQ ID NO: 36163 - protein, 109 aa, Arabidopsis thaliana
  peptide (1)..(109): Ceres Seq. ID no. 12334550
MNNQQINELMAEVDKNQSGAIDFDEFVHMMTTKFGERDSIDELSKAFKIIDHDNSGKISPRDIKMIAKELGENFTDNDIEEMIEEADRDKDGEVNLEEFMKMMKRTSFG

SEQ ID NO: 36164 - DNA, 2758 bp, Arabidopsis thaliana
  misc_feature (1)..(2758): Ceres Seq. ID no. 13497291
  misc_feature (1)..(2758): Ortholog of  Ceres SEQ ID NO 13662721 as cited in SEQ ID NO 64602
  misc_feature (1)..(2758): Ortholog of  Ceres SEQ ID NO 13654557 as cited in SEQ ID NO 68444
acagcctcacttccaaacccttcgtttacagcaaaaaatcgaaaatggttgcctcagccgccgcacgacctcttgtcaccgtccaaggacttgacggtgacatgagcaccgatcaatccaccaccgtcactttaccagacgtcatgactgctccagttcgacctgacattgtcaacttcgtccacgcccaaatctccaacaacagccgtcagccttacgcagtctccaaaaaggccggtcaccaaacctccgccgagtcctggggaaccggaagagccgtgtcacgtatccctcgtgttcctggtggtggaactcaccgtgccggtcaagcagcgttcggaaacatgtgtcgtggtggtcgtatgtttgctccgactaagatctggagacgctggcaccgtcgtgtcaatgtcaacatgaagaggcacgcgattgtttctgcaatcgctgctactgctgttccagctcttgtgatggctcgtggtcacaagatcgagaatgttcctgagatgcctcttgttgttagcgactcagctgaagctgtggagaagacatcagctgcgatcaaggtattgaagcagatcggtgcttacgacgatgcggagaaagctaagaacagtattggaattcgtcctggtaaaggtaaaatgaggaatcgtcgttacatttctaggaaaggtcctcttgttgtgtttggaactgaaggagccaagattgtgaaagcttttaggaatcttcctggtgttgagctttgtcacgttgagaggcttaacttgttgaaattagcccctggtggtcaccttggtaggtttgtgatttggactaagtctgcttttgagaagcttgaatctatctatggctcgtttgagaaaccatcagagaagaagaagggttacgtcttgcctcgtgcgaagatggtgaatgctgatcttgctaggattattaactccgatgaggtacagagtgtggtgaacccgattaaggatggttccaagagagcggttctgaagaagaatccattgaagaaccttaatgtgatgttcaagttgaatccttatgctaagaccgcaaagagaatgtctctgttggctgaagcttcaagggttaaggctaagaaggagaagctcgagaagaagaggaaagtcgtcactaaggaggaggcccaagcgatcaaagcagcaggcaaggcttggtatcagactatgatttcagacagtgactacaccgagttcgataacttcaccaagtggcttggcgctagtcagtaatgatgctctcgtcatcgcaaagtctcttatatctaggcaaagattttggttttctgatttatgttcttcgtttgtattggatttatctgggattttatgttgttgagttggtaagacgatttttaagaactatgatggtgtttttcaaactcttttcaatctgtttccaaaaaaaaaaaaaaaactgacttccattgccaccacaacaaccaaaaccatatctcgccgccgccgtcgacgacgacgacacttgcttcaccaccgtatcgctatcaacagaggaaagagataagaagcgtgttaactctttcttctaattccatggatatttgtggcgttgattccgaaggaaaagagtttaatagcgtacaagagatgtggagagaagaaattggagaaggagacgaaactaaaaaaacccaatggtatagagatggtgtttcttattgggaaggtgttgaagcttctgttgatggagtattaggaggatatgggcatgtgaatgatgctgatattataggaagtgaggtttttcttaagactcttttgcaagaaagattagttaacaatgttggagctaatcagcatttagtagctcttgattgtggatctggtattggaagaatcactaaaaatcttctgattcgatactttaacgaggttgatcttcttgagcctgtagcacaatttttggatgcagctcgtgaaaatttggcatctgcaggctctgaaacgcacaaagctactaactttttctgtgtacctcttcaggagtttactccagctgctgggaggtatgatgtaatatgggttcaatggtgcattgggcatctcacggacaatgactttgtttctttctttaaccgcgcaaagggataccttaaacctggtgggtttttcgtcgtgaaagagaatctcgctaaaaatggatttgttttggataaagaggatcatagcatcaccagatcggatccatacttcaaacagctctttcgccaatgtgggttacatctctatagaacaaaggatcagaaaggtcttccacaagagttatttgctgtaaaaatgtatgcgttaacggttgacacaccacccaaaatccaccgaaccaggtcaaaaactcgaagcaacagaccgcagattatcaaatgacaaagcttccgattggtttactacggagtcttaatcgtttggtgtaaagagagaagctaccaaaggtgttgtaagatctggatcaaggcttggctgcttcattgtcacatggtttggttttgtgcatgctcgattctcctctcctccatcaccttaccaagtcataaactctcgtgtactcatgactaaacctgtttctgctccattctgttttttatctgataatttgtccggacttgaagaaattagaattgtgatccttttactgtagccacatattcctatatcatttttgtttaaaatatttaattgtactatatttcgatgttctacaagtc

SEQ ID NO: 36165 - protein, 421 aa, Arabidopsis thaliana
  peptide (1)..(421): Ceres Seq. ID no. 13497292
SLTSKPFVYSKKSKMVASAAARPLVTVQGLDGDMSTDQSTTVTLPDVMTAPVRPDIVNFVHAQISNNSRQPYAVSKKAGHQTSAESWGTGRAVSRIPRVPGGGTHRAGQAAFGNMCRGGRMFAPTKIWRRWHRRVNVNMKRHAIVSAIAATAVPALVMARGHKIENVPEMPLVVSDSAEAVEKTSAAIKVLKQIGAYDDAEKAKNSIGIRPGKGKMRNRRYISRKGPLVVFGTEGAKIVKAFRNLPGVELCHVERLNLLKLAPGGHLGRFVIWTKSAFEKLESIYGSFEKPSEKKKGYVLPRAKMVNADLARIINSDEVQSVVNPIKDGSKRAVLKKNPLKNLNVMFKLNPYAKTAKRMSLLAEASRVKAKKEKLEKKRKVVTKEEAQAIKAAGKAWYQTMISDSDYTEFDNFTKWLGASQ

SEQ ID NO: 36166 - protein, 407 aa, Arabidopsis thaliana
  peptide (1)..(407): Ceres Seq. ID no. 13497293
MVASAAARPLVTVQGLDGDMSTDQSTTVTLPDVMTAPVRPDIVNFVHAQISNNSRQPYAVSKKAGHQTSAESWGTGRAVSRIPRVPGGGTHRAGQAAFGNMCRGGRMFAPTKIWRRWHRRVNVNMKRHAIVSAIAATAVPALVMARGHKIENVPEMPLVVSDSAEAVEKTSAAIKVLKQIGAYDDAEKAKNSIGIRPGKGKMRNRRYISRKGPLVVFGTEGAKIVKAFRNLPGVELCHVERLNLLKLAPGGHLGRFVIWTKSAFEKLESIYGSFEKPSEKKKGYVLPRAKMVNADLARIINSDEVQSVVNPIKDGSKRAVLKKNPLKNLNVMFKLNPYAKTAKRMSLLAEASRVKAKKEKLEKKRKVVTKEEAQAIKAAGKAWYQTMISDSDYTEFDNFTKWLGASQ

SEQ ID NO: 36167 - protein, 388 aa, Arabidopsis thaliana
  peptide (1)..(388): Ceres Seq. ID no. 13497294
MSTDQSTTVTLPDVMTAPVRPDIVNFVHAQISNNSRQPYAVSKKAGHQTSAESWGTGRAVSRIPRVPGGGTHRAGQAAFGNMCRGGRMFAPTKIWRRWHRRVNVNMKRHAIVSAIAATAVPALVMARGHKIENVPEMPLVVSDSAEAVEKTSAAIKVLKQIGAYDDAEKAKNSIGIRPGKGKMRNRRYISRKGPLVVFGTEGAKIVKAFRNLPGVELCHVERLNLLKLAPGGHLGRFVIWTKSAFEKLESIYGSFEKPSEKKKGYVLPRAKMVNADLARIINSDEVQSVVNPIKDGSKRAVLKKNPLKNLNVMFKLNPYAKTAKRMSLLAEASRVKAKKEKLEKKRKVVTKEEAQAIKAAGKAWYQTMISDSDYTEFDNFTKWLGASQ

SEQ ID NO: 36168 - DNA, 1509 bp, Arabidopsis thaliana
  misc_feature (1)..(1509): Ceres Seq. ID no. 12602368
  misc_feature (1)..(1509): Ortholog of  Ceres SEQ ID NO 14308586 as cited in SEQ ID NO 55143
  misc_feature (1)..(1509): Ortholog of  Ceres SEQ ID NO 14314308 as cited in SEQ ID NO 57259
  misc_feature (1)..(1509): Ortholog of  Ceres SEQ ID NO 15226216 as cited in SEQ ID NO 62291
aagttcatacatggtacaaagctttagcaagttgtcgaatttcatcctacaattgaattttctctttactatttcaaagtttgaatgctcctctgttttcttcgttggttcattgagaaaaaaggaacagactttttacttgtgccattgaccaagaaccacaaagaggaggaaatcaaatggtttttgggagtttgatggattgattgattattcagcaaatcccacagaagaaatcagaagctgcttcttattttttggtcacgaccagtcttaatcaaagtagttcgtctcctacttgttattaaaagtgtatatttctgttgggagtttctgttctcctaccacctcattgacctttaatgatggactcatagtttggtgccaagtgacccaaaaaaaaaaaaaaaaaaaaagtcgatcttgaagatttcatactttttctggcaattctgtttggtttcagaggaaggagtcaaaacaatggggatcgtttcagaagaagccattgatgaattccaagagctgatggatcaagttgaggagccactgaagaaaacttatgagagagtccatcagggatatctaagggagaatttgggtcgttttctgaaagcacgagactggaacgtatgcaaagctcacacaatgctggttgagtgtttgcgttggagggtggataatgaaattgacagtatcctatctaaaccaattgttcctactgagttgtatagggatgtacgagattctcaactcataggaatgtcaggttacaccaaagagggcttgccggtctttgctattggcgtcggcctcagcacatttgacaaagcttctgttcactactatgtccaatctcacatacaaatcaatgaatatagagaccgtgttttactgccttctatttctaagaagaatgggaggccaatcaccacctgcgtcaaggttctagacatgacggggttgaagctttcagctctaagccaaatcaagttagtgactatcatatcgaccattgatgatctcaactatccagagaagacaaacacgtactatgttgtgaacgctccatatatattttccgcatgttggaaggttgtaaaacctcttttacaagagaggacaaggaaaaaagttcatgtcttatccggttgcggaagggatgaattattgaagattatggacttcacatccctgccacatttctgtagaagtggaagctctgggtcatctcaccacactcagagcgcaaattgtttttctatcaatcatcccttccatcaacagctatacaactatgtgaagcaccattatgaaacccaaggacaagcagaacctgcaaagcaaggatcattccacgtgggttttcctgagcctgaagctgaacgttgtgtgatagccaaaaccatagaatcggagctgcacaagtttgagaaccgcaacggtctggccgtgtccattgatgacagaaaatccagtcatgaaacactggcaaatggtgacctctga

SEQ ID NO: 36169 - protein, 341 aa, Arabidopsis thaliana
  peptide (1)..(341): Ceres Seq. ID no. 12602369
MGIVSEEAIDEFQELMDQVEEPLKKTYERVHQGYLRENLGRFLKARDWNVCKAHTMLVECLRWRVDNEIDSILSKPIVPTELYRDVRDSQLIGMSGYTKEGLPVFAIGVGLSTFDKASVHYYVQSHIQINEYRDRVLLPSISKKNGRPITTCVKVLDMTGLKLSALSQIKLVTIISTIDDLNYPEKTNTYYVVNAPYIFSACWKVVKPLLQERTRKKVHVLSGCGRDELLKIMDFTSLPHFCRSGSSGSSHHTQSANCFSINHPFHQQLYNYVKHHYETQGQAEPAKQGSFHVGFPEPEAERCVIAKTIESELHKFENRNGLAVSIDDRKSSHETLANGDL

SEQ ID NO: 36170 - protein, 326 aa, Arabidopsis thaliana
  peptide (1)..(326): Ceres Seq. ID no. 12602370
MDQVEEPLKKTYERVHQGYLRENLGRFLKARDWNVCKAHTMLVECLRWRVDNEIDSILSKPIVPTELYRDVRDSQLIGMSGYTKEGLPVFAIGVGLSTFDKASVHYYVQSHIQINEYRDRVLLPSISKKNGRPITTCVKVLDMTGLKLSALSQIKLVTIISTIDDLNYPEKTNTYYVVNAPYIFSACWKVVKPLLQERTRKKVHVLSGCGRDELLKIMDFTSLPHFCRSGSSGSSHHTQSANCFSINHPFHQQLYNYVKHHYETQGQAEPAKQGSFHVGFPEPEAERCVIAKTIESELHKFENRNGLAVSIDDRKSSHETLANGDL

SEQ ID NO: 36171 - protein, 286 aa, Arabidopsis thaliana
  peptide (1)..(286): Ceres Seq. ID no. 12602371
MLVECLRWRVDNEIDSILSKPIVPTELYRDVRDSQLIGMSGYTKEGLPVFAIGVGLSTFDKASVHYYVQSHIQINEYRDRVLLPSISKKNGRPITTCVKVLDMTGLKLSALSQIKLVTIISTIDDLNYPEKTNTYYVVNAPYIFSACWKVVKPLLQERTRKKVHVLSGCGRDELLKIMDFTSLPHFCRSGSSGSSHHTQSANCFSINHPFHQQLYNYVKHHYETQGQAEPAKQGSFHVGFPEPEAERCVIAKTIESELHKFENRNGLAVSIDDRKSSHETLANGDL

SEQ ID NO: 36172 - DNA, 2463 bp, Arabidopsis thaliana
  misc_feature (1)..(2463): Ceres Seq. ID no. 12601343
  misc_feature (1)..(2463): Ortholog of  Ceres SEQ ID NO 12465083 as cited in SEQ ID NO 68239
tatatctcttcctcctactttcccttagggtttttcagcttcaaaccctccttgcactctccgcttccctccgttacctttacttctctattgcttagctcgaaaaatggcatcttcagccgcccaaatccacgttctcggcggaattggattcgcttcttcttcttcttccaagagaaatctcaatggtaaaggcggtacctttatgccgagaagtgccttcttcggtacaagaaccggtcctttctccacacccacttctgcttttctcagaatgggcaccagaaatggcggcggcgcttctagatacgcggttggtccggttcgtgtggttaacgagaaggttgttggaattgatttgggtacgactaactctgcagtagctgctatggaaggaggtaagcctacgattgtgactaacgctgaaggtcagaggacaacgccttctgttgtggcttacacgaagagtggtgataggcttgttgggcagattgcgaagaggcaagctgttgttaatcccgagaatactttcttctcagtgaagaggtttattggtaggaagatgaacgaggttgatgaagagtctaagcaggtttcttacagagttgttagagatgagaacaataatgttaagcttgagtgtcctgccattaacaaacaatttgctgctgaggagatttcagctcaggttctaaggaaacttgtggatgatgcatcaagattcttgaacgacaaagtaaccaaggctgtcatcactgtgcctgcttacttcaacgattcacagaggacagctacaaaagatgctggtcgaattgctgggttggaagttcttcgtattatcaatgagcccacagctgcttcattggcttatgggtttgacagaaaagccaatgaaacaatcctagtcttcgatcttggtggtggtacctttgatgtctcagtgcttgaggttggtgatggtgtgtttgaagtgctttccacttctggcgacacacacttgggtggtgatgactttgacaagagagttgttgattggcttgctgcagaattcaagaaagacgaagggatagatcttctgaaagacaagcaagctcttcagaggttaacagaggcagcagaaaaagctaaaattgagctttcttcactgactcagacaaatatgagcttaccttttatcacggccacagctgatggacctaaacacatagaaaccaccctcacacgtgccaagttcgaagaattgtgttcagatttacttgacagggtcaggactcctgtcgagaattccctgcgggatgcaaagctcagcttcaaagatattgatgaagtcatccttgtcggtggatccacacgtattcctgctgttcaggaactcgtgaggaaggtgactgggaaagaacctaatgttacagtaaatcctgacgaggttgtagcgttaggtgctgcagtccaggctggtgttcttgctggagatgtgagtgacattgtgcttcttgatgtgacaccgctttcgattggtttggagaccctaggtggtgttatgactaagattattccaaggaacaccacactgcctacttctaaatcagaagtcttttcaactgctgctgatggacagacaagtgttgagattaatgtgttgcagggtgagagggagtttgttagggataacaagtctcttggtagcttccgtctagatggtatcccccctgcaccacgtggagttccacaaatcgaagtcaaatttgacattgatgccaatggaattctatctgtcagtgctgttgacaagggcacaggaaagaagcaagacatcaccattactggcgcaagtacattgcccaaggatgaggtagaccaaatggtccaggaggcagaaagatttgcaaaagatgacaaagagaagagagacgcaatcgacacgaaaaaccaagcagattcagtggtgtaccagacagagaagcaactgaaagaactaggagagaaaattccaggtgaagtgaaagagaaggtggaggctaagctacaagagctgaaagacaagataggaagtggatcaacccaagaaatcaaagacgccatggctgctcttaaccaagaagtgatgcagattggtcagtctctatacaaccagcctggagctggaggtccaggtgcaggtccttccccgggaggcgaaggtgcttcatcaggagattcatcttcaagtaaaggaggagatggtgatgatgtgatcgatgctgacttcacagacagccaatgagaaaacaaactaggaaggctttggaattcatacatgggatgcgatgggagagacaaatgattttgtaggttggatttgagaacacaaatgaatttaagcaatgcttgtggacaacatttatttgtcgttagaaggaagcagtgtggttacagaggatgatgtttaatacataataatatgcaagccttctcttacacggt

SEQ ID NO: 36173 - protein, 718 aa, Arabidopsis thaliana
  peptide (1)..(718): Ceres Seq. ID no. 12601344
MASSAAQIHVLGGIGFASSSSSKRNLNGKGGTFMPRSAFFGTRTGPFSTPTSAFLRMGTRNGGGASRYAVGPVRVVNEKVVGIDLGTTNSAVAAMEGGKPTIVTNAEGQRTTPSVVAYTKSGDRLVGQIAKRQAVVNPENTFFSVKRFIGRKMNEVDEESKQVSYRVVRDENNNVKLECPAINKQFAAEEISAQVLRKLVDDASRFLNDKVTKAVITVPAYFNDSQRTATKDAGRIAGLEVLRIINEPTAASLAYGFDRKANETILVFDLGGGTFDVSVLEVGDGVFEVLSTSGDTHLGGDDFDKRVVDWLAAEFKKDEGIDLLKDKQALQRLTEAAEKAKIELSSLTQTNMSLPFITATADGPKHIETTLTRAKFEELCSDLLDRVRTPVENSLRDAKLSFKDIDEVILVGGSTRIPAVQELVRKVTGKEPNVTVNPDEVVALGAAVQAGVLAGDVSDIVLLDVTPLSIGLETLGGVMTKIIPRNTTLPTSKSEVFSTAADGQTSVEINVLQGEREFVRDNKSLGSFRLDGIPPAPRGVPQIEVKFDIDANGILSVSAVDKGTGKKQDITITGASTLPKDEVDQMVQEAERFAKDDKEKRDAIDTKNQADSVVYQTEKQLKELGEKIPGEVKEKVEAKLQELKDKIGSGSTQEIKDAMAALNQEVMQIGQSLYNQPGAGGPGAGPSPGGEGASSGDSSSSKGGDGDDVIDADFTDSQ

SEQ ID NO: 36174 - protein, 685 aa, Arabidopsis thaliana
  peptide (1)..(685): Ceres Seq. ID no. 12601345
MPRSAFFGTRTGPFSTPTSAFLRMGTRNGGGASRYAVGPVRVVNEKVVGIDLGTTNSAVAAMEGGKPTIVTNAEGQRTTPSVVAYTKSGDRLVGQIAKRQAVVNPENTFFSVKRFIGRKMNEVDEESKQVSYRVVRDENNNVKLECPAINKQFAAEEISAQVLRKLVDDASRFLNDKVTKAVITVPAYFNDSQRTATKDAGRIAGLEVLRIINEPTAASLAYGFDRKANETILVFDLGGGTFDVSVLEVGDGVFEVLSTSGDTHLGGDDFDKRVVDWLAAEFKKDEGIDLLKDKQALQRLTEAAEKAKIELSSLTQTNMSLPFITATADGPKHIETTLTRAKFEELCSDLLDRVRTPVENSLRDAKLSFKDIDEVILVGGSTRIPAVQELVRKVTGKEPNVTVNPDEVVALGAAVQAGVLAGDVSDIVLLDVTPLSIGLETLGGVMTKIIPRNTTLPTSKSEVFSTAADGQTSVEINVLQGEREFVRDNKSLGSFRLDGIPPAPRGVPQIEVKFDIDANGILSVSAVDKGTGKKQDITITGASTLPKDEVDQMVQEAERFAKDDKEKRDAIDTKNQADSVVYQTEKQLKELGEKIPGEVKEKVEAKLQELKDKIGSGSTQEIKDAMAALNQEVMQIGQSLYNQPGAGGPGAGPSPGGEGASSGDSSSSKGGDGDDVIDADFTDSQ

SEQ ID NO: 36175 - protein, 662 aa, Arabidopsis thaliana
  peptide (1)..(662): Ceres Seq. ID no. 12601346
MGTRNGGGASRYAVGPVRVVNEKVVGIDLGTTNSAVAAMEGGKPTIVTNAEGQRTTPSVVAYTKSGDRLVGQIAKRQAVVNPENTFFSVKRFIGRKMNEVDEESKQVSYRVVRDENNNVKLECPAINKQFAAEEISAQVLRKLVDDASRFLNDKVTKAVITVPAYFNDSQRTATKDAGRIAGLEVLRIINEPTAASLAYGFDRKANETILVFDLGGGTFDVSVLEVGDGVFEVLSTSGDTHLGGDDFDKRVVDWLAAEFKKDEGIDLLKDKQALQRLTEAAEKAKIELSSLTQTNMSLPFITATADGPKHIETTLTRAKFEELCSDLLDRVRTPVENSLRDAKLSFKDIDEVILVGGSTRIPAVQELVRKVTGKEPNVTVNPDEVVALGAAVQAGVLAGDVSDIVLLDVTPLSIGLETLGGVMTKIIPRNTTLPTSKSEVFSTAADGQTSVEINVLQGEREFVRDNKSLGSFRLDGIPPAPRGVPQIEVKFDIDANGILSVSAVDKGTGKKQDITITGASTLPKDEVDQMVQEAERFAKDDKEKRDAIDTKNQADSVVYQTEKQLKELGEKIPGEVKEKVEAKLQELKDKIGSGSTQEIKDAMAALNQEVMQIGQSLYNQPGAGGPGAGPSPGGEGASSGDSSSSKGGDGDDVIDADFTDSQ

SEQ ID NO: 36176 - DNA, 533 bp, Arabidopsis thaliana
  misc_feature (1)..(533): Ceres Seq. ID no. 12673734
  misc_feature (1)..(533): Ortholog of  Ceres SEQ ID NO 12556794 as cited in SEQ ID NO 23
  misc_feature (1)..(533): Ortholog of  Ceres SEQ ID NO 13595787 as cited in SEQ ID NO 59785
aaccataacacaaatacaccaaaaaaaaaaaaacagaaagtaacatgagatctctcttattagccgtgtgcctggttcttgctttacactgcggtgaagcagccgtgtcttgcaacacggtgattgcggatctttacccttgcttatcctacgtgactcagggcggaccggtcccaaccctctgctgcaacggtctcacaacactcaagagtcaggctcaaacttctgtggaccgtcagggggtctgtcgttgcatcaaatctgctattggaggactcactctctctcctagaaccatccaaaatgctttggaattgccttctaaatgtggtgtcgatctcccttacaagttcagcccttccactgactgcgacagtatccagtgagacaagcagaaaatcttaaaggaagctactacaagaactataataacctaataattaataaatgagggcattggtttgctagttgctaattgatcagtgatgtattgtcattttgaatgttctaatatcagcaggcacttatctctg

SEQ ID NO: 36177 - protein, 113 aa, Arabidopsis thaliana
  peptide (1)..(113): Ceres Seq. ID no. 12673735
MRSLLLAVCLVLALHCGEAAVSCNTVIADLYPCLSYVTQGGPVPTLCCNGLTTLKSQAQTSVDRQGVCRCIKSAIGGLTLSPRTIQNALELPSKCGVDLPYKFSPSTDCDSIQ

SEQ ID NO: 36178 - DNA, 758 bp, Arabidopsis thaliana
  misc_feature (1)..(758): Ceres Seq. ID no. 13487077
  misc_feature (1)..(758): Ortholog of  Ceres SEQ ID NO 13661767 as cited in SEQ ID NO 61423
aaaaaaaaaaaagcatttacacaacgaagatcattaatggctctcgaggcatggtttatggatgatagcaatgaggaccagagacttcctcatcatcgtaacccgaaagaactcgtctcgttggattacttggcagagttgggagtgttgtactggaagttgaaccctgagaactacgagaatgattctgaacttagcaagattagagaagacaggggttacgattacatggatttgctggatctgtgtcccgagaaagtcagcaactacgaagaaaagctgaagaactttttcacagaacacattcacaaggacgaagagattcggtactgcctagcaggaagtggctactttgatgttagggacaaggatgatcgttggatccgtatctggatgcaacctggcgatctcattgtccttcctgccggaatctaccaccggttcacactcgacgccagcaactacatcaagctaatgaggctgttcgtgggggaaccggtttggacaccatataaccggccacaggaagaacatcctgttaggaaaaagtatatccacggcttaacctacaagtttggagaaaccgttaaagcacattaacaatattaatatatgcttgttgtgtaatttgtatgtattgtttactctttagtcttaagcagtaaaataaaaacagcggctccttctggatagttgttcttgtaacatacttttgcgatgtatgcttttatacataaaaaaaatagtgtgtatttatc

SEQ ID NO: 36179 - protein, 199 aa, Arabidopsis thaliana
  peptide (1)..(199): Ceres Seq. ID no. 13487078
KKKKAFTQRRSLMALEAWFMDDSNEDQRLPHHRNPKELVSLDYLAELGVLYWKLNPENYENDSELSKIREDRGYDYMDLLDLCPEKVSNYEEKLKNFFTEHIHKDEEIRYCLAGSGYFDVRDKDDRWIRIWMQPGDLIVLPAGIYHRFTLDASNYIKLMRLFVGEPVWTPYNRPQEEHPVRKKYIHGLTYKFGETVKAH

SEQ ID NO: 36180 - protein, 187 aa, Arabidopsis thaliana
  peptide (1)..(187): Ceres Seq. ID no. 13487079
MALEAWFMDDSNEDQRLPHHRNPKELVSLDYLAELGVLYWKLNPENYENDSELSKIREDRGYDYMDLLDLCPEKVSNYEEKLKNFFTEHIHKDEEIRYCLAGSGYFDVRDKDDRWIRIWMQPGDLIVLPAGIYHRFTLDASNYIKLMRLFVGEPVWTPYNRPQEEHPVRKKYIHGLTYKFGETVKAH

SEQ ID NO: 36181 - protein, 180 aa, Arabidopsis thaliana
  peptide (1)..(180): Ceres Seq. ID no. 13487080
MDDSNEDQRLPHHRNPKELVSLDYLAELGVLYWKLNPENYENDSELSKIREDRGYDYMDLLDLCPEKVSNYEEKLKNFFTEHIHKDEEIRYCLAGSGYFDVRDKDDRWIRIWMQPGDLIVLPAGIYHRFTLDASNYIKLMRLFVGEPVWTPYNRPQEEHPVRKKYIHGLTYKFGETVKAH

SEQ ID NO: 36182 - DNA, 1486 bp, Arabidopsis thaliana
  misc_feature (1)..(1486): Ceres Seq. ID no. 12370913
  misc_feature (1)..(1486): Ortholog of  Ceres SEQ ID NO 15226515 as cited in SEQ ID NO 58519
aacattctcattattcacccaaggagagagatcggagctaaaaagccatctctcgccggaaaatttctcagttttcttattaccttagccacagacaacaagacgacagaggaatctaatcttagccccctttcctctctgtctctctctatatctctgtctttaggctttgagatatcttcaacacgaagctttttgcttcttttttttatctctttaaaaaattccagccaatggttcgaatccaatagtagcttcaaaggtcatggatttagtcaggggtttgtggaggaaacatagaaggaagattttggtgacgacgacttgtttgggaagtgggtatttgctctataaactatacaatgcccatactcgtaagctcgctgatttggaacgagagcttgctaatgagcgtgaaaacgacgagatcatcaaaacccaaatgaaggcacatttcgataacattcagatgattgctgatactactacattgcctcacgcaattcatcacttgagtagtcgtgtagttgaagagattgatgtctcgagtattatggataagctaagcaaaggcaaaggaatattgattccttctgagaagcttcaactctggaatgagctcaaaattttgagtttcacgagaatggtcttgtccctttggtcggtcactatgcttagtttgtacattagggttcaagtcaatattttgggcagacatttatatatcgacactgctagaggtcttgggagctcccatttacttgacgaactagatctcatagagagagatgatgaacaaaagtttttgacaagcgctgattttcttgcgaccagtggcatgccgagtttgatttctaacatgcagaacgcagtgaaagaagttctcaagggaaagcagttaaaggatgtgttaaccacaagtgctcttcgagaaactgtgatgcggattctcgatgtgtttatgagcacaggaagtccacaccactgggtagattatctaatgatgtcccaagacgcaaccactgatgtttcctcttctgatgcaactgttaccaagtttcatctactcataaccgagacacgggaagtactcacaaacaatttttcaaatgtagcagagatctcactcaagtgttgtgccgttgcgttagtagaggagatggaaacgcagaccggtctggccacagggatgcaattggcaaagctattaccacagattgagaaaaccatgccggagatttcagctgagccggagaagaaccggttcttgcaactcatccgagatttgcctgaagttaaactcttttttactcttttatacgcaaatatgcctcagtagcattattaaaccccattgccaaaaattgtttcctgatcactttttatcatatgtttcgatttacttcaaaatagtaaaaccaaacatctctagaataattgttcaatatctatatcaaatcatttactaatatagtaatattgcagc

SEQ ID NO: 36183 - protein, 357 aa, Arabidopsis thaliana
  peptide (1)..(357): Ceres Seq. ID no. 12370914
MDLVRGLWRKHRRKILVTTTCLGSGYLLYKLYNAHTRKLADLERELANERENDEIIKTQMKAHFDNIQMIADTTTLPHAIHHLSSRVVEEIDVSSIMDKLSKGKGILIPSEKLQLWNELKILSFTRMVLSLWSVTMLSLYIRVQVNILGRHLYIDTARGLGSSHLLDELDLIERDDEQKFLTSADFLATSGMPSLISNMQNAVKEVLKGKQLKDVLTTSALRETVMRILDVFMSTGSPHHWVDYLMMSQDATTDVSSSDATVTKFHLLITETREVLTNNFSNVAEISLKCCAVALVEEMETQTGLATGMQLAKLLPQIEKTMPEISAEPEKNRFLQLIRDLPEVKLFFTLLYANMPQ

SEQ ID NO: 36184 - protein, 298 aa, Arabidopsis thaliana
  peptide (1)..(298): Ceres Seq. ID no. 12370915
MKAHFDNIQMIADTTTLPHAIHHLSSRVVEEIDVSSIMDKLSKGKGILIPSEKLQLWNELKILSFTRMVLSLWSVTMLSLYIRVQVNILGRHLYIDTARGLGSSHLLDELDLIERDDEQKFLTSADFLATSGMPSLISNMQNAVKEVLKGKQLKDVLTTSALRETVMRILDVFMSTGSPHHWVDYLMMSQDATTDVSSSDATVTKFHLLITETREVLTNNFSNVAEISLKCCAVALVEEMETQTGLATGMQLAKLLPQIEKTMPEISAEPEKNRFLQLIRDLPEVKLFFTLLYANMPQ

SEQ ID NO: 36185 - protein, 289 aa, Arabidopsis thaliana
  peptide (1)..(289): Ceres Seq. ID no. 12370916
MIADTTTLPHAIHHLSSRVVEEIDVSSIMDKLSKGKGILIPSEKLQLWNELKILSFTRMVLSLWSVTMLSLYIRVQVNILGRHLYIDTARGLGSSHLLDELDLIERDDEQKFLTSADFLATSGMPSLISNMQNAVKEVLKGKQLKDVLTTSALRETVMRILDVFMSTGSPHHWVDYLMMSQDATTDVSSSDATVTKFHLLITETREVLTNNFSNVAEISLKCCAVALVEEMETQTGLATGMQLAKLLPQIEKTMPEISAEPEKNRFLQLIRDLPEVKLFFTLLYANMPQ

SEQ ID NO: 36186 - DNA, 1220 bp, Arabidopsis thaliana
  misc_feature (1)..(1220): Ceres Seq. ID no. 12335068
  misc_feature (1)..(1220): Ortholog of  Ceres SEQ ID NO 13593919 as cited in SEQ ID NO 54135
  misc_feature (1)..(1220): Ortholog of  Ceres SEQ ID NO 14303359 as cited in SEQ ID NO 54913
  misc_feature (1)..(1220): Ortholog of  Ceres SEQ ID NO 13596017 as cited in SEQ ID NO 62012
aaacacacacatatacacccaaacgttatgtaactgcaaaaaaaatatcgaaacgagattctacaattagtctctagtcaaagagcttcatggcaatggtgtgaccccaaagttagtcttcacatgtttcttaagtttcaaacattgaatttttttccttttataaatagttaagacttatcttcattttctaaaatagtcaagatttatattcctcttaaaaaataatttatttccttcctaagaagaattattagatttattttctttgctagtatagattgatgaaagtgaggaaatgggagaagaaatgaagaacacaggatgtgtcttcttcttctaagtcactaacaaaatcaacaaagaggagaagccattattatataatagagagattgagagaagagatttatccaaaaaaatattgcaattcttcttggagtgaataatgccagtccctcttgcaccatatccaacacctccggcaccggcactggctccgtcgtacaacactcctccggcaaatggaagtacaagtgggcagagccagttagtgtgttcaggttgcagaaaccttctgatgtatcccgtcggagcaacctccgtctgttgcgccgtctgtaacgccgtcacggccgttcctccgcccggaacggagatggcacagttggtatgtggaggatgtcatacactcttaatgtacattcgtggagctacaagtgttcaatgttcttgttgtcacactgttaatctcgccctcgaagcaaaccaagtagcgcatgtgaattgcggaaactgcatgatgctactaatgtatcaatatggagcaagatcagtgaaatgtgccgtttgtaactttgtcacatctgttgggggttcaacgagcacgactgattcgaagtttaacaattaaaacttggatctatctacctatcaatacatattgagttatgagcaatatagaggaagcatcaaatctttttcactctctcttcgatcaagaatccggcagtgatgagtttgaaaccattttcggaagtaaatgaaatatgtaattcgtcgaaatttctgactttggtctctttgtccgtttgtatagagctatctctcttctttggtttttgttttgttctcttaagaaaaatttgattcaccagtttgtaagagtgattcagaaatcaaagctagactttttatgcatgaaaaaaatagattgtttt

SEQ ID NO: 36187 - protein, 154 aa, Arabidopsis thaliana
  peptide (1)..(154): Ceres Seq. ID no. 12335069
MPVPLAPYPTPPAPALAPSYNTPPANGSTSGQSQLVCSGCRNLLMYPVGATSVCCAVCNAVTAVPPPGTEMAQLVCGGCHTLLMYIRGATSVQCSCCHTVNLALEANQVAHVNCGNCMMLLMYQYGARSVKCAVCNFVTSVGGSTSTTDSKFNN

SEQ ID NO: 36188 - protein, 110 aa, Arabidopsis thaliana
  peptide (1)..(110): Ceres Seq. ID no. 12335070
MYPVGATSVCCAVCNAVTAVPPPGTEMAQLVCGGCHTLLMYIRGATSVQCSCCHTVNLALEANQVAHVNCGNCMMLLMYQYGARSVKCAVCNFVTSVGGSTSTTDSKFNN

SEQ ID NO: 36189 - protein, 84 aa, Arabidopsis thaliana
  peptide (1)..(84): Ceres Seq. ID no. 12335071
MAQLVCGGCHTLLMYIRGATSVQCSCCHTVNLALEANQVAHVNCGNCMMLLMYQYGARSVKCAVCNFVTSVGGSTSTTDSKFNN

SEQ ID NO: 36190 - DNA, 1408 bp, Arabidopsis thaliana
  misc_feature (1)..(1408): Ceres Seq. ID no. 13490509
  misc_feature (1)..(1408): Ortholog of  Ceres SEQ ID NO 13598253 as cited in SEQ ID NO 62412
atccgttggtgaatctggacagtcccctcaaataaaagttgtgagagctgtttcgtcgctttgatcgaaatggcgtcgtcttctccaactcagctagctcacgtcccgattcctccagaaccaggaggaaggtcgccgacacaagaagctaatgagccaccagttccgatttacattgtgacggatccgtttcaacttcctgctgatttcctaaacccttctcctgaaaagaaattggttatcggttttgactgtgagggtgttgacctctgccgacatgggaaactttgtatcatgcagattgcattctctaatgcaatatacttggttgatgtcatcgaaggtggagaggtgattatgaaagcgtgtaagcctgcactcgagtctaattacatcacgaaagttattcacgattgcaagcgtgacagtgaggctctatacttccagtttgggataagattgcacaatgttgtggacactcagattgcttattctctgattgaagaacaagaagggcggaggagacctctagatgattacatatcgtttgtttcactccttgctgatccacgttactgcggtatatcctatgaagagaaagaagaagttcgagttctcatgcgccaggacccaaagttttggacatacaggcctatgactgagctcatgatccgcgcagctgctgatgatgtccgcttccttctgtatctctatcacaaaatgatgggaaagctaaatcagcggtcactatggcatcttgcagttcgtggtgctttgtactgtcggtgtctctgctgcatgaatgatgctgattttgctgattggccaaccgttcctccaattccagataacctgaagtcagaagatcaatgtcttgaagaagagatcctgtcagtgcttgatgttccaccaggaaagatgggacgtgtgattggaaggaaaggagcatcgatcctcgccattaaggaagcttgcaacgcggaaattctaattggaggggcaaagggtccacctgataagatatttgtgattggaccggtgagagaagtgcgtaaggcggaggctatactgagaggaagaatgatagactattgaaggaaatgagggtcctttgtaatctgtctcattgcccctataaaaaaaaatactaaaaccctcttaaaacttggaaactccatggttcagtacggacccgagagagtcgtcccctcttcaataaaagttacatcattaacttccgtttatactgtggaacttaccattccatttcccgcaagggacttcatagtttgatgaaacaaaaagaccatatcaagtatggtttattggcaaatgcaagagtagtttatctgattgaccgttaagattgattttatttactttgcgactcaaattgagtctgaaaccc

SEQ ID NO: 36191 - protein, 341 aa, Arabidopsis thaliana
  peptide (1)..(341): Ceres Seq. ID no. 13490510
MASSSPTQLAHVPIPPEPGGRSPTQEANEPPVPIYIVTDPFQLPADFLNPSPEKKLVIGFDCEGVDLCRHGKLCIMQIAFSNAIYLVDVIEGGEVIMKACKPALESNYITKVIHDCKRDSEALYFQFGIRLHNVVDTQIAYSLIEEQEGRRRPLDDYISFVSLLADPRYCGISYEEKEEVRVLMRQDPKFWTYRPMTELMIRAAADDVRFLLYLYHKMMGKLNQRSLWHLAVRGALYCRCLCCMNDADFADWPTVPPIPDNLKSEDQCLEEEILSVLDVPPGKMGRVIGRKGASILAIKEACNAEILIGGAKGPPDKIFVIGPVREVRKAEAILRGRMIDY

SEQ ID NO: 36192 - protein, 266 aa, Arabidopsis thaliana
  peptide (1)..(266): Ceres Seq. ID no. 13490511
MQIAFSNAIYLVDVIEGGEVIMKACKPALESNYITKVIHDCKRDSEALYFQFGIRLHNVVDTQIAYSLIEEQEGRRRPLDDYISFVSLLADPRYCGISYEEKEEVRVLMRQDPKFWTYRPMTELMIRAAADDVRFLLYLYHKMMGKLNQRSLWHLAVRGALYCRCLCCMNDADFADWPTVPPIPDNLKSEDQCLEEEILSVLDVPPGKMGRVIGRKGASILAIKEACNAEILIGGAKGPPDKIFVIGPVREVRKAEAILRGRMIDY

SEQ ID NO: 36193 - protein, 245 aa, Arabidopsis thaliana
  peptide (1)..(245): Ceres Seq. ID no. 13490512
MKACKPALESNYITKVIHDCKRDSEALYFQFGIRLHNVVDTQIAYSLIEEQEGRRRPLDDYISFVSLLADPRYCGISYEEKEEVRVLMRQDPKFWTYRPMTELMIRAAADDVRFLLYLYHKMMGKLNQRSLWHLAVRGALYCRCLCCMNDADFADWPTVPPIPDNLKSEDQCLEEEILSVLDVPPGKMGRVIGRKGASILAIKEACNAEILIGGAKGPPDKIFVIGPVREVRKAEAILRGRMIDY

SEQ ID NO: 36194 - DNA, 1678 bp, Arabidopsis thaliana
  misc_feature (1)..(1678): Ceres Seq. ID no. 12385488
  misc_feature (1)..(1678): Ortholog of  Ceres SEQ ID NO 14314925 as cited in SEQ ID NO 57985
  misc_feature (1)..(1678): Ortholog of  Ceres SEQ ID NO 13591365 as cited in SEQ ID NO 62720
atcgcttcttcctcctcctgcttcttcaactccaaacctcaccctctcaatttccctccttcgccggtccacggcgtcatttcacggtggcgcttcacctctctccgtcacctactctcctaaaaatccaatctttacaaaatccagaccaatatagaaatgactttaatcgcttctctgtctctcccaccaccagctatacaaagacaatcactttctgaatttcataatcttcccgctaaatctcaatccttcaattgtcaattccggtcttctagttcacctttatcttctctccattcttcatcgcttagtaactttctagattttagactaaggcggagaaacagcggattggttccagtggtggcgtgttcaacgacgccgtttatgggtagagttggattgcattggagagatgggaatatgtctctgttatcgttttgtggtggaactgatgttacagagagagctgattcgtctcagttttggtctgctttgcttccatttgttgttgctctcactgccgttgctgctctctcttacccacctagtttcacttgggtatctaaagacctctatgctcctgctcttggagggattatgttatctattggaattcagctttcagttgacgattttgctcttgcattcaaaagaccagtgccgttatctgttgggtttgttgctcagtacgttttgaaaccgcttctcggggttttagttgctaatgcatttgggatgccgaggaccttctacgctggttttatactcacgtgttgtgtggctggggctcagttgtctagttacgcgagttctctgagtaaagctgatgtggccatgagcattcttctcactagttctacaactattgcttctgtaatctttacacctttgcttagtggtcttctaattggatcagtagttcctgttgatgcagttgccatgtcgaagtctatacttcaggtggtacttgttccaatcactcttggccttgtgttaaatacttatgcgaagcctgtggtcactcttcttcaacctgtgatgccgtttgttgctatggtatgcacttcattgtgcattggaagcccactttcgattaatcgcagtcagattctgtcagctgaaggtcttggattgattgttccaattgttacattccatgccgtagcatttgccttaggatattggttctctaagatcccaggcttacgacaagaggaagaagtaagccggactatctccctttgcacgggaatgcaaagctccacattagccgggcttcttgcaagccagttccttggtagcagccaagccgtgccagcagcttgctctgtagttgtaatggccataatgggtctatgccttgcctcattctggggcaatgggttccgaatcagagatgttctatcgctatcaacaccgcaaagcagaggctacaccactgaatcatgagcaatatcagcagaagctacaaacctgtaaagcaagggaaccacaccttgggacattgatcgcgcatattctttccggtttttaatttgatgtacaagcagcgtttgggaagtaaagataaggtttagaggggatggtataggtagtgtagacaaaatggtattcatcaatcatcttgtatgtaatctgctaattcaaggtataaaagatatcttttgttgcc

SEQ ID NO: 36195 - protein, 431 aa, Arabidopsis thaliana
  peptide (1)..(431): Ceres Seq. ID no. 12385489
MTLIASLSLPPPAIQRQSLSEFHNLPAKSQSFNCQFRSSSSPLSSLHSSSLSNFLDFRLRRRNSGLVPVVACSTTPFMGRVGLHWRDGNMSLLSFCGGTDVTERADSSQFWSALLPFVVALTAVAALSYPPSFTWVSKDLYAPALGGIMLSIGIQLSVDDFALAFKRPVPLSVGFVAQYVLKPLLGVLVANAFGMPRTFYAGFILTCCVAGAQLSSYASSLSKADVAMSILLTSSTTIASVIFTPLLSGLLIGSVVPVDAVAMSKSILQVVLVPITLGLVLNTYAKPVVTLLQPVMPFVAMVCTSLCIGSPLSINRSQILSAEGLGLIVPIVTFHAVAFALGYWFSKIPGLRQEEEVSRTISLCTGMQSSTLAGLLASQFLGSSQAVPAACSVVVMAIMGLCLASFWGNGFRIRDVLSLSTPQSRGYTTES

SEQ ID NO: 36196 - protein, 354 aa, Arabidopsis thaliana
  peptide (1)..(354): Ceres Seq. ID no. 12385490
MGRVGLHWRDGNMSLLSFCGGTDVTERADSSQFWSALLPFVVALTAVAALSYPPSFTWVSKDLYAPALGGIMLSIGIQLSVDDFALAFKRPVPLSVGFVAQYVLKPLLGVLVANAFGMPRTFYAGFILTCCVAGAQLSSYASSLSKADVAMSILLTSSTTIASVIFTPLLSGLLIGSVVPVDAVAMSKSILQVVLVPITLGLVLNTYAKPVVTLLQPVMPFVAMVCTSLCIGSPLSINRSQILSAEGLGLIVPIVTFHAVAFALGYWFSKIPGLRQEEEVSRTISLCTGMQSSTLAGLLASQFLGSSQAVPAACSVVVMAIMGLCLASFWGNGFRIRDVLSLSTPQSRGYTTES

SEQ ID NO: 36197 - protein, 342 aa, Arabidopsis thaliana
  peptide (1)..(342): Ceres Seq. ID no. 12385491
MSLLSFCGGTDVTERADSSQFWSALLPFVVALTAVAALSYPPSFTWVSKDLYAPALGGIMLSIGIQLSVDDFALAFKRPVPLSVGFVAQYVLKPLLGVLVANAFGMPRTFYAGFILTCCVAGAQLSSYASSLSKADVAMSILLTSSTTIASVIFTPLLSGLLIGSVVPVDAVAMSKSILQVVLVPITLGLVLNTYAKPVVTLLQPVMPFVAMVCTSLCIGSPLSINRSQILSAEGLGLIVPIVTFHAVAFALGYWFSKIPGLRQEEEVSRTISLCTGMQSSTLAGLLASQFLGSSQAVPAACSVVVMAIMGLCLASFWGNGFRIRDVLSLSTPQSRGYTTES

SEQ ID NO: 36198 - DNA, 1295 bp, Arabidopsis thaliana
  misc_feature (1)..(1295): Ceres Seq. ID no. 12323001
  misc_feature (1)..(1295): Ortholog of  Ceres SEQ ID NO 13582332 as cited in SEQ ID NO 59890
  misc_feature (1)..(1295): Ortholog of  Ceres SEQ ID NO 13598278 as cited in SEQ ID NO 68456
aatatttctccttcaggtttctatgatggaactagaatcagaaactcaagaactccatcttcacgtaaatggcgaacctgaagggaaattttcaacagaagagagaagtcacaagtactcttggaggttaagagtgtctctctatgtcactctcctcttagctggagagacaatagccactctcttaggtagactttactacgaaaaaggcggtaaaagcacatggctcgaaaccttggttcagcttgtagggtttcctttaacccttccttgctattattacttaaagcctgagccgtccaagactaaaaccattaccaaaaaaactacttcttccttcttgacactatctttagtgtatattggacttggcttgcttgttgctggacattgtattttgtactcatttgggctactttaccttcctgtctcaactttctctttgatctctgcgtcgcaattggcttttaacgccgtcttctcttacttcctaaactcacaaaaaatcacaccatttatactcaattcacttgttctcttaaccatatcttctacacttcttgttatccaacatgaaccagaatctccctcttctacttcaaagtccgcagccaagtccaagtatgtgattggatacatctgcgcggtcggtagctcagctggttattctctggtgctttctttaacagattacgcgttcgaaaagattctaaagaaatacacattcaaggctattttagacatggccacatatccgtctatggtagctacttgtgtagttgtggtaggactttttggaagtggtgggtggaaaaagctgagtacagaaatggaagagtttcaactagggaaaagctcatacattttgataaacatcggttcaacgatatcatggcaagcttgtttgattggaagtgttggtttgattatcgaagtttcatcgcttttttccaatgtcataagcactctttgtttaccagttgtgcctgttcttgctgttgtcttcttccgtgatgagatgagtggaatcaagttgattgcaatgtttttggccatctggggatttgtttcttatggttatcagcattatgtcaatgatagaaagccagaagaagaccaagagcttcctcagtctaaagaagaagaagaacaaaaacaagtagataccattcatgtccaagcttaggcaaagatccaagaaaaccaaaagcttttgtaatttgaaccagtttaatttaaaataaaaatgagttatatatattgtaggcactacaaataaaattggtaagtgtctc

SEQ ID NO: 36199 - protein, 394 aa, Arabidopsis thaliana
  peptide (1)..(394): Ceres Seq. ID no. 12323002
IFLLQVSMMELESETQELHLHVNGEPEGKFSTEERSHKYSWRLRVSLYVTLLLAGETIATLLGRLYYEKGGKSTWLETLVQLVGFPLTLPCYYYLKPEPSKTKTITKKTTSSFLTLSLVYIGLGLLVAGHCILYSFGLLYLPVSTFSLISASQLAFNAVFSYFLNSQKITPFILNSLVLLTISSTLLVIQHEPESPSSTSKSAAKSKYVIGYICAVGSSAGYSLVLSLTDYAFEKILKKYTFKAILDMATYPSMVATCVVVVGLFGSGGWKKLSTEMEEFQLGKSSYILINIGSTISWQACLIGSVGLIIEVSSLFSNVISTLCLPVVPVLAVVFFRDEMSGIKLIAMFLAIWGFVSYGYQHYVNDRKPEEDQELPQSKEEEEQKQVDTIHVQA

SEQ ID NO: 36200 - protein, 387 aa, Arabidopsis thaliana
  peptide (1)..(387): Ceres Seq. ID no. 12323003
MMELESETQELHLHVNGEPEGKFSTEERSHKYSWRLRVSLYVTLLLAGETIATLLGRLYYEKGGKSTWLETLVQLVGFPLTLPCYYYLKPEPSKTKTITKKTTSSFLTLSLVYIGLGLLVAGHCILYSFGLLYLPVSTFSLISASQLAFNAVFSYFLNSQKITPFILNSLVLLTISSTLLVIQHEPESPSSTSKSAAKSKYVIGYICAVGSSAGYSLVLSLTDYAFEKILKKYTFKAILDMATYPSMVATCVVVVGLFGSGGWKKLSTEMEEFQLGKSSYILINIGSTISWQACLIGSVGLIIEVSSLFSNVISTLCLPVVPVLAVVFFRDEMSGIKLIAMFLAIWGFVSYGYQHYVNDRKPEEDQELPQSKEEEEQKQVDTIHVQA

SEQ ID NO: 36201 - protein, 386 aa, Arabidopsis thaliana
  peptide (1)..(386): Ceres Seq. ID no. 12323004
MELESETQELHLHVNGEPEGKFSTEERSHKYSWRLRVSLYVTLLLAGETIATLLGRLYYEKGGKSTWLETLVQLVGFPLTLPCYYYLKPEPSKTKTITKKTTSSFLTLSLVYIGLGLLVAGHCILYSFGLLYLPVSTFSLISASQLAFNAVFSYFLNSQKITPFILNSLVLLTISSTLLVIQHEPESPSSTSKSAAKSKYVIGYICAVGSSAGYSLVLSLTDYAFEKILKKYTFKAILDMATYPSMVATCVVVVGLFGSGGWKKLSTEMEEFQLGKSSYILINIGSTISWQACLIGSVGLIIEVSSLFSNVISTLCLPVVPVLAVVFFRDEMSGIKLIAMFLAIWGFVSYGYQHYVNDRKPEEDQELPQSKEEEEQKQVDTIHVQA

SEQ ID NO: 36202 - DNA, 753 bp, Arabidopsis thaliana
  misc_feature (1)..(753): Ceres Seq. ID no. 12385641
  misc_feature (1)..(753): Ortholog of  Ceres SEQ ID NO 14313370 as cited in SEQ ID NO 67252
ttctccaatctcttttcgatttcgaatttttccatctttcaattttcagtagtttcgtctcaatttcacaatttcagtgtagtctacgatgaattcggctttagattttgcttttccggctacatttccggttaaatcgagttctgttggcggatatcggattccttctgctggattcagttcccgcttaagattgtgctctcttcctccttcttcatctatcaaggctgagtcatgtttaaaaagagacgtgcacaggcaaagaagcagtcttgagtcaatgttctgttatgataaaccaataccagaggaaataatcgaggagccagttggattatccatgtcagagagagagattggtgataatcagcgttgcacttgttgtgaagctaaaggtgcattgctttgttccacttgttctggaactggtctatatgtagattccattatggagagtcaaggcatcattgttaaagtccgttgcttaggttgtggtggaagtggtaatattatgtgcaaactttgtggtgggcgtggtcacgtaggacactgatgactccgtgtttcacttgtttccactcatggttctgttttacctattcgccacttttcttgctctgatcttattgtaaaatcctactctttgagttccatacatagatttgtgttcttgtactgatgtaatctctagctaaactatgcacaatcttgtcccagactattcattttctgttgttatataaaatggtttcc

SEQ ID NO: 36203 - protein, 154 aa, Arabidopsis thaliana
  peptide (1)..(154): Ceres Seq. ID no. 12385642
MNSALDFAFPATFPVKSSSVGGYRIPSAGFSSRLRLCSLPPSSSIKAESCLKRDVHRQRSSLESMFCYDKPIPEEIIEEPVGLSMSEREIGDNQRCTCCEAKGALLCSTCSGTGLYVDSIMESQGIIVKVRCLGCGGSGNIMCKLCGGRGHVGH

SEQ ID NO: 36204 - protein, 90 aa, Arabidopsis thaliana; identical to SEQ ID NO: 30305
  peptide (1)..(90): Ceres Seq. ID no. 12385643

SEQ ID NO: 36205 - DNA, 935 bp, Arabidopsis thaliana
  misc_feature (1)..(935): Ceres Seq. ID no. 12357795
  misc_feature (1)..(935): Ortholog of  Ceres SEQ ID NO 15173807 as cited in SEQ ID NO 57520
aaaacgccgtcgagaaatctccctctagggtttctttgatcaaaccagagagccgtcagggagagcaaaacaaagatcggagaagatgaagacgattctttcttccgaaacgatggacatccccgacagtgttaccatcaaggttcacgctaaagtgatcgaagtcgaaggacctcgcgggaagcttgttcgcgatttcaagcatctcaacctcgatttccagctgatcaaggatccagagactggaaagaagaagcttaagatcgattcgtggtttggaacacgcaaaaccagcgcctccatcagaaccgctcttagccacgtcgataacttgatctccggtgttaccagaggtttccgttacaagatgaggttcgtgtacgcccattttcccatcaacgcctccatcggcggtgacggaaagtctatcgagatccgtaacttccttggcgagaagaaggtgaggaaggtagagatgttggatggtgtaaccattgttcgatctgagaaggtgaaggatgagattgttcttgacggtaacgacatcgagcttgtttcaaggtcatgcgctttgatcaaccagaaatgtcacgtgaagaagaaggatatcaggaagtttcttgatggtatctatgttagcgagaaaagcaagatcgtagaggaagaatgaatgcccatatcatcgtcttagctcctatttcttgtcttttgaatgttagtttcgttttatggaccaaatccaccggtgttgcaaaactctggctatcccttgttccctttttgtgttcgagattttatttacttatgcacaagttttggagacgagctatcattttcacctttgcttaattaaatcatatcgtgtgaatttgggattgttctggatttggcattgtgggttgtgcattcaaaattgatacttcagtcactaaact

SEQ ID NO: 36206 - protein, 194 aa, Arabidopsis thaliana
  peptide (1)..(194): Ceres Seq. ID no. 12357796
MKTILSSETMDIPDSVTIKVHAKVIEVEGPRGKLVRDFKHLNLDFQLIKDPETGKKKLKIDSWFGTRKTSASIRTALSHVDNLISGVTRGFRYKMRFVYAHFPINASIGGDGKSIEIRNFLGEKKVRKVEMLDGVTIVRSEKVKDEIVLDGNDIELVSRSCALINQKCHVKKKDIRKFLDGIYVSEKSKIVEEE

SEQ ID NO: 36207 - protein, 185 aa, Arabidopsis thaliana
  peptide (1)..(185): Ceres Seq. ID no. 12357797
MDIPDSVTIKVHAKVIEVEGPRGKLVRDFKHLNLDFQLIKDPETGKKKLKIDSWFGTRKTSASIRTALSHVDNLISGVTRGFRYKMRFVYAHFPINASIGGDGKSIEIRNFLGEKKVRKVEMLDGVTIVRSEKVKDEIVLDGNDIELVSRSCALINQKCHVKKKDIRKFLDGIYVSEKSKIVEEE

SEQ ID NO: 36208 - protein, 100 aa, Arabidopsis thaliana
  peptide (1)..(100): Ceres Seq. ID no. 12357798
MRFVYAHFPINASIGGDGKSIEIRNFLGEKKVRKVEMLDGVTIVRSEKVKDEIVLDGNDIELVSRSCALINQKCHVKKKDIRKFLDGIYVSEKSKIVEEE

SEQ ID NO: 36209 - DNA, 1575 bp, Arabidopsis thaliana
  misc_feature (1)..(1575): Ceres Seq. ID no. 13495954
  misc_feature (1)..(1575): Ortholog of  Ceres SEQ ID NO 13648081 as cited in SEQ ID NO 165
  misc_feature (1)..(1575): Ortholog of  Ceres SEQ ID NO 14308598 as cited in SEQ ID NO 60416
  misc_feature (1)..(1575): Ortholog of  Ceres SEQ ID NO 13502952 as cited in SEQ ID NO 62271
  misc_feature (1)..(1575): Ortholog of  Ceres SEQ ID NO 13502973 as cited in SEQ ID NO 68052
  misc_feature (1)..(1575): Ortholog of  Ceres SEQ ID NO 13596000 as cited in SEQ ID NO 68188
  misc_feature (1)..(1575): Ortholog of  Ceres SEQ ID NO 15179420 as cited in SEQ ID NO 0
gtcaaatcgaaaacaaacacaaaaagcaaacaaatatggctacttcaatcaaatctataaccctagctctcttgatattctcagtgttactaatctccttgtctctcggctccgtcacagcgacggagactacacgaaacgaggcggaggcacgacggatgtatgaaaggtggcttgttgagaatcggaagaactataatggtctcggagagaaagagagacgctttgagatcttcaaagacaacttgaagttcgtcgaagagcacagttccatcccgaatcggacttacgaagtcgggttgacccggttcgctgatttgactaacgatgagtttcgtgcgatttacttgaggagcaagatggagagaactagggttccggtgaagggagagaagtatttgtataaggttggagatagcttacctgatgctatcgattggagagctaaaggtgctgttaatccagtcaaagatcaaggatcctgtggaagttgttgggcgttttccgcgattggagcggttgaaggtataaatcagattaagacaggagagttgatatctttgtctgagcaagaacttgttgattgtgacacaagttacaatgatggatgtggtggaggtcttatggattatgcttttaagttcattattgaaaacggtggtattgatacagaggaagattatccttatattgcaactgatgttaacgtgtgcaattctgataagaagaacactcgtgttgttaccatcgatggttatgaggatgttcctcaaaacgatgagaagtctttgaagaaggctcttgctaatcaacctattagtgttgccattgaagctggtggcagagctttccagctttacacatctggtgtgtttacaggaacatgtggaacatctttggaccatggtgttgtagctgtgggatacggatcagaaggtggtcaagactactggattgttcgtaactcatggggatcaaactggggagaaagcggatactttaagctcgaacgtaacatcaaagagtcatcagggaaatgcggtgtggcgatgatggcttcttaccctaccaaatcatcaggctcaaacccaccaaaaccgccagcgccttcaccggttgtttgtgacaagtctaacacttgtccagctaagtccacttgttgttgcctatatgagtacaatggtaaatgctatagctggggatgttgtccgtatgagtcagccacttgttgcgatgatggttctagctgctgcccccagtcataccctgtctgcgatttaaaggccaatacttgtagaatgaagggaaacagtccgttaagcataaaagctttgacacgaggaccagcgattgcgaccacaaagtctacaaacatgctagtgggcagcgcttgaggagagataatacaaacgaagaaccgatttgttttcagcccacgttatcaagattcagtcttttgtctttagacacttccaagttggatcatagtttgattactcttgtcaaatttaatgttatcttggatttgattttacttgatgtaaatgtttaagaagtaatctgatatttgcttcc

SEQ ID NO: 36210 - protein, 463 aa, Arabidopsis thaliana
  peptide (1)..(463): Ceres Seq. ID no. 13495955
QIENKHKKQTNMATSIKSITLALLIFSVLLISLSLGSVTATETTRNEAEARRMYERWLVENRKNYNGLGEKERRFEIFKDNLKFVEEHSSIPNRTYEVGLTRFADLTNDEFRAIYLRSKMERTRVPVKGEKYLYKVGDSLPDAIDWRAKGAVNPVKDQGSCGSCWAFSAIGAVEGINQIKTGELISLSEQELVDCDTSYNDGCGGGLMDYAFKFIIENGGIDTEEDYPYIATDVNVCNSDKKNTRVVTIDGYEDVPQNDEKSLKKALANQPISVAIEAGGRAFQLYTSGVFTGTCGTSLDHGVVAVGYGSEGGQDYWIVRNSWGSNWGESGYFKLERNIKESSGKCGVAMMASYPTKSSGSNPPKPPAPSPVVCDKSNTCPAKSTCCCLYEYNGKCYSWGCCPYESATCCDDGSSCCPQSYPVCDLKANTCRMKGNSPLSIKALTRGPAIATTKSTNMLVGSA

SEQ ID NO: 36211 - protein, 452 aa, Arabidopsis thaliana
  peptide (1)..(452): Ceres Seq. ID no. 13495956
MATSIKSITLALLIFSVLLISLSLGSVTATETTRNEAEARRMYERWLVENRKNYNGLGEKERRFEIFKDNLKFVEEHSSIPNRTYEVGLTRFADLTNDEFRAIYLRSKMERTRVPVKGEKYLYKVGDSLPDAIDWRAKGAVNPVKDQGSCGSCWAFSAIGAVEGINQIKTGELISLSEQELVDCDTSYNDGCGGGLMDYAFKFIIENGGIDTEEDYPYIATDVNVCNSDKKNTRVVTIDGYEDVPQNDEKSLKKALANQPISVAIEAGGRAFQLYTSGVFTGTCGTSLDHGVVAVGYGSEGGQDYWIVRNSWGSNWGESGYFKLERNIKESSGKCGVAMMASYPTKSSGSNPPKPPAPSPVVCDKSNTCPAKSTCCCLYEYNGKCYSWGCCPYESATCCDDGSSCCPQSYPVCDLKANTCRMKGNSPLSIKALTRGPAIATTKSTNMLVGSA

SEQ ID NO: 36212 - protein, 411 aa, Arabidopsis thaliana
  peptide (1)..(411): Ceres Seq. ID no. 13495957
MYERWLVENRKNYNGLGEKERRFEIFKDNLKFVEEHSSIPNRTYEVGLTRFADLTNDEFRAIYLRSKMERTRVPVKGEKYLYKVGDSLPDAIDWRAKGAVNPVKDQGSCGSCWAFSAIGAVEGINQIKTGELISLSEQELVDCDTSYNDGCGGGLMDYAFKFIIENGGIDTEEDYPYIATDVNVCNSDKKNTRVVTIDGYEDVPQNDEKSLKKALANQPISVAIEAGGRAFQLYTSGVFTGTCGTSLDHGVVAVGYGSEGGQDYWIVRNSWGSNWGESGYFKLERNIKESSGKCGVAMMASYPTKSSGSNPPKPPAPSPVVCDKSNTCPAKSTCCCLYEYNGKCYSWGCCPYESATCCDDGSSCCPQSYPVCDLKANTCRMKGNSPLSIKALTRGPAIATTKSTNMLVGSA

SEQ ID NO: 36213 - DNA, 719 bp, Arabidopsis thaliana
  misc_feature (1)..(719): Ceres Seq. ID no. 12322937
  misc_feature (1)..(719): Ortholog of  Ceres SEQ ID NO 12563124 as cited in SEQ ID NO 57104
  misc_feature (1)..(719): Ortholog of  Ceres SEQ ID NO 13598373 as cited in SEQ ID NO 62185
  misc_feature (1)..(719): Ortholog of  Ceres SEQ ID NO 12617639 as cited in SEQ ID NO 65219
acatctcactgctcactactctcactgtaatcccttagatcttcttttcaaatttcaatggcgtccggtgatgttgagtatcggtgcttcgttggaggtctagcatgggccactgatgacagagctcttgagactgccttcgctcaatacggcgacgttattgattccaagatcattaacgatcgtgagactggaagatcaaggggattcggattcgtcaccttcaaggatgagaaagccatgaaggatgcgattgagggaatgaacggacaagatctcgatggccgtagcatcactgttaacgaggctcagtcacgaggaagcggtggcggcggtagacgcgagggtggaggaggatacagcggcggcggcggttactcctcaagaggtggtggtggcggaagctacggtggtggaagacgtgagggaggaggaggatacggtggtggtgaaggaggaggttacggaggaagcggtggtggtggaggatggtaattcctttaattaggtttgggattaccaatgaatgttctctctctcgcttgttatgcttctacttggttttgtgtgttctctattttgttctggttctgctttatatttgatgtaacagttcgtgattaggtattttggtatctggaaacgtaatgttaagtcacttgtcattctctaaataacaaatttcttcggagatattatctctgttgattgattctacc

SEQ ID NO: 36214 - protein, 145 aa, Arabidopsis thaliana
  peptide (1)..(145): Ceres Seq. ID no. 12322938
MASGDVEYRCFVGGLAWATDDRALETAFAQYGDVIDSKIINDRETGRSRGFGFVTFKDEKAMKDAIEGMNGQDLDGRSITVNEAQSRGSGGGGRREGGGGYSGGGGYSSRGGGGGSYGGGRREGGGGYGGGEGGGYGGSGGGGGW

SEQ ID NO: 36215 - protein, 84 aa, Arabidopsis thaliana
  peptide (1)..(84): Ceres Seq. ID no. 12322939
MKDAIEGMNGQDLDGRSITVNEAQSRGSGGGGRREGGGGYSGGGGYSSRGGGGGSYGGGRREGGGGYGGGEGGGYGGSGGGGGW

SEQ ID NO: 36216 - protein, 77 aa, Arabidopsis thaliana
  peptide (1)..(77): Ceres Seq. ID no. 12322940
MNGQDLDGRSITVNEAQSRGSGGGGRREGGGGYSGGGGYSSRGGGGGSYGGGRREGGGGYGGGEGGGYGGSGGGGGW

SEQ ID NO: 36217 - DNA, 917 bp, Arabidopsis thaliana
  misc_feature (1)..(917): Ceres Seq. ID no. 12396494
  misc_feature (1)..(917): Ortholog of  Ceres SEQ ID NO 13622393 as cited in SEQ ID NO 1256
ctctgcacattcctcagtgatctatcaaagttcgaagagaccgacgcaaaagggacagaaacggagaaggagaaagaggcagagatgggagtagagatccaatcgccgcaggaacagagctcttacaccgttgagcagctcgtcgcccttaatcctttcaaccctgaaatcctgcctgatctcgaaaactacgttaacgttacatcgcaaacgtatagtctggaagtaaacctatgcttgcttcggctctatcagtttgagcctgagcgcatgaacactcatatcgtggctcgaatcttggtcaaggctcttatggctatgccaactccagacttcagcctttgcctcttcttgattcccgaaagagtgcaaatggaggagcagttcaagtcactaattgttctatcacactaccttgagactgggaggttccaacagttctgggatgaagctgccaagaaccgtcacattctcgaggctgttccaggttttgagcaagctattcaagcatatgcaagtcaccttcttagcttaagctaccaaaaggttccaagatcagtgctggctgaggctgttaacatggatggtgcatctctagacaaattcatcgagcagcaagtgactaacagtggatggattgttgagaaagagggtggaagtattgtcttaccacaaaatgaatttaaccatccggagctcaagaaaaatacaggtgagaatgttcccttggaacacattgcccgcatcttccccatccttggttgaaccaattcatgagaacactgcaaattttccttttgtctcttgttatcttgtgatgtacacttttaagacaccgtaatgtgaattttggcaatggccttcctctttgcaatttgacagattttcttaaaaatctagtagaccgagactttgcc

SEQ ID NO: 36218 - protein, 254 aa, Arabidopsis thaliana
  peptide (1)..(254): Ceres Seq. ID no. 12396495
LCTFLSDLSKFEETDAKGTETEKEKEAEMGVEIQSPQEQSSYTVEQLVALNPFNPEILPDLENYVNVTSQTYSLEVNLCLLRLYQFEPERMNTHIVARILVKALMAMPTPDFSLCLFLIPERVQMEEQFKSLIVLSHYLETGRFQQFWDEAAKNRHILEAVPGFEQAIQAYASHLLSLSYQKVPRSVLAEAVNMDGASLDKFIEQQVTNSGWIVEKEGGSIVLPQNEFNHPELKKNTGENVPLEHIARIFPILG

SEQ ID NO: 36219 - protein, 226 aa, Arabidopsis thaliana
  peptide (1)..(226): Ceres Seq. ID no. 12396496
MGVEIQSPQEQSSYTVEQLVALNPFNPEILPDLENYVNVTSQTYSLEVNLCLLRLYQFEPERMNTHIVARILVKALMAMPTPDFSLCLFLIPERVQMEEQFKSLIVLSHYLETGRFQQFWDEAAKNRHILEAVPGFEQAIQAYASHLLSLSYQKVPRSVLAEAVNMDGASLDKFIEQQVTNSGWIVEKEGGSIVLPQNEFNHPELKKNTGENVPLEHIARIFPILG

SEQ ID NO: 36220 - protein, 164 aa, Arabidopsis thaliana
  peptide (1)..(164): Ceres Seq. ID no. 12396497
MNTHIVARILVKALMAMPTPDFSLCLFLIPERVQMEEQFKSLIVLSHYLETGRFQQFWDEAAKNRHILEAVPGFEQAIQAYASHLLSLSYQKVPRSVLAEAVNMDGASLDKFIEQQVTNSGWIVEKEGGSIVLPQNEFNHPELKKNTGENVPLEHIARIFPILG

SEQ ID NO: 36221 - DNA, 1310 bp, Arabidopsis thaliana
  misc_feature (1)..(1310): Ceres Seq. ID no. 12738714
  misc_feature (1)..(1310): Ortholog of  Ceres SEQ ID NO 14307526 as cited in SEQ ID NO 58875
gtgtagactgagaaataaagaagcccttgattttgcccattgcagtcatctctctcgaatctctctctataatccgatctgagaaatttcgccggagctaggttttgttgtttaccgatcaatcctttaatcaatggcaatggctgttttccgtcgcgaagggaggcgtctcctcccttcaatcgccgctcgcccaatcgctgctatccgatctcctctctcttctgaccaggaggaaggacttcttggagttcgatctatctcaactcaagtggtgcgtaaccgcatgaagagtgttaagaacatccaaaagatcacaaaggcaatgaagatggttgctgcttccaagcttagagcagttcaaggccgagctgagaactcccgtggactttggcagccatttactgcacttctaggagataatcccagcattgatgtaaagaagagtgtggtggtcactctctcttctgacaagggtctctgtggtggaatcaactccactgtcgttaaagtgagcagggctctgtacaaattgaatgctggtcctgaaaaggaagttcagtttgttattgtcggagagaaagcaaaggctataatgtttcgtgactcaaagaacgacattgtcctctctgtaacagagctgaataagaacccactcaattatgctcaggtgtcagttctagctgatgacatcctgaagaacgttgaatttgatgctttgcgcattgtctacaacaagttccattcagttgtcgcatttctgccaactgtgtccactgttttgtcacctgagattattgagaaggagtctgaaattggaggaaaacttggcgagcttgactcatatgagattgaaggtggggaaacaaagggagaaatattgcagaatctggccgagttccaattctcttgtgtgatgttcaatgcggttctggagaatgcatgtagtgagatgggagcaagaatgtctgccatggacagctcaagcagaaacgcaggagaaatgctcgaccgtctcaccctcacatacaacaggactcgtcaagcttctattacaacagagcttattgagattatctctggagcttctgctcttgaagctgctaaataagcccatccgtgttagttctcttttcttcgctttgatatttacccccaccttgaaggagaagagtgtgttaaaattttactgaatcagtttcctttgctggcttcttgttgagacctaccaatgtttgctcaacgatttttaataaacatacctgtaatttccagcaggatttcgaataattgcattaacattttgttcc

SEQ ID NO: 36222 - protein, 325 aa, Arabidopsis thaliana
  peptide (1)..(325): Ceres Seq. ID no. 12738715
MAMAVFRREGRRLLPSIAARPIAAIRSPLSSDQEEGLLGVRSISTQVVRNRMKSVKNIQKITKAMKMVAASKLRAVQGRAENSRGLWQPFTALLGDNPSIDVKKSVVVTLSSDKGLCGGINSTVVKVSRALYKLNAGPEKEVQFVIVGEKAKAIMFRDSKNDIVLSVTELNKNPLNYAQVSVLADDILKNVEFDALRIVYNKFHSVVAFLPTVSTVLSPEIIEKESEIGGKLGELDSYEIEGGETKGEILQNLAEFQFSCVMFNAVLENACSEMGARMSAMDSSSRNAGEMLDRLTLTYNRTRQASITTELIEIISGASALEAAK

SEQ ID NO: 36223 - protein, 323 aa, Arabidopsis thaliana
  peptide (1)..(323): Ceres Seq. ID no. 12738716
MAVFRREGRRLLPSIAARPIAAIRSPLSSDQEEGLLGVRSISTQVVRNRMKSVKNIQKITKAMKMVAASKLRAVQGRAENSRGLWQPFTALLGDNPSIDVKKSVVVTLSSDKGLCGGINSTVVKVSRALYKLNAGPEKEVQFVIVGEKAKAIMFRDSKNDIVLSVTELNKNPLNYAQVSVLADDILKNVEFDALRIVYNKFHSVVAFLPTVSTVLSPEIIEKESEIGGKLGELDSYEIEGGETKGEILQNLAEFQFSCVMFNAVLENACSEMGARMSAMDSSSRNAGEMLDRLTLTYNRTRQASITTELIEIISGASALEAAK

SEQ ID NO: 36224 - protein, 274 aa, Arabidopsis thaliana
  peptide (1)..(274): Ceres Seq. ID no. 12738717
MKSVKNIQKITKAMKMVAASKLRAVQGRAENSRGLWQPFTALLGDNPSIDVKKSVVVTLSSDKGLCGGINSTVVKVSRALYKLNAGPEKEVQFVIVGEKAKAIMFRDSKNDIVLSVTELNKNPLNYAQVSVLADDILKNVEFDALRIVYNKFHSVVAFLPTVSTVLSPEIIEKESEIGGKLGELDSYEIEGGETKGEILQNLAEFQFSCVMFNAVLENACSEMGARMSAMDSSSRNAGEMLDRLTLTYNRTRQASITTELIEIISGASALEAAK

SEQ ID NO: 36225 - DNA, 1953 bp, Arabidopsis thaliana
  misc_feature (1)..(1953): Ceres Seq. ID no. 13580493
  misc_feature (1)..(1953): Ortholog of  Ceres SEQ ID NO 15176403 as cited in SEQ ID NO 52988
gttttttagcttacgtttttcttcttcttctccttatgagttcaatatctgcaaatccacaaatctggattcacacctgagacgtttgttaatcggtacatctctatatttttgcaatcggagatggagatcgaatccgtcgcagctggttcttgttccaaggagaatcaaatgatctacaaggaatggttcgaattctccgattcagacggcgatggccgtattactggtaacgatgcgatcaagttcttcactatgtcgaatttgcctcgtccggaattgaagcagatctgggctattgcagattcaaagagacaagggtatcttggtttcaaagagtttattgttgccatgcagcttgtttcgttggctcaaactggacatgaaatatcgcatgaagttcttattagcgatgttgatttcaaaaatatcaatcctcctaccatggaaggtctgggtgtattaatggcgaaaaagaagcattcatcaaagtcgagtgatcctaatatgaatggtagccctgccgcagacacctcacttacagctcactggttctcttcaaaatcttcaaaaaagatttctctgtcctccgtaacatctatagtggatggcctgaagaggttgtacattcagaagctgaagccacttgaagtagcatatcggtttaacgattttgtatcccctttgttgactaacagtgatttcgatgcaaaacctatggtaatgcttctgggtcaatactccacaggaaaaacaacattcattaagcatttgcttaaatctacttatccaggagctcatattggaccagagccgactactgacagatttgttgttgtcatgtctggacctgatgaaagaagcattccggggaacacagtagcagttcaagcagatatgccattcagtggtcttacaacttttgggactgcctttttgtcaaagtttgaatgctctcagatgcctcaccctctgctggagcatgtaacatttgtcgacacccctggagttttatcaggggaaaaacaaagaacacagcgagcatatgatttcactggtgttacatcatggtttgcctctaagtgtgatcttatcctcctcctatttgacccacacaagctggatgtaagtgatgagttcaagcgtgtaatttcatctttacgcggtcatgatgacaagatccgcgttgttctgaataaggctgaccaagtggacactcagcagctaatgagggtatatggagctctcatgtggtcacttgggaaagttctcaatactcctgaggtctctcgtgtctacattggttccttcagtgataaacccataaacgaagctgcaactggtccaattgggagagagttgtttgaaaaggagcaagatgaccttcttgctgatttgaaagacattcctaagaaagcttgtgatcgtcgaataaatgagtttgtgaaacgggcaagagcagcaaagatacatgcgtacatcatcagccatttgaagaaggagatgccagcgataatggggaaagccaaagctcaacagaaactgatagataacttggaagacgagtttggaaaggtacaaagagagcatcacttacctaaaggagatttcccaaatgtggatcatttcagggaggtgctaagtggttacaacatcgacaagtttgagaagctaaagccgaaaatgttgcagactgttgatgatatgttggggtatgacatcccagagctcttgaaaaatttcaaaaacccttatgattaatatttctatccctcttatcttctgcggttgctgtataatccaaaactatacattcacttttggcctagcccttgtgacttgtgagcgttaatgcatatttgtattcttacaagccttgtagacaatagagacaaacataaagagtgctgacttgataatttgcttatatcacaaaccaaaagtattattgtt

SEQ ID NO: 36226 - protein, 545 aa, Arabidopsis thaliana
  peptide (1)..(545): Ceres Seq. ID no. 13580494
MEIESVAAGSCSKENQMIYKEWFEFSDSDGDGRITGNDAIKFFTMSNLPRPELKQIWAIADSKRQGYLGFKEFIVAMQLVSLAQTGHEISHEVLISDVDFKNINPPTMEGLGVLMAKKKHSSKSSDPNMNGSPAADTSLTAHWFSSKSSKKISLSSVTSIVDGLKRLYIQKLKPLEVAYRFNDFVSPLLTNSDFDAKPMVMLLGQYSTGKTTFIKHLLKSTYPGAHIGPEPTTDRFVVVMSGPDERSIPGNTVAVQADMPFSGLTTFGTAFLSKFECSQMPHPLLEHVTFVDTPGVLSGEKQRTQRAYDFTGVTSWFASKCDLILLLFDPHKLDVSDEFKRVISSLRGHDDKIRVVLNKADQVDTQQLMRVYGALMWSLGKVLNTPEVSRVYIGSFSDKPINEAATGPIGRELFEKEQDDLLADLKDIPKKACDRRINEFVKRARAAKIHAYIISHLKKEMPAIMGKAKAQQKLIDNLEDEFGKVQREHHLPKGDFPNVDHFREVLSGYNIDKFEKLKPKMLQTVDDMLGYDIPELLKNFKNPYD

SEQ ID NO: 36227 - protein, 529 aa, Arabidopsis thaliana
  peptide (1)..(529): Ceres Seq. ID no. 13580495
MIYKEWFEFSDSDGDGRITGNDAIKFFTMSNLPRPELKQIWAIADSKRQGYLGFKEFIVAMQLVSLAQTGHEISHEVLISDVDFKNINPPTMEGLGVLMAKKKHSSKSSDPNMNGSPAADTSLTAHWFSSKSSKKISLSSVTSIVDGLKRLYIQKLKPLEVAYRFNDFVSPLLTNSDFDAKPMVMLLGQYSTGKTTFIKHLLKSTYPGAHIGPEPTTDRFVVVMSGPDERSIPGNTVAVQADMPFSGLTTFGTAFLSKFECSQMPHPLLEHVTFVDTPGVLSGEKQRTQRAYDFTGVTSWFASKCDLILLLFDPHKLDVSDEFKRVISSLRGHDDKIRVVLNKADQVDTQQLMRVYGALMWSLGKVLNTPEVSRVYIGSFSDKPINEAATGPIGRELFEKEQDDLLADLKDIPKKACDRRINEFVKRARAAKIHAYIISHLKKEMPAIMGKAKAQQKLIDNLEDEFGKVQREHHLPKGDFPNVDHFREVLSGYNIDKFEKLKPKMLQTVDDMLGYDIPELLKNFKNPYD

SEQ ID NO: 36228 - protein, 501 aa, Arabidopsis thaliana
  peptide (1)..(501): Ceres Seq. ID no. 13580496
MSNLPRPELKQIWAIADSKRQGYLGFKEFIVAMQLVSLAQTGHEISHEVLISDVDFKNINPPTMEGLGVLMAKKKHSSKSSDPNMNGSPAADTSLTAHWFSSKSSKKISLSSVTSIVDGLKRLYIQKLKPLEVAYRFNDFVSPLLTNSDFDAKPMVMLLGQYSTGKTTFIKHLLKSTYPGAHIGPEPTTDRFVVVMSGPDERSIPGNTVAVQADMPFSGLTTFGTAFLSKFECSQMPHPLLEHVTFVDTPGVLSGEKQRTQRAYDFTGVTSWFASKCDLILLLFDPHKLDVSDEFKRVISSLRGHDDKIRVVLNKADQVDTQQLMRVYGALMWSLGKVLNTPEVSRVYIGSFSDKPINEAATGPIGRELFEKEQDDLLADLKDIPKKACDRRINEFVKRARAAKIHAYIISHLKKEMPAIMGKAKAQQKLIDNLEDEFGKVQREHHLPKGDFPNVDHFREVLSGYNIDKFEKLKPKMLQTVDDMLGYDIPELLKNFKNPYD

SEQ ID NO: 36229 - DNA, 1477 bp, Arabidopsis thaliana
  misc_feature (1)..(1477): Ceres Seq. ID no. 12321987
  misc_feature (1)..(1477): Ortholog of  Ceres SEQ ID NO 14311721 as cited in SEQ ID NO 51363
tagtttcgtcctccgtcaatctctctcgccgctttatccttgttacaaatcccatcgatcttttcggaatcttccctcattatgctcagccaccattaccagagctccattgtttcagttctccgttcaacgattatcggaattattcacaacactattagtatcaccgtcgccaaccgattttgattaccagctttggtgacgacagtcgtgattaaggaggttttggtaaatttcttcgttcctgtttgttttcaaagatggctgctttgaaaggttatggcttgtgttctatggactctgctcttcaattcccctgtcctaagctattcaatggctataagagaaggagctcgaaatgggtctctcccaaagcagctgttgtacccaatttccatctcccaatgcgcagcttggaggttaaaaacaggacaaacacagacgacattaaagctctacgtgtgatcacagctatcaaaacaccgtatctacctgatggaagattcgaccttgaagcctacgatgacttagtcaacattcagatacaaaacggtgctgaaggtgtcattgttggtggtacaactgtgaaggacaactgatgagctgggacgaacacattatgcttataggccataccgttaactgttttggcggaagcatcaaagtcattggaaacactggaagcaattcgactagagaagcaatccacgcgactgaacaaggattcgcggttggaatgcatgctgctcttcatataaacccttactatggcaagacttctattgagggactgattgcacatttccagtctgttcttcatatgggaccgacgattatatacaatgtgcctggtcgaacagggcaagatataccgcctcgtgccatcttcaaactttctcagaatccgaatttagctggtgtgaaggaatgtgttgggaacaagcgagtcgaagagtacactgagaatggggttgttgtgtggagtgggaatgatgatgagtgtcatgattccagatgggattatggagcaacaggagttatatcagttactagtaatttagttccgggtttgatgaggaagttgatgtttgaaggtaggaattcatctttgaactcaaagcttctacctttgatggcttggctgttccacgagccaaacccgattggaatcaacactgctttggctcagcttggagtttcgaggccggtttttaggttaccatatgtaccattgccactgtctaagaggcttgagtttgtgaaactggtgaaggagattggacgagagcattttgtgggtgagaaagatgttcaggctcttgatgatgatgattttatccttatcggtcgatattagcatacttttttttttgaatttttggttcctttttgtttggtgttaatgaagaagagatggttctatcatttggttttatgtagctgatgaatgaatgaaaactcaaggaatgatttcatc

SEQ ID NO: 36230 - protein, 252 aa, Arabidopsis thaliana
  peptide (1)..(252): Ceres Seq. ID no. 12321988
MSWDEHIMLIGHTVNCFGGSIKVIGNTGSNSTREAIHATEQGFAVGMHAALHINPYYGKTSIEGLIAHFQSVLHMGPTIIYNVPGRTGQDIPPRAIFKLSQNPNLAGVKECVGNKRVEEYTENGVVVWSGNDDECHDSRWDYGATGVISVTSNLVPGLMRKLMFEGRNSSLNSKLLPLMAWLFHEPNPIGINTALAQLGVSRPVFRLPYVPLPLSKRLEFVKLVKEIGREHFVGEKDVQALDDDDFILIGRY

SEQ ID NO: 36231 - protein, 245 aa, Arabidopsis thaliana
  peptide (1)..(245): Ceres Seq. ID no. 12321989
MLIGHTVNCFGGSIKVIGNTGSNSTREAIHATEQGFAVGMHAALHINPYYGKTSIEGLIAHFQSVLHMGPTIIYNVPGRTGQDIPPRAIFKLSQNPNLAGVKECVGNKRVEEYTENGVVVWSGNDDECHDSRWDYGATGVISVTSNLVPGLMRKLMFEGRNSSLNSKLLPLMAWLFHEPNPIGINTALAQLGVSRPVFRLPYVPLPLSKRLEFVKLVKEIGREHFVGEKDVQALDDDDFILIGRY

SEQ ID NO: 36232 - protein, 206 aa, Arabidopsis thaliana
  peptide (1)..(206): Ceres Seq. ID no. 12321990
MHAALHINPYYGKTSIEGLIAHFQSVLHMGPTIIYNVPGRTGQDIPPRAIFKLSQNPNLAGVKECVGNKRVEEYTENGVVVWSGNDDECHDSRWDYGATGVISVTSNLVPGLMRKLMFEGRNSSLNSKLLPLMAWLFHEPNPIGINTALAQLGVSRPVFRLPYVPLPLSKRLEFVKLVKEIGREHFVGEKDVQALDDDDFILIGRY

SEQ ID NO: 36233 - DNA, 1290 bp, Arabidopsis thaliana
  misc_feature (1)..(1290): Ceres Seq. ID no. 13486716
  misc_feature (1)..(1290): Ortholog of  Ceres SEQ ID NO 13598528 as cited in SEQ ID NO 64938
aaaaactcagtgagtgagtcaccgaaaacctcttgtagtagattcgtgacgggtttgatcatctcttcgaggtcggttctagggtttcactacgagaatggacggagatgagctcaccgagcaggaaactgctctttatgaccgtcaaattagggtatggggagctggtgctcaaagaagattgagtaaatctcatgttttggtatctggaattaagggcactgttgctgagttttgtaagaacattgtgttggcaggagtaggtagtgtgactctgttggatgatcgattggttacaacggaagtcttcaacgcaaacttcttgattcttcctgatgaaaatgcttatgtaggcaaaaccgtagctgagatttgttgtgattcacttaaggattttaaccctatggttcatgtttcaatagagaaaggtgatttgtcaacacttggtgttgattttttcgagaagtttgatgttgtggttatcggctacagttctcgtgctactaagaaagcagttaatgaaaagtgtaggaacctagcaaaagatgtagcgttctatacagttgattgtagaggctcatgtggcgaaatatttgtcgaccttcagaattataagtacacaaagaaaaagcttgatgaaacagtggaatgtgaactaacatttccaagttttgaggaggcagtttcagtaccgtggaaaccgatgccaaggagaacagcaaagctctactttgcaatgagagtgatagaactatttgaggaaactgaaggacgtaaacctggggaatgttcgctgtctgatctcccaagagttttgaaactcaaaaaggaactatgtgaaggaaattcggtcagcgagaatcatattccagatatcctcttggagagactcgtatctaataacacagaattcccaccggcttgtgccatcattggagggattctaggacaggaggtgataaaagttatatcaggcaaaggagagccgttgaagaacttcttctactttgatgcagaggatgggaaaggtgtaatcgaggacctatcccacaagctttaacttccaaacatgaaaggtgctgtgaaacgctgctcttagtaattagttccttgttgaagattgtattggaaattagactttagagtacttagaacttggctccttgtcttttgtatctactaacttggttcgctcctaaagacaatctgtaacccactatttactttaatccatcaatttacacactcctatctaaaaaaaaaaaaaaaaaactccaccgggggcccggt

SEQ ID NO: 36234 - protein, 320 aa, Arabidopsis thaliana
  peptide (1)..(320): Ceres Seq. ID no. 13486717
MDGDELTEQETALYDRQIRVWGAGAQRRLSKSHVLVSGIKGTVAEFCKNIVLAGVGSVTLLDDRLVTTEVFNANFLILPDENAYVGKTVAEICCDSLKDFNPMVHVSIEKGDLSTLGVDFFEKFDVVVIGYSSRATKKAVNEKCRNLAKDVAFYTVDCRGSCGEIFVDLQNYKYTKKKLDETVECELTFPSFEEAVSVPWKPMPRRTAKLYFAMRVIELFEETEGRKPGECSLSDLPRVLKLKKELCEGNSVSENHIPDILLERLVSNNTEFPPACAIIGGILGQEVIKVISGKGEPLKNFFYFDAEDGKGVIEDLSHKL

SEQ ID NO: 36235 - protein, 218 aa, Arabidopsis thaliana
  peptide (1)..(218): Ceres Seq. ID no. 13486718
MVHVSIEKGDLSTLGVDFFEKFDVVVIGYSSRATKKAVNEKCRNLAKDVAFYTVDCRGSCGEIFVDLQNYKYTKKKLDETVECELTFPSFEEAVSVPWKPMPRRTAKLYFAMRVIELFEETEGRKPGECSLSDLPRVLKLKKELCEGNSVSENHIPDILLERLVSNNTEFPPACAIIGGILGQEVIKVISGKGEPLKNFFYFDAEDGKGVIEDLSHKL

SEQ ID NO: 36236 - DNA, 1166 bp, Arabidopsis thaliana
  misc_feature (1)..(1166): Ceres Seq. ID no. 12321452
  misc_feature (1)..(1166): Ortholog of  Ceres SEQ ID NO 14316261 as cited in SEQ ID NO 57854
aaagctgaactataaaaatggcgatttctacattactctcaatctcttctttcactctatcttcttcctcatcaacaaaaacccatctccttacttcaatacctgcttcaagggtttattcttatccaatttcacccaaatggaagcaaattcgtttcctgcagagtcaaagttccagtcttttctatccattacgccgcaatttcaccagattctgttcttctccagatgggtttctcagaaacaccaaagacgacgaagaaggaaacgaaatcattcagcttccgtctattggtgtaaaccctgtgaaattcgcgatttgcgttgtgttgtgggcttctttctctctgctttggtttgctaggtctggagatgccaaagctgcgactgattctatcaaatcttcgagctttggtctcagaatcgcctccactcttcgccgttttggttggccagacgaagctgttgtgtttgctttagctactcttccggttattgaactccgtggtgccattcctgttggttattggatgcaactaaaaccggtggttctcacttccttctctgttcttggcaatatggttccagttccattcatcgtactttacctcaaaacgtttgcatcttttgtggcgggtaagagccaaacagcttctaaattacttgatatcttgtttaaaagagctaaagagaaagctggacctgtggaagagttcaaatggttagggctaatgctctttgtagctgttccattccctggaaccggtgcttggacaggagctataatagcatcaatcctcgacatgccgttttggtctgctgtttcgtctaatttctgcggtgtagtgttggctggactgttggtgaacttgctggtaaatcttggtttgaaacaagccattgtagctggtattgctctcttctttgtatctacgtttatgtggagcgttctcagaaacattaggaagtctataaaaccatcgttgccttgaattcgttattagatacttagatgtagaagaaagagttcttcacactattggttctttttttcttcaactgttaataatgtttttaagggatttgtgttggtcttaatttcctcaattcactcttctcataaatcccttattgtgatatacaaataatgcaatttatcattactc

SEQ ID NO: 36237 - protein, 324 aa, Arabidopsis thaliana
  peptide (1)..(324): Ceres Seq. ID no. 12321453
MAISTLLSISSFTLSSSSSTKTHLLTSIPASRVYSYPISPKWKQIRFLQSQSSSLFYPLRRNFTRFCSSPDGFLRNTKDDEEGNEIIQLPSIGVNPVKFAICVVLWASFSLLWFARSGDAKAATDSIKSSSFGLRIASTLRRFGWPDEAVVFALATLPVIELRGAIPVGYWMQLKPVVLTSFSVLGNMVPVPFIVLYLKTFASFVAGKSQTASKLLDILFKRAKEKAGPVEEFKWLGLMLFVAVPFPGTGAWTGAIIASILDMPFWSAVSSNFCGVVLAGLLVNLLVNLGLKQAIVAGIALFFVSTFMWSVLRNIRKSIKPSLP

SEQ ID NO: 36238 - DNA, 1300 bp, Arabidopsis thaliana
  misc_feature (1)..(1300): Ceres Seq. ID no. 12357711
  misc_feature (1)..(1300): Ortholog of  Ceres SEQ ID NO 15169419 as cited in SEQ ID NO 58491
ataacctttgattaatcaaacctttctctatgtgtttttccctcaaaccacatcgttgacttggatctctcattcatcttgttctgtttttgtgacctaattttacagaaacaaaatgggtgtatctgaaatttcaagatcagaggagaagagcggtataggtttcgttaaattgtttgaaaataacgttgtgtttcctggatttttggtatggatgaatcaaacaattcaagagcctcttaaggctgagttcaaaagattaaggaatgtgaaagagctaagtttgaagtcagtgtcaaagatagagactgcttatgaggagcatagagatgaagagaagttagagaagcaattacaagcttggagagataatccctcatggatagatcagcctcctaaagtggtggtgaaatcacaaaatggtttgttttgccatttaaacattgaagcagacgtaggattgcctcctgaattagtatacaacattttcactcatccagacaacaaaagatacttcaaaaacatcaaggaaaacatatcaagaaaagttttgatcgacgaagggccaaagcagaccgtggaagtgaagcaagccgcggcctggaagttcctttggtgggatggaacttgtcctatacatctcattgtcgaagaaaaccggaaaaatctcacttcaaaatataagcaagagacaacaatgttcatgaaagtgtttgagggttgttggaaagtggagccattgtttatagacgaacatttgtgtgaccgctcaaagccaaaatctcaaaaagattaccatagctgtagcaacggacgaggaaggatcggatcaaaggtgacaatggatcaaatgtttcagccttcagctcttcttactcccccgccactttcttggtacatacgtgggatcaccattaaaaccacagagagtatgatcgaagatcttttcgctgaagctactagacttcggggaggaaaaggaggaggctatattgatgatcaaggagaaaacaatgtggtaaccgagaagagcaaagctgatgacattaaggaaagatggagatcacataggagaagtaaacggaggagatttacaactgctaggtcaatgtaattgaagagactgtgattctagaatttcttgattattctggagatttgtaatgttcaagctctttacaagtttcccaaaagggatcctctgtttttaccactaacagaaactacaccttccaatagaaaaaaaaatgcattaaatctctcatatagttccctccacgttttgattgaggcttgtcct

SEQ ID NO: 36239 - protein, 332 aa, Arabidopsis thaliana
  peptide (1)..(332): Ceres Seq. ID no. 12357712
MGVSEISRSEEKSGIGFVKLFENNVVFPGFLVWMNQTIQEPLKAEFKRLRNVKELSLKSVSKIETAYEEHRDEEKLEKQLQAWRDNPSWIDQPPKVVVKSQNGLFCHLNIEADVGLPPELVYNIFTHPDNKRYFKNIKENISRKVLIDEGPKQTVEVKQAAAWKFLWWDGTCPIHLIVEENRKNLTSKYKQETTMFMKVFEGCWKVEPLFIDEHLCDRSKPKSQKDYHSCSNGRGRIGSKVTMDQMFQPSALLTPPPLSWYIRGITIKTTESMIEDLFAEATRLRGGKGGGYIDDQGENNVVTEKSKADDIKERWRSHRRSKRRRFTTARSM

SEQ ID NO: 36240 - protein, 299 aa, Arabidopsis thaliana
  peptide (1)..(299): Ceres Seq. ID no. 12357713
MNQTIQEPLKAEFKRLRNVKELSLKSVSKIETAYEEHRDEEKLEKQLQAWRDNPSWIDQPPKVVVKSQNGLFCHLNIEADVGLPPELVYNIFTHPDNKRYFKNIKENISRKVLIDEGPKQTVEVKQAAAWKFLWWDGTCPIHLIVEENRKNLTSKYKQETTMFMKVFEGCWKVEPLFIDEHLCDRSKPKSQKDYHSCSNGRGRIGSKVTMDQMFQPSALLTPPPLSWYIRGITIKTTESMIEDLFAEATRLRGGKGGGYIDDQGENNVVTEKSKADDIKERWRSHRRSKRRRFTTARSM

SEQ ID NO: 36241 - DNA, 904 bp, Arabidopsis thaliana
  misc_feature (1)..(904): Ceres Seq. ID no. 12323852
  misc_feature (1)..(904): Ortholog of  Ceres SEQ ID NO 13599287 as cited in SEQ ID NO 338
  misc_feature (1)..(904): Ortholog of  Ceres SEQ ID NO 15172934 as cited in SEQ ID NO 51783
  misc_feature (1)..(904): Ortholog of  Ceres SEQ ID NO 14314817 as cited in SEQ ID NO 52571
  misc_feature (1)..(904): Ortholog of  Ceres SEQ ID NO 15174056 as cited in SEQ ID NO 0
agtgagaaaagaatcttcttttggcaaatgcttcgatcctcaattcgacttctctatataagaagaaccagtcctctgcttcgaagtttatcatcatcatcatcattatcatcaaaacgattcgattctgcgaaaccgattttcaattctcatcggactttttgtcttcctccaatctctacaacgggagctaaactttctagatcggagcattcaatggctgcttcttccgaacctaaatctctttacgatttcaccgtcaaggatgctaagggaaacgatgttgatctaagcatctacaaagggaaggttctcttgattgtgaacgttgcttctcaatgtggcttgactaattcgaattatactgagcttgcgcagctgtatgagaagtacaaaggccatggtttcgagattcttgcgtttccgtgtaaccagtttgggaatcaagagcctggtactaatgaagagattgttcagtttgcttgtactcgtttcaaggccgagtacccgattttcgacaaggttgatgttaacggtgacaaagctgccccagtctacaagtttctgaaatcaagcaaaggcgggctctttggagacggcattaagtggaacttcgcaaagttcttggttgacaaagatggaaatgttgtcgaccgtttcgcaccaactacctcccctctcagcattgagaaggatttgaagaagttgttgggagttactgcttaagcaaggcaagattgcataattagacaaataaaagctcattagtattgtattaccaatactgtgtagtaagctgagttcgtgagtgtgtgtgcctttgggaccgcgtacaattataatccgttttttagcggccaaactatgtaataatcgtaaatctaaatatcagatttccctttac

SEQ ID NO: 36242 - protein, 241 aa, Arabidopsis thaliana
  peptide (1)..(241): Ceres Seq. ID no. 12323853
SEKRIFFWQMLRSSIRLLYIRRTSPLLRSLSSSSSLSSKRFDSAKPIFNSHRTFCLPPISTTGAKLSRSEHSMAASSEPKSLYDFTVKDAKGNDVDLSIYKGKVLLIVNVASQCGLTNSNYTELAQLYEKYKGHGFEILAFPCNQFGNQEPGTNEEIVQFACTRFKAEYPIFDKVDVNGDKAAPVYKFLKSSKGGLFGDGIKWNFAKFLVDKDGNVVDRFAPTTSPLSIEKDLKKLLGVTA

SEQ ID NO: 36243 - protein, 232 aa, Arabidopsis thaliana
  peptide (1)..(232): Ceres Seq. ID no. 12323854
MLRSSIRLLYIRRTSPLLRSLSSSSSLSSKRFDSAKPIFNSHRTFCLPPISTTGAKLSRSEHSMAASSEPKSLYDFTVKDAKGNDVDLSIYKGKVLLIVNVASQCGLTNSNYTELAQLYEKYKGHGFEILAFPCNQFGNQEPGTNEEIVQFACTRFKAEYPIFDKVDVNGDKAAPVYKFLKSSKGGLFGDGIKWNFAKFLVDKDGNVVDRFAPTTSPLSIEKDLKKLLGVTA

SEQ ID NO: 36244 - protein, 169 aa, Arabidopsis thaliana
  peptide (1)..(169): Ceres Seq. ID no. 12323855
MAASSEPKSLYDFTVKDAKGNDVDLSIYKGKVLLIVNVASQCGLTNSNYTELAQLYEKYKGHGFEILAFPCNQFGNQEPGTNEEIVQFACTRFKAEYPIFDKVDVNGDKAAPVYKFLKSSKGGLFGDGIKWNFAKFLVDKDGNVVDRFAPTTSPLSIEKDLKKLLGVTA

SEQ ID NO: 36245 - DNA, 1167 bp, Arabidopsis thaliana
  misc_feature (1)..(1167): Ceres Seq. ID no. 12321925
  misc_feature (1)..(1167): Ortholog of  Ceres SEQ ID NO 13589868 as cited in SEQ ID NO 55521
  misc_feature (1)..(1167): Ortholog of  Ceres SEQ ID NO 12617659 as cited in SEQ ID NO 65286
  misc_feature (1)..(1167): Ortholog of  Ceres SEQ ID NO 12780566 as cited in SEQ ID NO 65822
aaaataatttgaaaggaatatgaatattccgttgaagaagacttgctcctgaaatcctttggaccgaaactcgtaaaattatttcccttcaatttctctgaaatctattcaccgtctcctttgtctcctcctccaaatcgatcgttcctcgtcgtcgtctgattttctctacgattgctttttctgtctagctcgataagataaaacaaaactaatttttgaagagtttttttttttgggtttgggagcgatgggtcaagcttttcgtaagctattcgatactttcttcggcaatcaagaaatgagggtcgttatgctggggctggatgctgctggaaaaacaactattctctacaagcttcatattggagaagttttgtctactgttcccaccattggattcaatgttgagaaagttcagtacaagaatgtgatgttcacagtttgggatgttggtggccaagagaaactgagacctctttggaggcattacttcaataaatttnaaaaacccccnttttttttggatggacttatatacgtggtggattccttagatcgagagaggatcgggaaagcaaagcaagaatttcaggagatcataaaagacccattcatgctaaacagtatcattctggtgtttgcaaacaaacaggacatgagaggagccatgtcaccgagagaagtatgtgaagggttaggcttatttgatctcaagaacaggaaatggcacatacaaggtacttgtgctcttcgtggagacgggctttatgaaggcttggactggttatcatctactcttaaggatgttaaagccgctggattcacatcggttggccactcgttttaaatcttccaggtatactttgatatcaatggccagtgtcttcttcttggctttatcacgaaatcagaatctctgaagactttttttgttaaggaaagaatgatcttctcattgtggcaatattagactccattagactatttttgaattttgatcatgctgccatgaaagcttctttgtatattctgctgatgaagagttgtatcatctgaaaaaccttctctttggggtcatctttgtccgattaagactttggtagatgtatatacattccttcgaaatcatgatatatttttttataacaattataagttttcccc

SEQ ID NO: 36246 - protein, 199 aa, Arabidopsis thaliana
  peptide (1)..(199): Ceres Seq. ID no. 12321926
  misc_feature (86)..(86): Xaa is any aa, unknown or other
  misc_feature (89)..(89): Xaa is any aa, unknown or other
MGQAFRKLFDTFFGNQEMRVVMLGLDAAGKTTILYKLHIGEVLSTVPTIGFNVEKVQYKNVMFTVWDVGGQEKLRPLWRHYFNKFXKPXFFLDGLIYVVDSLDRERIGKAKQEFQEIIKDPFMLNSIILVFANKQDMRGAMSPREVCEGLGLFDLKNRKWHIQGTCALRGDGLYEGLDWLSSTLKDVKAAGFTSVGHSF

SEQ ID NO: 36247 - protein, 182 aa, Arabidopsis thaliana
  peptide (1)..(182): Ceres Seq. ID no. 12321927
  misc_feature (69)..(69): Xaa is any aa, unknown or other
  misc_feature (72)..(72): Xaa is any aa, unknown or other
MRVVMLGLDAAGKTTILYKLHIGEVLSTVPTIGFNVEKVQYKNVMFTVWDVGGQEKLRPLWRHYFNKFXKPXFFLDGLIYVVDSLDRERIGKAKQEFQEIIKDPFMLNSIILVFANKQDMRGAMSPREVCEGLGLFDLKNRKWHIQGTCALRGDGLYEGLDWLSSTLKDVKAAGFTSVGHSF

SEQ ID NO: 36248 - protein, 178 aa, Arabidopsis thaliana
  peptide (1)..(178): Ceres Seq. ID no. 12321928
  misc_feature (65)..(65): Xaa is any aa, unknown or other
  misc_feature (68)..(68): Xaa is any aa, unknown or other
MLGLDAAGKTTILYKLHIGEVLSTVPTIGFNVEKVQYKNVMFTVWDVGGQEKLRPLWRHYFNKFXKPXFFLDGLIYVVDSLDRERIGKAKQEFQEIIKDPFMLNSIILVFANKQDMRGAMSPREVCEGLGLFDLKNRKWHIQGTCALRGDGLYEGLDWLSSTLKDVKAAGFTSVGHSF

SEQ ID NO: 36249 - DNA, 1243 bp, Arabidopsis thaliana; identical to SEQ ID NO: 22030
  misc_feature (1)..(1243): Ceres Seq. ID no. 12562371
  misc_feature (1)..(1243): Ortholog of  Ceres SEQ ID NO 13581848 as cited in SEQ ID NO 51340
  misc_feature (1)..(1243): Ortholog of  Ceres SEQ ID NO 13595392 as cited in SEQ ID NO 56164
  misc_feature (1)..(1243): Ortholog of  Ceres SEQ ID NO 14316412 as cited in SEQ ID NO 59209
  misc_feature (1)..(1243): Ortholog of  Ceres SEQ ID NO 12618341 as cited in SEQ ID NO 64256

SEQ ID NO: 36250 - protein, 244 aa, Arabidopsis thaliana; identical to SEQ ID NO: 20888
  peptide (1)..(244): Ceres Seq. ID no. 12562372

SEQ ID NO: 36251 - protein, 238 aa, Arabidopsis thaliana; identical to SEQ ID NO: 20889
  peptide (1)..(238): Ceres Seq. ID no. 12562373

SEQ ID NO: 36252 - protein, 233 aa, Arabidopsis thaliana; identical to SEQ ID NO: 22033
  peptide (1)..(233): Ceres Seq. ID no. 12562374

SEQ ID NO: 36253 - DNA, 849 bp, Arabidopsis thaliana
  misc_feature (1)..(849): Ceres Seq. ID no. 13491481
  misc_feature (1)..(849): Ortholog of  Ceres SEQ ID NO 13599328 as cited in SEQ ID NO 1002
  misc_feature (1)..(849): Ortholog of  Ceres SEQ ID NO 14302544 as cited in SEQ ID NO 56628
  misc_feature (1)..(849): Ortholog of  Ceres SEQ ID NO 14302529 as cited in SEQ ID NO 59789
  misc_feature (1)..(849): Ortholog of  Ceres SEQ ID NO 13584819 as cited in SEQ ID NO 64536
  misc_feature (1)..(849): Ortholog of  Ceres SEQ ID NO 13663748 as cited in SEQ ID NO 67516
  misc_feature (1)..(849): Ortholog of  Ceres SEQ ID NO 12635897 as cited in SEQ ID NO 0
accctaaaactcagcaacaatggccgttaccttttcagatctacacacagaggagggtgtcaaatccgtggaggagcacctcgccggaaaaacctacatctccggagatcaattgtctgtggatgatgtcaaggtttacgctgccgttccagtgaaacccagcgatgccttccccaatgctagcaagtggtacgagtccgtggcttcccaacttgctaaaagtttccctggccgttggagtacaattcggtggctctgctgctgctgctccagctgttgaagctgaggcacctgcagctgcagctgatgatgatgatgacatggatctctttggtgacgagaccgaagaagaaaagaaagctgcagaggagagggaggctgctaagaaggacaccaagaagcctaaagagagtggaaagtcttctgtgctcatggatgttaagccatgggatgatgaaaccgacatgaagaaactggaagaggctgttcgtggtgttgagatgcctggtcttttctggggagcctcaaaacttgtaccagttggttatgggatcaagaaactcacaattatgttcacgattgttgatgacctcgtgtccccggacaacctcattgaagacttcctcacctcagagcctaacaacgagtacatccagagttgtgacattgtcgctttcaacaagatttagagacttcaaatttctccttaccgaaacatatcagaatttcaagttttgttttcgtttgtgttgtttaccgaaatgtttctttcctagttgcaagaccgctttcatgttacaataacactaaattttcaatggttactattccgttgcatcattgttaagg

SEQ ID NO: 36254 - protein, 174 aa, Arabidopsis thaliana
  peptide (1)..(174): Ceres Seq. ID no. 13491482
MPSPMLASGTSPWLPNLLKVSLAVGVQFGGSAAAAPAVEAEAPAAAADDDDDMDLFGDETEEEKKAAEEREAAKKDTKKPKESGKSSVLMDVKPWDDETDMKKLEEAVRGVEMPGLFWGASKLVPVGYGIKKLTIMFTIVDDLVSPDNLIEDFLTSEPNNEYIQSCDIVAFNKI

SEQ ID NO: 36255 - protein, 170 aa, Arabidopsis thaliana
  peptide (1)..(170): Ceres Seq. ID no. 13491483
MLASGTSPWLPNLLKVSLAVGVQFGGSAAAAPAVEAEAPAAAADDDDDMDLFGDETEEEKKAAEEREAAKKDTKKPKESGKSSVLMDVKPWDDETDMKKLEEAVRGVEMPGLFWGASKLVPVGYGIKKLTIMFTIVDDLVSPDNLIEDFLTSEPNNEYIQSCDIVAFNKI

SEQ ID NO: 36256 - protein, 122 aa, Arabidopsis thaliana
  peptide (1)..(122): Ceres Seq. ID no. 13491484
MDLFGDETEEEKKAAEEREAAKKDTKKPKESGKSSVLMDVKPWDDETDMKKLEEAVRGVEMPGLFWGASKLVPVGYGIKKLTIMFTIVDDLVSPDNLIEDFLTSEPNNEYIQSCDIVAFNKI

SEQ ID NO: 36257 - DNA, 776 bp, Arabidopsis thaliana
  misc_feature (1)..(776): Ceres Seq. ID no. 12602631
  misc_feature (1)..(776): Ortholog of  Ceres SEQ ID NO 15225657 as cited in SEQ ID NO 329
aatcgaaaaattcgtataatttttcagtaaattatctaaccctctcgatcctctctcgcctgttgaaaaagcacgacgcaagagcaaaggatcaaaaagggaagacgaaagaagagatggatccagacgctgttgcaaaggctttcgttgagcactactactccaccttcgatgaatcgtccaggtttggtttctctataccaagaaggatccatgttgaccttcgaaggccagaagatccagggctctcagaacatcgtcgctaagctcaccggcctccctttccagcagtgtaagcacaacatcaccaccgtcgattgtcagccttctggtcccgccggtggtatgctcgtctttgtctccggcaatcttcagctcgctggtgaacaacacgctctcaagttcagccagatgttccatttgatatcgaatcagggaaactactacgtgttcaatgacatattcaggttgaactatgcctgaggaatttgatgccagaggtacatggaaccattattggaagctgaaaagagagtggtggaaagtttgggactattcaaaaactgtttgagttggttttagatttggaacattaagctttgtttcaggtggtttgctgtctgtttttattttaatcaatggagctatttgttactttgtttgagatgactccttttgttttcgggcactgaaccatgattcagtaagggtaaaacaaaagattttttgaaatacggttctcttttggaaccctttttcatgtggaaaagtttgag

SEQ ID NO: 36258 - protein, 103 aa, Arabidopsis thaliana
  peptide (1)..(103): Ceres Seq. ID no. 12602632
MNRPGLVSLYQEGSMLTFEGQKIQGSQNIVAKLTGLPFQQCKHNITTVDCQPSGPAGGMLVFVSGNLQLAGEQHALKFSQMFHLISNQGNYYVFNDIFRLNYA

SEQ ID NO: 36259 - protein, 89 aa, Arabidopsis thaliana
  peptide (1)..(89): Ceres Seq. ID no. 12602633
MLTFEGQKIQGSQNIVAKLTGLPFQQCKHNITTVDCQPSGPAGGMLVFVSGNLQLAGEQHALKFSQMFHLISNQGNYYVFNDIFRLNYA

SEQ ID NO: 36260 - protein, 87 aa, Arabidopsis thaliana
  peptide (1)..(87): Ceres Seq. ID no. 12602634
SKNSYNFSVNYLTLSILSRLLKKHDARAKDQKGKTKEEMDPDAVAKAFVEHYYSTFDESSRFGFSIPRRIHVDLRRPEDPGLSEHRR

SEQ ID NO: 36261 - DNA, 754 bp, Arabidopsis thaliana
  misc_feature (1)..(754): Ceres Seq. ID no. 13499502
  misc_feature (1)..(754): Ortholog of  Ceres SEQ ID NO 12610267 as cited in SEQ ID NO 51993
  misc_feature (1)..(754): Ortholog of  Ceres SEQ ID NO 13495070 as cited in SEQ ID NO 53216
  misc_feature (1)..(754): Ortholog of  Ceres SEQ ID NO 13661333 as cited in SEQ ID NO 61620
  misc_feature (1)..(754): Ortholog of  Ceres SEQ ID NO 13596812 as cited in SEQ ID NO 62283
  misc_feature (1)..(754): Ortholog of  Ceres SEQ ID NO 13623021 as cited in SEQ ID NO 0
gaaaaaagctctccacgcctaaaaaaaaagaaaaaagagacagaagaagaaaaagataaagaagaatcaaactttgtaaccctttagcagcaatggcgatggctttcaagatggcgacgacggggatgcgtgtgacggatgagtgtacgagttcattcatggacatgaaatggaagaaagttcatagatacatcgttttcaagatcgaagagaagtcacgtaaagtcaccgtcgataaagtcggcggcgccggtgaaagctaccacgatctcgaagattctttaccggtggatgattgtcgctacgctgtctttgatttcgactttgtcaccgtcgataactgccgcaagagcaagatcttcttcattgcatggtcaccggaggcatcaaagataagggcaaagatattgtacgcaacgtcgaaagatgggctgaggagagtgttggaagggattcactatgaacttcaagctactgatccgacggagatgggtttcgatattatccaagaccgtgccaaatagattgatcacttaagagaatatgatttgactcactttgtcaataattaacattaattaggtcatcggttaatgtttaattattgctggttagtgcttactcttttttgagtttattatccttgatcagtcttaccggcactatcctttaattatgacgtttgtgttttgattgtgttgttaaaatatttttttgtcggttaagcaaacataaaaagctacgaatttgtcct

SEQ ID NO: 36262 - protein, 143 aa, Arabidopsis thaliana
  peptide (1)..(143): Ceres Seq. ID no. 13499503
MAMAFKMATTGMRVTDECTSSFMDMKWKKVHRYIVFKIEEKSRKVTVDKVGGAGESYHDLEDSLPVDDCRYAVFDFDFVTVDNCRKSKIFFIAWSPEASKIRAKILYATSKDGLRRVLEGIHYELQATDPTEMGFDIIQDRAK

SEQ ID NO: 36263 - protein, 141 aa, Arabidopsis thaliana
  peptide (1)..(141): Ceres Seq. ID no. 13499504
MAFKMATTGMRVTDECTSSFMDMKWKKVHRYIVFKIEEKSRKVTVDKVGGAGESYHDLEDSLPVDDCRYAVFDFDFVTVDNCRKSKIFFIAWSPEASKIRAKILYATSKDGLRRVLEGIHYELQATDPTEMGFDIIQDRAK

SEQ ID NO: 36264 - protein, 137 aa, Arabidopsis thaliana
  peptide (1)..(137): Ceres Seq. ID no. 13499505
MATTGMRVTDECTSSFMDMKWKKVHRYIVFKIEEKSRKVTVDKVGGAGESYHDLEDSLPVDDCRYAVFDFDFVTVDNCRKSKIFFIAWSPEASKIRAKILYATSKDGLRRVLEGIHYELQATDPTEMGFDIIQDRAK

SEQ ID NO: 36265 - DNA, 895 bp, Arabidopsis thaliana
  misc_feature (1)..(895): Ceres Seq. ID no. 12334166
  misc_feature (1)..(895): Ortholog of  Ceres SEQ ID NO 12624019 as cited in SEQ ID NO 61713
atctccacaatccccaaaattctttcaacacttgctctccattaatcttttagataataaacctaattgtttctgttttgtttttgtttctgtgagattcttccgaggcttgaagctcaatagctatggcttctctttcagtctcttcctcttcaaccatcatcgattcaagagctcctccttctcgactagcctccgcctccgcctcttctccgtcgtgcatttcacttcccacacttccgattcagtctcatacccgtgccgctaaagccactgcttactgtcggaagattgtgaggaacgttgtgacgagagctactactgaagttggtgaagctcctgccactactaccgaagctgagactactgagttacctgaaatcgtcaagactgctcaagaagcttgggagaaagtggatgacaagtacgctattggttctcttgcctttgctagtgtagtggctctttggggttctgctggaatgatttcgccaatcgataggcttccattggttcctggtgttcttgaacttgtaggcatcggttacacaggatggttcacttacaagaacctggtcttcaaaccagacagggaggctttgtttgagaaggtcaagagcacatacaaagacatattagggagcagctgaatcaaaggaggaagaagaagaagaagagcctttttgaggccattcatgaattggaatgaaggatatcaaaagaatctaacacaaaggccacgtccttccttcaatctttccttcttgtaactaaataattttcatcctttctctctctctgtctctggtcttttttagctcaaagtatcatccatttatgtcaaagtgttgtaaattcctcaagactatatatgagatgttttgtttcattttcc

SEQ ID NO: 36266 - protein, 174 aa, Arabidopsis thaliana
  peptide (1)..(174): Ceres Seq. ID no. 12334167
MASLSVSSSSTIIDSRAPPSRLASASASSPSCISLPTLPIQSHTRAAKATAYCRKIVRNVVTRATTEVGEAPATTTEAETTELPEIVKTAQEAWEKVDDKYAIGSLAFASVVALWGSAGMISPIDRLPLVPGVLELVGIGYTGWFTYKNLVFKPDREALFEKVKSTYKDILGSS

SEQ ID NO: 36267 - protein, 88 aa, Arabidopsis thaliana
  peptide (1)..(88): Ceres Seq. ID no. 12334168
SPQSPKFFQHLLSINLLDNKPNCFCFVFVSVRFFRGLKLNSYGFSFSLFLFNHHRFKSSSFSTSLRLRLFSVVHFTSHTSDSVSYPCR

SEQ ID NO: 36268 - DNA, 876 bp, Arabidopsis thaliana
  misc_feature (1)..(876): Ceres Seq. ID no. 12332877
  misc_feature (1)..(876): Ortholog of  Ceres SEQ ID NO 14316436 as cited in SEQ ID NO 59213
atcttagtaaaatagtggagagaagaatattcttctggataccttttaatattccccaaaacttctgaatcttcttctcaatttttctcgacattttctcatcgaaagctctcttcctttccctttttggcgctcaatacaatcatgacgttagagagttacgccggcgatgttcacacggtaccacaatcggagaactcgatggaggagagaggcggcggtgagcttttcgtgccacctcttaacttcgctatggtcgataatggaattttccgttctggttttcctgaacccgtcagtttcagctttctccagtctttgcgtctcaaatccatcatatatttgtgtcctgaggcatatccagaggtgaatagagagtttgcaaaatcaaatgggatccaagtttttcaatttggaattgaaagatgcaaggaaccatttgttaatatccctgacgaggtaatccgagaagccttacaagtacttctagatacagagaatcatcctgtcttgattcattgcaaaagtggaaagcatcggacgggatgtcttgtaggttgtgtgaggaagattcaaagatggtgtttgtcttctatcttcgacgagtaccaaagattcgcagctgcgaaagctagaatctcagaccagagattcatggagctctttgacatctccaatctaaagcatacaccactttccttctcatgctccaagaggtatactaatactattgattactgaagaaaaaaatgtataactttgtgttgaatgcaacttgtagttttgaagctagatgaaaatgggagattttgatctttcaataaaagtccgtttattccaaatcaaataaataaaaattggatcggatggttgtag

SEQ ID NO: 36269 - protein, 198 aa, Arabidopsis thaliana
  peptide (1)..(198): Ceres Seq. ID no. 12332878
MTLESYAGDVHTVPQSENSMEERGGGELFVPPLNFAMVDNGIFRSGFPEPVSFSFLQSLRLKSIIYLCPEAYPEVNREFAKSNGIQVFQFGIERCKEPFVNIPDEVIREALQVLLDTENHPVLIHCKSGKHRTGCLVGCVRKIQRWCLSSIFDEYQRFAAAKARISDQRFMELFDISNLKHTPLSFSCSKRYTNTIDY

SEQ ID NO: 36270 - protein, 179 aa, Arabidopsis thaliana
  peptide (1)..(179): Ceres Seq. ID no. 12332879
MEERGGGELFVPPLNFAMVDNGIFRSGFPEPVSFSFLQSLRLKSIIYLCPEAYPEVNREFAKSNGIQVFQFGIERCKEPFVNIPDEVIREALQVLLDTENHPVLIHCKSGKHRTGCLVGCVRKIQRWCLSSIFDEYQRFAAAKARISDQRFMELFDISNLKHTPLSFSCSKRYTNTIDY

SEQ ID NO: 36271 - protein, 162 aa, Arabidopsis thaliana
  peptide (1)..(162): Ceres Seq. ID no. 12332880
MVDNGIFRSGFPEPVSFSFLQSLRLKSIIYLCPEAYPEVNREFAKSNGIQVFQFGIERCKEPFVNIPDEVIREALQVLLDTENHPVLIHCKSGKHRTGCLVGCVRKIQRWCLSSIFDEYQRFAAAKARISDQRFMELFDISNLKHTPLSFSCSKRYTNTIDY

SEQ ID NO: 36272 - DNA, 1420 bp, Arabidopsis thaliana
  misc_feature (1)..(1420): Ceres Seq. ID no. 12580277
  misc_feature (1)..(1420): Ortholog of  Ceres SEQ ID NO 13592768 as cited in SEQ ID NO 20317
  misc_feature (1)..(1420): Ortholog of  Ceres SEQ ID NO 14303656 as cited in SEQ ID NO 61363
acccgcttagatcgatgtgtgtgctctgtgattgactgattttctcagagggataatcagtgacacatcgagtcgaagaagaacatacatttctactgaatcagatctgatctgctttgtcagtttttaaactgttctgatctaattgagatttctcaattccactcaaaatcctttaaagcttgtctctttttggtatctctgaatcaatttggggaaatcaagaggagaagtgacaatggatgcgtttagaagacaagcgagtaagcttagagaccaagtcgcaaagcagcaactggctgtgataaagcaattcagtgggactggttatgaaagctcagatgtaatggtgattgatgagcttgaaatgcaaaggcatcatcaactcgataaactttaccgctctactcgttctgcaaaggagttccagagagatattgttaaagcagctgaggcatttaccacgatcgggctcagacacattgaagcaggaaccaagttgtctgaagactgttgtaggtatgggaacgaaaatagtcagaacattgatgagaatatactggccaaggctgcagctatatacggtgatgcacggaaacatgtagacaaagaacaagaagacttcaacaagcttttggcttctcaggttttggatcctctaagagctatggttgccggttctcctcttgaagatgctcgtcatcttgctcaacgttacagccgcatgagacaagaagcagagacacatgcaacggaagtctctagacggcaagcacgtgtaagagaagctccgattccagaaaacgtagcaaagcttcaactagcggaagcaaaaatgcaagagctaaaagcaaatatggcagtccttggtaaagaagcaactgctgcattagccgctgttgaatcacagcaacatagactcactttccagaggcttgtggctatggttgaaggggagaagaattatcacttaagaatagcagccatcctcagtgacattgaagccgacatggtaaccgagaaacaacacaaagaatctgctcctcctgcgattccaacagagaacggctcagagaaaacgtcatactttcttgctgaagtgattcatccattttccgctgcttcagagaaagagttagacttggacaaaggagattacatcgttgtccgaaaggtgagccaaaccggttgggctgaaggagaatgcaaaggcaaagctggttggtttcctatggcttacattgagaagcgacagagacttcccactaccaactttgctgctgaagtttactgagtctcttcttcaaagatttcattttttcttacatttgtgtctgaaaactttgtttcagttatgtcctgtccccaacaaactactactcttgttcatatttgttgatccaaaatagagtttacctcc

SEQ ID NO: 36273 - protein, 351 aa, Arabidopsis thaliana
  peptide (1)..(351): Ceres Seq. ID no. 12580278
MDAFRRQASKLRDQVAKQQLAVIKQFSGTGYESSDVMVIDELEMQRHHQLDKLYRSTRSAKEFQRDIVKAAEAFTTIGLRHIEAGTKLSEDCCRYGNENSQNIDENILAKAAAIYGDARKHVDKEQEDFNKLLASQVLDPLRAMVAGSPLEDARHLAQRYSRMRQEAETHATEVSRRQARVREAPIPENVAKLQLAEAKMQELKANMAVLGKEATAALAAVESQQHRLTFQRLVAMVEGEKNYHLRIAAILSDIEADMVTEKQHKESAPPAIPTENGSEKTSYFLAEVIHPFSAASEKELDLDKGDYIVVRKVSQTGWAEGECKGKAGWFPMAYIEKRQRLPTTNFAAEVY

SEQ ID NO: 36274 - protein, 315 aa, Arabidopsis thaliana
  peptide (1)..(315): Ceres Seq. ID no. 12580279
MVIDELEMQRHHQLDKLYRSTRSAKEFQRDIVKAAEAFTTIGLRHIEAGTKLSEDCCRYGNENSQNIDENILAKAAAIYGDARKHVDKEQEDFNKLLASQVLDPLRAMVAGSPLEDARHLAQRYSRMRQEAETHATEVSRRQARVREAPIPENVAKLQLAEAKMQELKANMAVLGKEATAALAAVESQQHRLTFQRLVAMVEGEKNYHLRIAAILSDIEADMVTEKQHKESAPPAIPTENGSEKTSYFLAEVIHPFSAASEKELDLDKGDYIVVRKVSQTGWAEGECKGKAGWFPMAYIEKRQRLPTTNFAAEVY

SEQ ID NO: 36275 - protein, 308 aa, Arabidopsis thaliana
  peptide (1)..(308): Ceres Seq. ID no. 12580280
MQRHHQLDKLYRSTRSAKEFQRDIVKAAEAFTTIGLRHIEAGTKLSEDCCRYGNENSQNIDENILAKAAAIYGDARKHVDKEQEDFNKLLASQVLDPLRAMVAGSPLEDARHLAQRYSRMRQEAETHATEVSRRQARVREAPIPENVAKLQLAEAKMQELKANMAVLGKEATAALAAVESQQHRLTFQRLVAMVEGEKNYHLRIAAILSDIEADMVTEKQHKESAPPAIPTENGSEKTSYFLAEVIHPFSAASEKELDLDKGDYIVVRKVSQTGWAEGECKGKAGWFPMAYIEKRQRLPTTNFAAEVY

SEQ ID NO: 36276 - DNA, 1129 bp, Arabidopsis thaliana
  misc_feature (1)..(1129): Ceres Seq. ID no. 12337799
  misc_feature (1)..(1129): Ortholog of  Ceres SEQ ID NO 15179499 as cited in SEQ ID NO 0
aaaagttgcttgctttcttcttcttctccgattcgagcttccttcctctcagcaaaaccttcaagtaaagagtggtgaatcggaaaatgtcgcagtcttccgtcgatataccgccaaaaggtgggtttagcttcgatctgtgcaaaaggaatgatatgctgacacagaagggtcttaaagcgccgtcgtttctcaagactggaacgactatcgttggattgatatttaaggatggtgtaatacttggggctgatacacgggcaactgaagggcctattgtggctgataagaactgtgagaagattcactacatggcaccaaacatttactgttgtggtgcaggaaccgctgctgacactgaagcagtaactgatatggtcagctcacagctgcggttgcatagataccagactggccgagattctcgagtcgttactgcattgacccttctcaaaaaacatcttttcagctaccaaggccatgtctcagctgctcttgtgcttggtggagttgatattaccgggcctcatcttcacacgatatacccacacggttctactgacactctaccatttgctacaatgggttctggttcccttgctgtcatgtcagtgtttgaagcaaagtataaagaaggtctaactagagatgaaggaatcaagttggttgctgaagccatatgctctggtatattcaacgaccttggtagtggtagcaatgtggatatctgtgtgatcactaaggggcacaaggaatacttgaggaattacatggaaccaaacccaagaacctatgttagcagcaaaggctattcattcaccaagaaaaccgaggttctactcaccaaaattacaccattattggagcgagtcgaaattgtagaagtggctggtgaagctatggaggaatgaatctcgtgtgagagacagatactaagagtgaaaccattgttctacctcacatgacagtcatgtttacattttctactttgttcaatatgaacgactaaaatcgaatcgtagttgcctccatttcgtctttaaatttggcttgaacttgtgattaatgattatggatgattcggttttgaaatttagctctcacataattttcaaaagagctctttctt

SEQ ID NO: 36277 - protein, 274 aa, Arabidopsis thaliana
  peptide (1)..(274): Ceres Seq. ID no. 12337800
MSQSSVDIPPKGGFSFDLCKRNDMLTQKGLKAPSFLKTGTTIVGLIFKDGVILGADTRATEGPIVADKNCEKIHYMAPNIYCCGAGTAADTEAVTDMVSSQLRLHRYQTGRDSRVVTALTLLKKHLFSYQGHVSAALVLGGVDITGPHLHTIYPHGSTDTLPFATMGSGSLAVMSVFEAKYKEGLTRDEGIKLVAEAICSGIFNDLGSGSNVDICVITKGHKEYLRNYMEPNPRTYVSSKGYSFTKKTEVLLTKITPLLERVEIVEVAGEAMEE

SEQ ID NO: 36278 - protein, 251 aa, Arabidopsis thaliana
  peptide (1)..(251): Ceres Seq. ID no. 12337801
MLTQKGLKAPSFLKTGTTIVGLIFKDGVILGADTRATEGPIVADKNCEKIHYMAPNIYCCGAGTAADTEAVTDMVSSQLRLHRYQTGRDSRVVTALTLLKKHLFSYQGHVSAALVLGGVDITGPHLHTIYPHGSTDTLPFATMGSGSLAVMSVFEAKYKEGLTRDEGIKLVAEAICSGIFNDLGSGSNVDICVITKGHKEYLRNYMEPNPRTYVSSKGYSFTKKTEVLLTKITPLLERVEIVEVAGEAMEE

SEQ ID NO: 36279 - protein, 199 aa, Arabidopsis thaliana
  peptide (1)..(199): Ceres Seq. ID no. 12337802
MAPNIYCCGAGTAADTEAVTDMVSSQLRLHRYQTGRDSRVVTALTLLKKHLFSYQGHVSAALVLGGVDITGPHLHTIYPHGSTDTLPFATMGSGSLAVMSVFEAKYKEGLTRDEGIKLVAEAICSGIFNDLGSGSNVDICVITKGHKEYLRNYMEPNPRTYVSSKGYSFTKKTEVLLTKITPLLERVEIVEVAGEAMEE

SEQ ID NO: 36280 - DNA, 847 bp, Arabidopsis thaliana
  misc_feature (1)..(847): Ceres Seq. ID no. 12672940
  misc_feature (1)..(847): Ortholog of  Ceres SEQ ID NO 14304536 as cited in SEQ ID NO 53436
  misc_feature (1)..(847): Ortholog of  Ceres SEQ ID NO 14315438 as cited in SEQ ID NO 57205
aatttattctcaaaccttatgagtgagatctctcttaatcattctctctttcttctctcctctgtgatgtgaggtttcgaagatccttctctgattcctcatcaaactcagatcagtagcggacccaaataggatcaaagcaaacgaggtttcaatttagagttttttaaagctcaaatctcggttgcttcggttgaacttcttgatacactgtctcgttttgagttcttgttaggtcattcctttagagagatatatggcagaggtgaaggatcaattagagattaagttccggcttaacgatggttctgatatcggtcctaaattgtttcctgatgctactaccgttgctacattgaaagaaaccgttgttgctcagtggccaagagataaggagaacgggccaaagacagtgaaagatgttaaactgataagcgcgggtagaatattggagaacaacaaaacggttggagattgcaggagtcccgtcggcaatttctcaggtgctgtcaccacaatgcatgttataattcaacatcaagttactgaaaaagaaaagaagaagaagaagcctaaaggtgatctgaaacagaacaaatgtgtctgtttatgttttggagctcgttgttaacaattgtgcaagacaagtagagagagttaaaaaagcttgggagattcacattctgttcttgagccttcttcaataccttttgctcttgttccttgtaattcttttttctgacatgacatgacatgattggctttttgatcgcttgaggtttggtttctattgtatttcggattcgcaacaccgtggaaattattaggtaacaaacaaatttgcacg

SEQ ID NO: 36281 - protein, 124 aa, Arabidopsis thaliana
  peptide (1)..(124): Ceres Seq. ID no. 12672941
MAEVKDQLEIKFRLNDGSDIGPKLFPDATTVATLKETVVAQWPRDKENGPKTVKDVKLISAGRILENNKTVGDCRSPVGNFSGAVTTMHVIIQHQVTEKEKKKKKPKGDLKQNKCVCLCFGARC

SEQ ID NO: 36282 - DNA, 895 bp, Arabidopsis thaliana
  misc_feature (1)..(895): Ceres Seq. ID no. 12325422
  misc_feature (1)..(895): Ortholog of  Ceres SEQ ID NO 13598140 as cited in SEQ ID NO 61443
gactctctttctcatttccacctgaggaaaaaagctttttcgaatctcgcttgctttttgtcgccatgagtctctttgggttaggaagaaatcagaagactttccgacctaagaagagtgcaccttctggaagcaagggtgcacagcttcgaaagcatatagatgccaccctaggaagtgggaacttgagagaagctgtaagacttcctccgggagaggatgcaaatgaatggcttgctgtaaacactgtggatttctttaatcaggtgaatttgctatatggcacccttaccgagttctgcacacctgataactgtcctacaatgactgctggcccaaagtacgagtatagatgggcagatggtgtacagatcaagaagcccatcgaggtttctgctccaaagtatgtcgagtacttgatggattggatcgagacccaactcgatgatgagactttatttcctcaaaggcttggagcaccatttcctcagaacttcaaagatgtggtgaaaacgatctttaaacggctattccgagtttatgctcacatataccactctcatttccagaaaatcgttagcctaaaagaagaagctcatctcaacacttgcttcaaacacttcatcctctttactcatgaatttggactgatagacaagaaagaactcgcgcctctacaagagctcatagaatctatcatttcaccttattgagcaaaagaccatttctgttttttttttttttcagattaaaaaccccaataaattaacggtaagaagttttatttttaattataaatctctcttgtttgttttcaagtttttttctttcttaaacctctgtaaaatttaaacatttactatgtaaaaaagaaatcgatcttgactagttcttt

SEQ ID NO: 36283 - protein, 236 aa, Arabidopsis thaliana
  peptide (1)..(236): Ceres Seq. ID no. 12325423
LSFSFPPEEKSFFESRLLFVAMSLFGLGRNQKTFRPKKSAPSGSKGAQLRKHIDATLGSGNLREAVRLPPGEDANEWLAVNTVDFFNQVNLLYGTLTEFCTPDNCPTMTAGPKYEYRWADGVQIKKPIEVSAPKYVEYLMDWIETQLDDETLFPQRLGAPFPQNFKDVVKTIFKRLFRVYAHIYHSHFQKIVSLKEEAHLNTCFKHFILFTHEFGLIDKKELAPLQELIESIISPY

SEQ ID NO: 36284 - protein, 215 aa, Arabidopsis thaliana
  peptide (1)..(215): Ceres Seq. ID no. 12325424
MSLFGLGRNQKTFRPKKSAPSGSKGAQLRKHIDATLGSGNLREAVRLPPGEDANEWLAVNTVDFFNQVNLLYGTLTEFCTPDNCPTMTAGPKYEYRWADGVQIKKPIEVSAPKYVEYLMDWIETQLDDETLFPQRLGAPFPQNFKDVVKTIFKRLFRVYAHIYHSHFQKIVSLKEEAHLNTCFKHFILFTHEFGLIDKKELAPLQELIESIISPY

SEQ ID NO: 36285 - protein, 129 aa, Arabidopsis thaliana
  peptide (1)..(129): Ceres Seq. ID no. 12325425
MTAGPKYEYRWADGVQIKKPIEVSAPKYVEYLMDWIETQLDDETLFPQRLGAPFPQNFKDVVKTIFKRLFRVYAHIYHSHFQKIVSLKEEAHLNTCFKHFILFTHEFGLIDKKELAPLQELIESIISPY

SEQ ID NO: 36286 - DNA, 722 bp, Arabidopsis thaliana
  misc_feature (1)..(722): Ceres Seq. ID no. 12332383
  misc_feature (1)..(722): Ortholog of  Ceres SEQ ID NO 13585373 as cited in SEQ ID NO 63789
aacgtcatcattctgacttttctcaaagaagagaaatcaaatcaccaagtcatcggagcgatcacagagaagaagaaaaccatggcggaagaagagaaaagcgtgatgaagcaagtgatggtggcgattgatgaaagcgaatgtagtaaacgcgctcttcaatggacgctcgtgtatctcaaagatagcctcgccgattccgacatcatcctcttcactgctcaacctcatcttgatctcagctgcgtctatgcttcctcttatggcgccgctccgattgagcttataaactcattgcaagagagtcataagaacgctggattgaatcgtcttgatgaaggaaccaaaatttgtgctgagactggggttactccaagaaaggtgttggaatttggaaatcctaaagaagcgatatgtgaagctgctgagaagcttggtgttgatatgcttgtggttggaagccatggtaaaggagcattacaaaggactttccttggaagtgttagcaattactgtgttaacaatgctaagtgcccagttcttgtggtgagaacaaaagcttgaagacctcttctcatgaaagagttcgacaaccctggcttgatgtgtgtgtgttgtaaacatattgataataatgctctgcttggttactattgtttgaagaaactttgtgagtaaacataatttattttgtttgataatgaaagagcattgccgtgttc

SEQ ID NO: 36287 - protein, 187 aa, Arabidopsis thaliana
  peptide (1)..(187): Ceres Seq. ID no. 12332384
NVIILTFLKEEKSNHQVIGAITEKKKTMAEEEKSVMKQVMVAIDESECSKRALQWTLVYLKDSLADSDIILFTAQPHLDLSCVYASSYGAAPIELINSLQESHKNAGLNRLDEGTKICAETGVTPRKVLEFGNPKEAICEAAEKLGVDMLVVGSHGKGALQRTFLGSVSNYCVNNAKCPVLVVRTKA

SEQ ID NO: 36288 - protein, 160 aa, Arabidopsis thaliana
  peptide (1)..(160): Ceres Seq. ID no. 12332385
MAEEEKSVMKQVMVAIDESECSKRALQWTLVYLKDSLADSDIILFTAQPHLDLSCVYASSYGAAPIELINSLQESHKNAGLNRLDEGTKICAETGVTPRKVLEFGNPKEAICEAAEKLGVDMLVVGSHGKGALQRTFLGSVSNYCVNNAKCPVLVVRTKA

SEQ ID NO: 36289 - protein, 152 aa, Arabidopsis thaliana
  peptide (1)..(152): Ceres Seq. ID no. 12332386
MKQVMVAIDESECSKRALQWTLVYLKDSLADSDIILFTAQPHLDLSCVYASSYGAAPIELINSLQESHKNAGLNRLDEGTKICAETGVTPRKVLEFGNPKEAICEAAEKLGVDMLVVGSHGKGALQRTFLGSVSNYCVNNAKCPVLVVRTKA

SEQ ID NO: 36290 - DNA, 1331 bp, Arabidopsis thaliana
  misc_feature (1)..(1331): Ceres Seq. ID no. 12330652
  misc_feature (1)..(1331): Ortholog of  Ceres SEQ ID NO 13584001 as cited in SEQ ID NO 63430
  misc_feature (1)..(1331): Ortholog of  Ceres SEQ ID NO 15180075 as cited in SEQ ID NO 0
agcaccgtctccaatggcgggtttcagttctctaattcctagaacgcttctgaaacgcgccgttagtagcgcaacaagaaatctaacggcgccgttagcttctatttcagcagcaagaaatctcttcattggaggaggatgtgacgaaaattatggtgagccaggagtgttttctcattccaatggaataagaaagtacaccaccaccattggtaatactggctcactaactggtccttttcatcatcttctgggggtcaaccagacaaacaagcccgcctttttaagggtccaatctatgagctatcagtttgtcgctgattctcattcatctcctaaacgtattgtgaagaatgaggatgaggaagatttttctgattcatcaaagaagggaaacgctgaaaaccctaggaaacatcaaattggggagaacatacccaagaaggataaaataaagtttcttgtgaacactcttcttgatattgaagataataaagaggctgtttatggagctctggatgcttgggttgcttgggagcgcaatttccccattgcttccctcaaaatagtaatagctagtcttgaaaaggaacatcaatggcatcgaatggtccaggtgataaagtggatcctaagtaagggacaagggaacacgatggggacgtacggacagttgatacgggcgttagatatggatcgtagagcagaagaggctcatattatctggcgaaagaaagttgggaacgatctgcattctgtgccttggcaattatgcttacaaatgatgcgcatatatttccggaacaacatgttacaggaacttgttaagctattcaaggatctggagagttatgaccgtaagcctccggacaagcacattgtgcagaccgtggctgatgcttatgagcttttgggaatgcttgatgagaaagaacgggtagtgacgaagtatagccatcttttacttggtacaccatcggatgataaaccaagtagatcttcgaggaagaagaagaaaccagaactgaggattcctgaagcaaccacagtagatgcagcaaaagctgaattgcaagaagagctaaaagaaaatctggataatcaccaagaatcaaaagctgccactgagaaacaattcaaacatggagcgtaagttgtagtatttaatcgataaaagtgtcactgcacgagaaacatggactgtaaggatgtatttaattgagggattgttgacaatgctcacatcccttgggatttgtcgcaatggatggatatagagtttagggtttgagtgcggcactagtattactgatgataacaaaatcacattt

SEQ ID NO: 36291 - protein, 383 aa, Arabidopsis thaliana
  peptide (1)..(383): Ceres Seq. ID no. 12330653
APSPMAGFSSLIPRTLLKRAVSSATRNLTAPLASISAARNLFIGGGCDENYGEPGVFSHSNGIRKYTTTIGNTGSLTGPFHHLLGVNQTNKPAFLRVQSMSYQFVADSHSSPKRIVKNEDEEDFSDSSKKGNAENPRKHQIGENIPKKDKIKFLVNTLLDIEDNKEAVYGALDAWVAWERNFPIASLKIVIASLEKEHQWHRMVQVIKWILSKGQGNTMGTYGQLIRALDMDRRAEEAHIIWRKKVGNDLHSVPWQLCLQMMRIYFRNNMLQELVKLFKDLESYDRKPPDKHIVQTVADAYELLGMLDEKERVVTKYSHLLLGTPSDDKPSRSSRKKKKPELRIPEATTVDAAKAELQEELKENLDNHQESKAATEKQFKHGA

SEQ ID NO: 36292 - protein, 379 aa, Arabidopsis thaliana
  peptide (1)..(379): Ceres Seq. ID no. 12330654
MAGFSSLIPRTLLKRAVSSATRNLTAPLASISAARNLFIGGGCDENYGEPGVFSHSNGIRKYTTTIGNTGSLTGPFHHLLGVNQTNKPAFLRVQSMSYQFVADSHSSPKRIVKNEDEEDFSDSSKKGNAENPRKHQIGENIPKKDKIKFLVNTLLDIEDNKEAVYGALDAWVAWERNFPIASLKIVIASLEKEHQWHRMVQVIKWILSKGQGNTMGTYGQLIRALDMDRRAEEAHIIWRKKVGNDLHSVPWQLCLQMMRIYFRNNMLQELVKLFKDLESYDRKPPDKHIVQTVADAYELLGMLDEKERVVTKYSHLLLGTPSDDKPSRSSRKKKKPELRIPEATTVDAAKAELQEELKENLDNHQESKAATEKQFKHGA

SEQ ID NO: 36293 - protein, 284 aa, Arabidopsis thaliana
  peptide (1)..(284): Ceres Seq. ID no. 12330655
MSYQFVADSHSSPKRIVKNEDEEDFSDSSKKGNAENPRKHQIGENIPKKDKIKFLVNTLLDIEDNKEAVYGALDAWVAWERNFPIASLKIVIASLEKEHQWHRMVQVIKWILSKGQGNTMGTYGQLIRALDMDRRAEEAHIIWRKKVGNDLHSVPWQLCLQMMRIYFRNNMLQELVKLFKDLESYDRKPPDKHIVQTVADAYELLGMLDEKERVVTKYSHLLLGTPSDDKPSRSSRKKKKPELRIPEATTVDAAKAELQEELKENLDNHQESKAATEKQFKHGA

SEQ ID NO: 36294 - DNA, 710 bp, Arabidopsis thaliana
  misc_feature (1)..(710): Ceres Seq. ID no. 12323075
  misc_feature (1)..(710): Ortholog of  Ceres SEQ ID NO 13595818 as cited in SEQ ID NO 56698
agaccaaaaaagcggttggtgtaagatcccaaactcacagattcccaaataatagtaatactcttcctcttctcaactctcaccagtcaccagcagatcatcggagatgggcggagacggaaaagttttcaccttgtccgaggtttctcagcacagtagcgccaaggattgttggatcgtcatcgacggcaaggtttatgatgtgacaaagttcttggatgatcatcctggtggtgatgaggttatcttgacttctacagggaaagatgcgaccgatgatttcgaggatgtgggacatagttcgactgcgaaagccatgctagatgagtactatgtgggtgatattgacacagctactgtgccggttaaagctaagtttgtgcctcctacgtcgacgaaagccgtggctactcaggataagagctcggattttgttattaagctccttcagttccttgttccacttctaatcttaggcttggctttcggcattcggtactacactaagaccaaggctccttcttcttgaaagattgaattgtggcctaagtgaattgcttgtgtacgacgtggttaaactctgtctctacctctgtttgtcttgtaagacatcattatattctctattccaatcaactgatagacctttgatttttaagccatctacctttgttgtcttatatcaatcaaatccatttacaatatcactc

SEQ ID NO: 36295 - protein, 140 aa, Arabidopsis thaliana
  peptide (1)..(140): Ceres Seq. ID no. 12323076
MGGDGKVFTLSEVSQHSSAKDCWIVIDGKVYDVTKFLDDHPGGDEVILTSTGKDATDDFEDVGHSSTAKAMLDEYYVGDIDTATVPVKAKFVPPTSTKAVATQDKSSDFVIKLLQFLVPLLILGLAFGIRYYTKTKAPSS

SEQ ID NO: 36296 - protein, 70 aa, Arabidopsis thaliana; identical to SEQ ID NO: 26075
  peptide (1)..(70): Ceres Seq. ID no. 12323077

SEQ ID NO: 36297 - DNA, 625 bp, Arabidopsis thaliana
  misc_feature (1)..(625): Ceres Seq. ID no. 12340167
  misc_feature (1)..(625): Ortholog of  Ceres SEQ ID NO 13594870 as cited in SEQ ID NO 51929
  misc_feature (1)..(625): Ortholog of  Ceres SEQ ID NO 12610679 as cited in SEQ ID NO 56077
  misc_feature (1)..(625): Ortholog of  Ceres SEQ ID NO 12635481 as cited in SEQ ID NO 0
attactcactcatacgctctctcgtcaaaccaaaaaaaaaaacctaaaagaaacttcgaaatgaaaggcggcgaatccaaagctgaagcaacgagcactgatcagagactcaaaaccagaggtagaaaggctgggaagaagacgaagaaggatccaaatcaacctaagagacctccaagtgctttcttcgtcttccttgaggatttccggaaagagtttaacctagcgaatcctaataacaaatccgtcgctactgttggtaaggctgctggagctagatggaagtcaatgactgatgaagataaagctccttacgtcgccaaggctgagagcagaaagactgaatatattaagaatgtgcaacagtacaacttgaaactggctagtggaaccaatagagaagaggatgactctgacaaatctaagtctgaggtggatgaagcagtaagcgaagaggaggcagaagacgacgattgaagcatctaggtcttgctattgacttgactcagatttgagaatgtaaacttgcttaggtttatgaccaaaaactttttaaatactcttatttatgctttgtgtttgtgatatttgaacctcatttgctacatcaatgttgttttaggcc

SEQ ID NO: 36298 - protein, 158 aa, Arabidopsis thaliana
  peptide (1)..(158): Ceres Seq. ID no. 12340168
ITHSYALSSNQKKKPKRNFEMKGGESKAEATSTDQRLKTRGRKAGKKTKKDPNQPKRPPSAFFVFLEDFRKEFNLANPNNKSVATVGKAAGARWKSMTDEDKAPYVAKAESRKTEYIKNVQQYNLKLASGTNREEDDSDKSKSEVDEAVSEEEAEDDD

SEQ ID NO: 36299 - protein, 138 aa, Arabidopsis thaliana
  peptide (1)..(138): Ceres Seq. ID no. 12340169
MKGGESKAEATSTDQRLKTRGRKAGKKTKKDPNQPKRPPSAFFVFLEDFRKEFNLANPNNKSVATVGKAAGARWKSMTDEDKAPYVAKAESRKTEYIKNVQQYNLKLASGTNREEDDSDKSKSEVDEAVSEEEAEDDD

SEQ ID NO: 36300 - DNA, 1726 bp, Arabidopsis thaliana
  misc_feature (1)..(1726): Ceres Seq. ID no. 13494641
  misc_feature (1)..(1726): Ortholog of  Ceres SEQ ID NO 14302588 as cited in SEQ ID NO 0
acaagaagaatattcacagagaagagagagcgataataatggcgtttaagggtttcgcgtgtttttcgattcttttgttgttgtctctattcgtttcctctatacgaagcgaggagacgaaggaatttgtcttgactctcgatcactctaacttcaccgaaaccatctccaagcacgatttcatcgtcgtcgagttctacgccccttggtgtggtcactgccagaagcttgctcctgagtacgagaaggctgcatcagagttgagtagtcataaccctcctcttgctctcgccaagatcgatgctagtgaagaagcaaacaaagaatttgctaatgagtacaagattcagggtttccccactcttaagattttgagaaatggagggaagtcggttcaagattacaacggacctcgtgaagctgagggtattgtcacttatttgaagaagcaaagtggtcctgcttctgttgaaattaagtcagctgattctgccactgaggttgttggtgaaaagaatgttgttgctgttggagtgttccctaaattatccggggatgagtttgattctttcatggcccttgctgagaaattgcgtgctgactatgatttcgcacacactttggatgctaagtttcttcctcgtggagagtctgtggaaggacctgcagtgaggctgttcaagccttttgatgaattgtttgttgactccaaggacttcaatggggaagctctagagaaatttgtcaaagaatcaagtatcccacttgtcaccgtctttgacagtgatccaaacaaccacccttatgttgccaaattctttgaaagccctgccactaaggcgatgatgttcgttaacttcactggagcaacagctgaagctctaaaatcaaagtaccgtgaagtagctacatccaacaaagatcaaagtcttgccttccttgttggtgatgcagagagcagccaaggcgctttccagtactttggactcgaagagagccaagttcccctcatcatcatccagaccccagataacaagaagtatttgaaagtcaacgttgaggttgaccagattgaatcatggttcaaggacttccaggacggaaaagttgctgtccacaaaaaatcccaacctattccagctgagaacaacgaacctgtgaaggttgttgttgccgagagccttgacgacatagttttcaagtctggaaagaatgtcttgattgagttctatgcaccatggtgtggacattgtcaaaaacttgctccaatcttggacgaagtggctttgtcattccagaacgacccaagtgtgatcatagcaaaattggacgcaaccgcaaatgatatcccaagtgataccttcgatgtgaaaggattcccgaccatttacttcaggtcagcgagcggaaatgttgtagtgtacgaaggagacaggacaaaggaagacttcataaacttcgttgagaagaacagtgagaagaagccaacttctcatggagaagagtctaccaagagtgaggaacctaagaagaccgaggaaacggccgcaaaggacgagctgtagaaatctcatgagttttgtttcggaatttgagtaggagcgtttctcttcttcaccatatccaacagaatcttcttttttctttagcagttttacagttttatcttttttgctctcttgttcgaacccaaaattatccccattaataaaaagttaaacctaat

SEQ ID NO: 36301 - protein, 520 aa, Arabidopsis thaliana
  peptide (1)..(520): Ceres Seq. ID no. 13494642
KKNIHREERAIIMAFKGFACFSILLLLSLFVSSIRSEETKEFVLTLDHSNFTETISKHDFIVVEFYAPWCGHCQKLAPEYEKAASELSSHNPPLALAKIDASEEANKEFANEYKIQGFPTLKILRNGGKSVQDYNGPREAEGIVTYLKKQSGPASVEIKSADSATEVVGEKNVVAVGVFPKLSGDEFDSFMALAEKLRADYDFAHTLDAKFLPRGESVEGPAVRLFKPFDELFVDSKDFNGEALEKFVKESSIPLVTVFDSDPNNHPYVAKFFESPATKAMMFVNFTGATAEALKSKYREVATSNKDQSLAFLVGDAESSQGAFQYFGLEESQVPLIIIQTPDNKKYLKVNVEVDQIESWFKDFQDGKVAVHKKSQPIPAENNEPVKVVVAESLDDIVFKSGKNVLIEFYAPWCGHCQKLAPILDEVALSFQNDPSVIIAKLDATANDIPSDTFDVKGFPTIYFRSASGNVVVYEGDRTKEDFINFVEKNSEKKPTSHGEESTKSEEPKKTEETAAKDEL

SEQ ID NO: 36302 - protein, 508 aa, Arabidopsis thaliana
  peptide (1)..(508): Ceres Seq. ID no. 13494643
MAFKGFACFSILLLLSLFVSSIRSEETKEFVLTLDHSNFTETISKHDFIVVEFYAPWCGHCQKLAPEYEKAASELSSHNPPLALAKIDASEEANKEFANEYKIQGFPTLKILRNGGKSVQDYNGPREAEGIVTYLKKQSGPASVEIKSADSATEVVGEKNVVAVGVFPKLSGDEFDSFMALAEKLRADYDFAHTLDAKFLPRGESVEGPAVRLFKPFDELFVDSKDFNGEALEKFVKESSIPLVTVFDSDPNNHPYVAKFFESPATKAMMFVNFTGATAEALKSKYREVATSNKDQSLAFLVGDAESSQGAFQYFGLEESQVPLIIIQTPDNKKYLKVNVEVDQIESWFKDFQDGKVAVHKKSQPIPAENNEPVKVVVAESLDDIVFKSGKNVLIEFYAPWCGHCQKLAPILDEVALSFQNDPSVIIAKLDATANDIPSDTFDVKGFPTIYFRSASGNVVVYEGDRTKEDFINFVEKNSEKKPTSHGEESTKSEEPKKTEETAAKDEL

SEQ ID NO: 36303 - protein, 330 aa, Arabidopsis thaliana
  peptide (1)..(330): Ceres Seq. ID no. 13494644
MALAEKLRADYDFAHTLDAKFLPRGESVEGPAVRLFKPFDELFVDSKDFNGEALEKFVKESSIPLVTVFDSDPNNHPYVAKFFESPATKAMMFVNFTGATAEALKSKYREVATSNKDQSLAFLVGDAESSQGAFQYFGLEESQVPLIIIQTPDNKKYLKVNVEVDQIESWFKDFQDGKVAVHKKSQPIPAENNEPVKVVVAESLDDIVFKSGKNVLIEFYAPWCGHCQKLAPILDEVALSFQNDPSVIIAKLDATANDIPSDTFDVKGFPTIYFRSASGNVVVYEGDRTKEDFINFVEKNSEKKPTSHGEESTKSEEPKKTEETAAKDEL

SEQ ID NO: 36304 - DNA, 1435 bp, Arabidopsis thaliana
  misc_feature (1)..(1435): Ceres Seq. ID no. 13500060
  misc_feature (1)..(1435): Ortholog of  Ceres SEQ ID NO 13597160 as cited in SEQ ID NO 64016
  misc_feature (1)..(1435): Ortholog of  Ceres SEQ ID NO 15169659 as cited in SEQ ID NO 64152
gccctttcattattatgtcaacaaccctcctctattgaagatttcttcaatcatcttctccacaacaaaaaaataaccctaatttacacagaaaatatgtggggaattggaggaaattactactggcgaaagaaaaacaacaacggaggagaaagcgaagcgatcgttgtggtattcgcttggatgtctagcgaagaacgcaatctaaagaaccatgtcgatctctattcttctcttctttgggattctctcgtttgccattctcaatttctcaacatgtttcttccagataaagctgcagatttagcttctaatgttgtttctgaacttgtcaaggagctcaaagcaaagccagttcctttagtgtttgcttctttctctggtggtcctaatgcttgtatgtataaagttcttcaaatacttgaaggaacatgcgaaacgggactaaatccggatgattgtagattggttagaaactgcatctcagggtttatttatgactcatgtcctgtggatttcactagcgacttgggagctcgattagcggttcatccaactacgcttaaaatgtctagtccacctaaaccgtttgtatgggcagcgaatggtattgcttcgagtctcgattatgtttttctcaacaggtttgaatcacagcgagccgagtactggcagactctttactctactataatcatgagagtaccttatctcattctatgctctgaaaacgatgaccttgctccttatcaaactatacacaatttcgctacacgtctccaagaactaggaggaaatgtaaaacttgtaaaatggaatgattcccctcattgtggtcattatcgttataaccaggtcgactataaagctgctgtatctgagttcttgtcaaaagcagcgtcggtttattcgcagaagacgagaagtcttgacagagaagctatgaaaggaacatgtcatgatgagataacagagccaattcagagcttggggcaatcaacctctggtcttaaccgaagcttcaacggaactccacttgtcacaaccgatcatttcttcgtacctagcaccgtaggttactacgtgggcagagacggcggatatgtgcaagatgaacacaaacaagatttgatttgtttgtccaatactcaaaccaatgaatcggttaagcccaatggagttctaggccaaatcttatttgatgtttatattccgaagaatgttgaggattgggatataaagctatcagaaaccgggcggtctaggcggagaccggggaagagatttatacgtagatcgagattgtaacatctgagttatatattatatataccatgagtacccatttgttttcttcagatactgttgcagaggtattccatttggttttccctcgcaaagattaataaattaataaaataagatcttttttgct

SEQ ID NO: 36305 - protein, 435 aa, Arabidopsis thaliana
  peptide (1)..(435): Ceres Seq. ID no. 13500061
ALSLLCQQPSSIEDFFNHLLHNKKITLIYTENMWGIGGNYYWRKKNNNGGESEAIVVVFAWMSSEERNLKNHVDLYSSLLWDSLVCHSQFLNMFLPDKAADLASNVVSELVKELKAKPVPLVFASFSGGPNACMYKVLQILEGTCETGLNPDDCRLVRNCISGFIYDSCPVDFTSDLGARLAVHPTTLKMSSPPKPFVWAANGIASSLDYVFLNRFESQRAEYWQTLYSTIIMRVPYLILCSENDDLAPYQTIHNFATRLQELGGNVKLVKWNDSPHCGHYRYNQVDYKAAVSEFLSKAASVYSQKTRSLDREAMKGTCHDEITEPIQSLGQSTSGLNRSFNGTPLVTTDHFFVPSTVGYYVGRDGGYVQDEHKQDLICLSNTQTNESVKPNGVLGQILFDVYIPKNVEDWDIKLSETGRSRRRPGKRFIRRSRL

SEQ ID NO: 36306 - protein, 403 aa, Arabidopsis thaliana
  peptide (1)..(403): Ceres Seq. ID no. 13500062
MWGIGGNYYWRKKNNNGGESEAIVVVFAWMSSEERNLKNHVDLYSSLLWDSLVCHSQFLNMFLPDKAADLASNVVSELVKELKAKPVPLVFASFSGGPNACMYKVLQILEGTCETGLNPDDCRLVRNCISGFIYDSCPVDFTSDLGARLAVHPTTLKMSSPPKPFVWAANGIASSLDYVFLNRFESQRAEYWQTLYSTIIMRVPYLILCSENDDLAPYQTIHNFATRLQELGGNVKLVKWNDSPHCGHYRYNQVDYKAAVSEFLSKAASVYSQKTRSLDREAMKGTCHDEITEPIQSLGQSTSGLNRSFNGTPLVTTDHFFVPSTVGYYVGRDGGYVQDEHKQDLICLSNTQTNESVKPNGVLGQILFDVYIPKNVEDWDIKLSETGRSRRRPGKRFIRRSRL

SEQ ID NO: 36307 - protein, 374 aa, Arabidopsis thaliana
  peptide (1)..(374): Ceres Seq. ID no. 13500063
MSSEERNLKNHVDLYSSLLWDSLVCHSQFLNMFLPDKAADLASNVVSELVKELKAKPVPLVFASFSGGPNACMYKVLQILEGTCETGLNPDDCRLVRNCISGFIYDSCPVDFTSDLGARLAVHPTTLKMSSPPKPFVWAANGIASSLDYVFLNRFESQRAEYWQTLYSTIIMRVPYLILCSENDDLAPYQTIHNFATRLQELGGNVKLVKWNDSPHCGHYRYNQVDYKAAVSEFLSKAASVYSQKTRSLDREAMKGTCHDEITEPIQSLGQSTSGLNRSFNGTPLVTTDHFFVPSTVGYYVGRDGGYVQDEHKQDLICLSNTQTNESVKPNGVLGQILFDVYIPKNVEDWDIKLSETGRSRRRPGKRFIRRSRL

SEQ ID NO: 36308 - DNA, 1172 bp, Arabidopsis thaliana
  misc_feature (1)..(1172): Ceres Seq. ID no. 13497451
  misc_feature (1)..(1172): Ortholog of  Ceres SEQ ID NO 12593170 as cited in SEQ ID NO 63263
  misc_feature (1)..(1172): Ortholog of  Ceres SEQ ID NO 14301882 as cited in SEQ ID NO 64381
  misc_feature (1)..(1172): Ortholog of  Ceres SEQ ID NO 13597851 as cited in SEQ ID NO 64869
  misc_feature (1)..(1172): Ortholog of  Ceres SEQ ID NO 13662420 as cited in SEQ ID NO 68680
gtcttcaacgttcggctaatccttggtccgtgctaagatcttagatcgatttctaaagtcttcgtcttcttcttcttctgataactagatttttcaatcttctgaagctttaattttttcatagccatggctaatcgttatgatccaaatcctttcgctgaggaagaagaagtcaatcctttcgctaatgctagaggagttccacctgcgtcgaattcgagactttcgcctttgcctccagagcctgttggtttcgattatggtcgaaccgtagacattcctcttgacagagctggtacacaggatttgaagaagaaagagaaggaactccaagccaaagaagctgagctaaaacgacgagagcaggacctcaaacggaaagaagatgctgctgcacgagctggaatcgttatcgaagtgaaaaactggccgcctttcttcccgcttatccaccatgatattgcaaatgaaattccggttcatctccaaagactacagtatgttacctttgcaacgtatttggggttggttctttgtcttttctggaatatcatcgccgttactacagcttggatcaaaggagaaggagtgacgatatggcttcttgccttaatttacttcatagcgggtgttccaggaggctatgtgttatggtatcgaccactctaccgtgccttcagaactgatagtgcattgagctttggatggtttttcttgttctatatgctccacattgctttctgcgtctttgctgcagttgctccacctgtcgtcttcaaaggaaaatctcttgctgggatcttacctgcaatagatgtcttaagcggtcaagcaattgttgggatattctacttcattgggtttgcatttttctgcctcgaatcagtggttagcatctgggttatacagcaagtgtatatgtacttccgaggcagcgggaaacaagatcaaatgagacgggaagcagcgagaggagccttgagagccgctgtttgagagttctccttgtaacattctggtttgtgtatgcactgtttcttttttcagattttcttgaagtctctctctctctctctctctctgctctataaacaaaaaaaaaaaaatttaatttttcctttgtacctttatgtcatgtaaatttgtttgttcaaaaatcagagttcagattc

SEQ ID NO: 36309 - protein, 289 aa, Arabidopsis thaliana
  peptide (1)..(289): Ceres Seq. ID no. 13497452
MANRYDPNPFAEEEEVNPFANARGVPPASNSRLSPLPPEPVGFDYGRTVDIPLDRAGTQDLKKKEKELQAKEAELKRREQDLKRKEDAAARAGIVIEVKNWPPFFPLIHHDIANEIPVHLQRLQYVTFATYLGLVLCLFWNIIAVTTAWIKGEGVTIWLLALIYFIAGVPGGYVLWYRPLYRAFRTDSALSFGWFFLFYMLHIAFCVFAAVAPPVVFKGKSLAGILPAIDVLSGQAIVGIFYFIGFAFFCLESVVSIWVIQQVYMYFRGSGKQDQMRREAARGALRAAV

SEQ ID NO: 36310 - DNA, 1232 bp, Arabidopsis thaliana
  misc_feature (1)..(1232): Ceres Seq. ID no. 13504878
  misc_feature (1)..(1232): Ortholog of  Ceres SEQ ID NO 13594687 as cited in SEQ ID NO 52069
  misc_feature (1)..(1232): Ortholog of  Ceres SEQ ID NO 13595561 as cited in SEQ ID NO 59869
  misc_feature (1)..(1232): Ortholog of  Ceres SEQ ID NO 15178843 as cited in SEQ ID NO 0
atgttgtcttcaacctcacccacactttcttcggtctcatccttttataaaatccccatttcctctaacgatttttcgcctctctctctctctctctctctctctctctttcttctatcttctccgtcatcgttctctctctctcctctcccggagatttttactcaggcgttcttctgtggatcagaggtgaaaaagatgaatcattgcaaccttcagcagaacgccttcatgtctcgtgaggagatgatgggatttgaccgtaaggatcttgttgtttgtcctaagcctcgacgtgttggtttactcgccaacaacgttattcgtcctcttagattacatatgagtcaagctgcagccgacttgtgtgattctaaagctggtgctgagcttttggaaatcattcgtagaaaggaggataatggaacaatagggcagttactatcatcatccccaccgtattttcccggttcaccaccgagtagagcggcgaacccattagcccaagatgctcgttttcgagatgagaaactcaatccaatctcaccaaactctcctttccttcagccatattcggcaaccgggtttccatctccatcttcttcctcatcatcgtcgtcttcccgtggttgtgttagaatgaaatttggactcaactcgcctgcagttagagtagaaggatttgattgcttgaaccgtgaccgtcaaaactcgagcatccctgccatggcttagtagacaaacaacaaaaaaacaagtgtacatagagattccggaatcgttcgttcgccaatgcctaacagaggaggatttgattactactgctgcaactattactactaccatttttgaaagtaaatgaatatgtttttgtttttcatcttctcctaagagagagagagagggaagaggaaggaggaagatgaagatcagttaccgtcgccggtcaccgtttaactgttttattcaggttagtgtttgtatataaagatgcagtatttaaaagaagagtcgaatctatgtattcgtttggtgtttttctgggtcgggcggatctttagtactgtttcatatataactaagagggaagattagaagatgaagaagctgtaaaattttcttgggaagaaaactctggtttctatcttctcgttgtaatatagataatcaacttggatttatcttctttcagattcaccattgtatatagtaatgtttatttttcttggtgc

SEQ ID NO: 36311 - protein, 244 aa, Arabidopsis thaliana
  peptide (1)..(244): Ceres Seq. ID no. 13504879
MLSSTSPTLSSVSSFYKIPISSNDFSPLSLSLSLSLFLLSSPSSFSLSPLPEIFTQAFFCGSEVKKMNHCNLQQNAFMSREEMMGFDRKDLVVCPKPRRVGLLANNVIRPLRLHMSQAAADLCDSKAGAELLEIIRRKEDNGTIGQLLSSSPPYFPGSPPSRAANPLAQDARFRDEKLNPISPNSPFLQPYSATGFPSPSSSSSSSSSRGCVRMKFGLNSPAVRVEGFDCLNRDRQNSSIPAMA

SEQ ID NO: 36312 - protein, 178 aa, Arabidopsis thaliana
  peptide (1)..(178): Ceres Seq. ID no. 13504880
MNHCNLQQNAFMSREEMMGFDRKDLVVCPKPRRVGLLANNVIRPLRLHMSQAAADLCDSKAGAELLEIIRRKEDNGTIGQLLSSSPPYFPGSPPSRAANPLAQDARFRDEKLNPISPNSPFLQPYSATGFPSPSSSSSSSSSRGCVRMKFGLNSPAVRVEGFDCLNRDRQNSSIPAMA

SEQ ID NO: 36313 - protein, 167 aa, Arabidopsis thaliana
  peptide (1)..(167): Ceres Seq. ID no. 13504881
MSREEMMGFDRKDLVVCPKPRRVGLLANNVIRPLRLHMSQAAADLCDSKAGAELLEIIRRKEDNGTIGQLLSSSPPYFPGSPPSRAANPLAQDARFRDEKLNPISPNSPFLQPYSATGFPSPSSSSSSSSSRGCVRMKFGLNSPAVRVEGFDCLNRDRQNSSIPAMA

SEQ ID NO: 36314 - DNA, 1549 bp, Arabidopsis thaliana
  misc_feature (1)..(1549): Ceres Seq. ID no. 12321430
  misc_feature (1)..(1549): Ortholog of  Ceres SEQ ID NO 14314404 as cited in SEQ ID NO 57421
  misc_feature (1)..(1549): Ortholog of  Ceres SEQ ID NO 13493536 as cited in SEQ ID NO 58515
  misc_feature (1)..(1549): Ortholog of  Ceres SEQ ID NO 15225741 as cited in SEQ ID NO 59606
  misc_feature (1)..(1549): Ortholog of  Ceres SEQ ID NO 12618461 as cited in SEQ ID NO 64349
atatataagctccaggtcttgtacatcttcatcatctgatctcggggaagctccgatctgagtttttttttagcaatggcgaaaatgattcctagcctcgtctctctaattcttatcggtcttgttgcgatcgcctccgccgcagttattttcgaggagcgctttgatgatggctgggagaacagatgggttaaatctgagtggaagaaggatgataacactgctggggagtggaagcacactgcgggaaattggtctggtgacgctaacgataaaggtatccagaccagtgaagactacagattctacgccatttcagctgagttccctgaattcagtaacaaggacaagaccttagtcttccaattctcagtcaagcacgagcaaaagcttgactgcggtggtggctacatgaagctactaagtggtgatgttgaccaaaagaaatttggtggagacacaccatacagtatcatgtttggtcctgatatctgtggctacagcacaaagaaagtgcatgctatccttacctataatgaagccaaccacctgatcaagaaagatgttccatgtgaaactgaccagctcacccatgtgtacacatttatcctccgcccagatgctacttacagcattctcatcgacaatgttgagaaacaaactggtagcctttactctgactgggatcttctcccacccaagaagatcaaggaccccagcgccaagaagcctgaggactgggacgaacaagaatacatttctgaccctgaagacaagaaacctgacggttacgatgatatccctaaggagatcccagacaccgactcaaagaagcctgaggactgggatgatgaagaagatggtgagtggactgccccaacaatccccaaccctgagtacatgggtgaatggaagcctaagcaaatcaagaaccccaactacaagggcaagtgggaggctccattgattgacaaccctgacttcaaggatgacccagagctctacgtcttccccaagctgaaatatgttggactcgaattgtggcaggtgaaatcaggatcattgttcgacaatgtcttgatctgcgatgacccagactatgccaagaagttggcagatgaaacatggggaaagctcaaggatgcggagaaagcagctttcgatgaggctgagaagaagaatgaggaagaggaatccaaggacgcacctgcggaatctgatgctgaagacgaaccagaggatgatgaaggaggagatgattccgattctgaatctaaggccgaggagaccaaatcagtagatagcgaggaaacctctgagaaagacgccaccgctcatgatgagctataggtgaaaggttgaagatttgaagaccaaagttttcagtctctttattgttttatcgttttcttttgaagtattttagcatctagtttgtcggagatagaaacaagttttagcaaaactaaaagggggatacaatgtctgtcagatgctcattttagactttaaaaaaccatgaagaagttttgcagttgcttctctttcg

SEQ ID NO: 36315 - protein, 424 aa, Arabidopsis thaliana
  peptide (1)..(424): Ceres Seq. ID no. 12321431
MAKMIPSLVSLILIGLVAIASAAVIFEERFDDGWENRWVKSEWKKDDNTAGEWKHTAGNWSGDANDKGIQTSEDYRFYAISAEFPEFSNKDKTLVFQFSVKHEQKLDCGGGYMKLLSGDVDQKKFGGDTPYSIMFGPDICGYSTKKVHAILTYNEANHLIKKDVPCETDQLTHVYTFILRPDATYSILIDNVEKQTGSLYSDWDLLPPKKIKDPSAKKPEDWDEQEYISDPEDKKPDGYDDIPKEIPDTDSKKPEDWDDEEDGEWTAPTIPNPEYMGEWKPKQIKNPNYKGKWEAPLIDNPDFKDDPELYVFPKLKYVGLELWQVKSGSLFDNVLICDDPDYAKKLADETWGKLKDAEKAAFDEAEKKNEEEESKDAPAESDAEDEPEDDEGGDDSDSESKAEETKSVDSEETSEKDATAHDEL

SEQ ID NO: 36316 - protein, 421 aa, Arabidopsis thaliana
  peptide (1)..(421): Ceres Seq. ID no. 12321432
MIPSLVSLILIGLVAIASAAVIFEERFDDGWENRWVKSEWKKDDNTAGEWKHTAGNWSGDANDKGIQTSEDYRFYAISAEFPEFSNKDKTLVFQFSVKHEQKLDCGGGYMKLLSGDVDQKKFGGDTPYSIMFGPDICGYSTKKVHAILTYNEANHLIKKDVPCETDQLTHVYTFILRPDATYSILIDNVEKQTGSLYSDWDLLPPKKIKDPSAKKPEDWDEQEYISDPEDKKPDGYDDIPKEIPDTDSKKPEDWDDEEDGEWTAPTIPNPEYMGEWKPKQIKNPNYKGKWEAPLIDNPDFKDDPELYVFPKLKYVGLELWQVKSGSLFDNVLICDDPDYAKKLADETWGKLKDAEKAAFDEAEKKNEEEESKDAPAESDAEDEPEDDEGGDDSDSESKAEETKSVDSEETSEKDATAHDEL

SEQ ID NO: 36317 - protein, 312 aa, Arabidopsis thaliana
  peptide (1)..(312): Ceres Seq. ID no. 12321433
MKLLSGDVDQKKFGGDTPYSIMFGPDICGYSTKKVHAILTYNEANHLIKKDVPCETDQLTHVYTFILRPDATYSILIDNVEKQTGSLYSDWDLLPPKKIKDPSAKKPEDWDEQEYISDPEDKKPDGYDDIPKEIPDTDSKKPEDWDDEEDGEWTAPTIPNPEYMGEWKPKQIKNPNYKGKWEAPLIDNPDFKDDPELYVFPKLKYVGLELWQVKSGSLFDNVLICDDPDYAKKLADETWGKLKDAEKAAFDEAEKKNEEEESKDAPAESDAEDEPEDDEGGDDSDSESKAEETKSVDSEETSEKDATAHDEL

SEQ ID NO: 36318 - DNA, 1193 bp, Arabidopsis thaliana
  misc_feature (1)..(1193): Ceres Seq. ID no. 12321426
  misc_feature (1)..(1193): Ortholog of  Ceres SEQ ID NO 13587149 as cited in SEQ ID NO 0
acacttcactccaacgtgaaacctgcaaactgaacttatctcttcatattttctttagcttctcttaattttacacttagggttttcaaaccagtagagagagagagaagtgtgtaagagcgatgatgcagactccgtacactacttcaacgcaggggcaatattgtcattcttgtggaatgttccaccaccatagccaaagctgctgctacaacaacaacaacaactccaacgccggttcttactcgatggtcttctccatgcaaaacggtggcgttttcgagcagaacggtgaggactatcatcactcttcctccctcgttgactgcactctctctcttggaactccttctacgaggctttgtgaggaagatgagaaacgtagacgctctacttcatctggtgcttcttcttgcatctccaacttttgggacttgattcacaccaaaaacaacaactccaaaacggcaccgtacaataacgttccttctttctccgctaacaagccaagtcgcggttgttccggtggtggtgatggcggaggaggcggtggcggaggtgactctcttctcgctagacgctgtgccaactgtgacactacttctactccactatggaggaatggtcctagaggccctaagtccctatgcaacgcatgcggcattcgtttcaagaaggaagagagaagaactactgcggcttcaggaaacaccgtcgtcggagctgcaccggttcaaaccgaccagtacgggcatcacaactctggctacaataattaccatgctgccactaataacaacaataataatggtactccgtgggctcatcaccactcgacgcagagggttccgtgtaattatccggcaaatgagatcaggttcatggatgattacggcagtggagtagcaaacaacgttgaatccgacggtgctcacggcggtgttccgttcctttcttggaggcttaatgtagcggatagggcaagtcttgtccatgactttaccagatgaaaggagaatagaaaacgacgttagattctcttaaaatttccatgtggtttaattatgtctaattaaaaaaaaaccaagaaaatatttctgaaaaaaaatagaagtgtatatcgagagacgatgttgatgtttattgatagtgacggtctaacttatggtttatctataaagtaccgttctggc

SEQ ID NO: 36319 - protein, 295 aa, Arabidopsis thaliana
  peptide (1)..(295): Ceres Seq. ID no. 12321427
MMQTPYTTSTQGQYCHSCGMFHHHSQSCCYNNNNNSNAGSYSMVFSMQNGGVFEQNGEDYHHSSSLVDCTLSLGTPSTRLCEEDEKRRRSTSSGASSCISNFWDLIHTKNNNSKTAPYNNVPSFSANKPSRGCSGGGDGGGGGGGGDSLLARRCANCDTTSTPLWRNGPRGPKSLCNACGIRFKKEERRTTAASGNTVVGAAPVQTDQYGHHNSGYNNYHAATNNNNNNGTPWAHHHSTQRVPCNYPANEIRFMDDYGSGVANNVESDGAHGGVPFLSWRLNVADRASLVHDFTR

SEQ ID NO: 36320 - protein, 294 aa, Arabidopsis thaliana
  peptide (1)..(294): Ceres Seq. ID no. 12321428
MQTPYTTSTQGQYCHSCGMFHHHSQSCCYNNNNNSNAGSYSMVFSMQNGGVFEQNGEDYHHSSSLVDCTLSLGTPSTRLCEEDEKRRRSTSSGASSCISNFWDLIHTKNNNSKTAPYNNVPSFSANKPSRGCSGGGDGGGGGGGGDSLLARRCANCDTTSTPLWRNGPRGPKSLCNACGIRFKKEERRTTAASGNTVVGAAPVQTDQYGHHNSGYNNYHAATNNNNNNGTPWAHHHSTQRVPCNYPANEIRFMDDYGSGVANNVESDGAHGGVPFLSWRLNVADRASLVHDFTR

SEQ ID NO: 36321 - protein, 276 aa, Arabidopsis thaliana
  peptide (1)..(276): Ceres Seq. ID no. 12321429
MFHHHSQSCCYNNNNNSNAGSYSMVFSMQNGGVFEQNGEDYHHSSSLVDCTLSLGTPSTRLCEEDEKRRRSTSSGASSCISNFWDLIHTKNNNSKTAPYNNVPSFSANKPSRGCSGGGDGGGGGGGGDSLLARRCANCDTTSTPLWRNGPRGPKSLCNACGIRFKKEERRTTAASGNTVVGAAPVQTDQYGHHNSGYNNYHAATNNNNNNGTPWAHHHSTQRVPCNYPANEIRFMDDYGSGVANNVESDGAHGGVPFLSWRLNVADRASLVHDFTR

SEQ ID NO: 36322 - DNA, 1046 bp, Arabidopsis thaliana
  misc_feature (1)..(1046): Ceres Seq. ID no. 12322806
  misc_feature (1)..(1046): Ortholog of  Ceres SEQ ID NO 13596116 as cited in SEQ ID NO 62213
acataaaacaaaaggtacagtatataccataaatctccgagattcttttgatgtatctgtccatttcattattacacaaactaggaaactgatatctctctattcacattcctctgattctatttctctttatatatattcacccattaaccatctcaatcttataaccctcaaaatcacaatcttctcttacaaaaaactttgaaagatgaagattcttctagcatcattgtgtttgatcagtcttctcgtaatcttgccttctgtcttctctgcttcttcttcctctgaagattttgatttcttctacttcgtccaacaatggccaggatcatactgtgacacacagaagaagtgttgttatccaaattcaggcaaaccagctgctgattttggcattcatggtctttggcctaactacaaagatggaacttatccatctaactgtgatgcctctaaaccattcgatagctcaacgatatcagatcttctcacttcaatgaagaagagctggccaacactggcttgcccaagcggttcaggtgaagcgttttgggagcacgaatgggagaagcatggtacttgctctgaatcggttatcgatcaacatgaatatttccaaaccgctcttaaccttaaacagaaaaccaatctccttggagctctaaccaaagccgggattaatccggatggaaaatcttactctttggagagcataagagattcgataaaagagtcaattggtttcactccttgggttgagtgtaacagagatggttctggtaatagccaattgtaccaagtctatctttgtgttgaccggtctggttccggtttaatcgaatgtccggttttcccacatgggaaatgtggagctgagatcgaattcccttctttttagtttccaatttctaaattcagtctcttgaaccggcatcgatcttttgttcatggagattggtttggtcaaaaagaagatttaatgtaataaaaatttatgggatattggataatgatatagttcaatttcaataatattctacgtt

SEQ ID NO: 36323 - protein, 230 aa, Arabidopsis thaliana
  peptide (1)..(230): Ceres Seq. ID no. 12322807
MKILLASLCLISLLVILPSVFSASSSSEDFDFFYFVQQWPGSYCDTQKKCCYPNSGKPAADFGIHGLWPNYKDGTYPSNCDASKPFDSSTISDLLTSMKKSWPTLACPSGSGEAFWEHEWEKHGTCSESVIDQHEYFQTALNLKQKTNLLGALTKAGINPDGKSYSLESIRDSIKESIGFTPWVECNRDGSGNSQLYQVYLCVDRSGSGLIECPVFPHGKCGAEIEFPSF

SEQ ID NO: 36324 - protein, 133 aa, Arabidopsis thaliana
  peptide (1)..(133): Ceres Seq. ID no. 12322808
MKKSWPTLACPSGSGEAFWEHEWEKHGTCSESVIDQHEYFQTALNLKQKTNLLGALTKAGINPDGKSYSLESIRDSIKESIGFTPWVECNRDGSGNSQLYQVYLCVDRSGSGLIECPVFPHGKCGAEIEFPSF

SEQ ID NO: 36325 - DNA, 1070 bp, Arabidopsis thaliana
  misc_feature (1)..(1070): Ceres Seq. ID no. 12338220
  misc_feature (1)..(1070): Ortholog of  Ceres SEQ ID NO 14315973 as cited in SEQ ID NO 57637
acatttttcacgtctccgacaacttcttcttctccaacccaaattcctctcttctcaacctcgtcctctccgttctcctcctccaacatttctccgatcattgatgggttcgtcttcttctttctcctcttcttcctcgaagcttctctttcgtcaactctttgagaacgaatcttccacctttacttatcttctcgccgacgtttctcatcctgataaacctgctttgttgattgatccggtggacaagactgtggatagagacttgaaactgattgatgagttaggattaaagcttatctatgctatgaacactcatgttcatgctgatcatgtcactggtactggacttcttaagacgaagctcccgggtgtgaaatccgttatttcgaaagcaagtggttccaaagctgatttgtttcttgaacctggtgacaaagtatctattggtgatatataccttgaggttcgtgctacacctggacacactacaggatgtgttacatatgtgactggtgaaggagctgatcagccccaaccaagaatggcttttaccggggatgctgtactcatccgtggttgtgggaggactgactttcagggaggaagctcagatcaactctacgagtctgtacattcacagatattttcattgccaaaggacacattgatctatccagctcacgactacaaaggtttcgaggtaagtacagttggagaagagatgcaacacaacccgcgtctaactaaagataaagaaacattcaaaaccattatgtcaaatctgaatctgtcgtatccgaagatgattgatgttgcagtaccagcaaatatggtctgtgggttacaagatgtgccttctcaagccaactaaaaaaaactcttacatataatgtttgtctttttatcgatgtcattctatatttaccaaagccaataaaaactcttgagagtaatttctacaataagatttgcttccgttgtagataagttcattagaaaattgtgtaaattagattgaacatgtggaatttgttatgaagatgaagacagtatttgcgtgttcgact

SEQ ID NO: 36326 - protein, 290 aa, Arabidopsis thaliana
  peptide (1)..(290): Ceres Seq. ID no. 12338221
HFSRLRQLLLLQPKFLSSQPRPLRSPPPTFLRSLMGSSSSFSSSSSKLLFRQLFENESSTFTYLLADVSHPDKPALLIDPVDKTVDRDLKLIDELGLKLIYAMNTHVHADHVTGTGLLKTKLPGVKSVISKASGSKADLFLEPGDKVSIGDIYLEVRATPGHTTGCVTYVTGEGADQPQPRMAFTGDAVLIRGCGRTDFQGGSSDQLYESVHSQIFSLPKDTLIYPAHDYKGFEVSTVGEEMQHNPRLTKDKETFKTIMSNLNLSYPKMIDVAVPANMVCGLQDVPSQAN

SEQ ID NO: 36327 - protein, 256 aa, Arabidopsis thaliana
  peptide (1)..(256): Ceres Seq. ID no. 12338222
MGSSSSFSSSSSKLLFRQLFENESSTFTYLLADVSHPDKPALLIDPVDKTVDRDLKLIDELGLKLIYAMNTHVHADHVTGTGLLKTKLPGVKSVISKASGSKADLFLEPGDKVSIGDIYLEVRATPGHTTGCVTYVTGEGADQPQPRMAFTGDAVLIRGCGRTDFQGGSSDQLYESVHSQIFSLPKDTLIYPAHDYKGFEVSTVGEEMQHNPRLTKDKETFKTIMSNLNLSYPKMIDVAVPANMVCGLQDVPSQAN

SEQ ID NO: 36328 - protein, 188 aa, Arabidopsis thaliana
  peptide (1)..(188): Ceres Seq. ID no. 12338223
MNTHVHADHVTGTGLLKTKLPGVKSVISKASGSKADLFLEPGDKVSIGDIYLEVRATPGHTTGCVTYVTGEGADQPQPRMAFTGDAVLIRGCGRTDFQGGSSDQLYESVHSQIFSLPKDTLIYPAHDYKGFEVSTVGEEMQHNPRLTKDKETFKTIMSNLNLSYPKMIDVAVPANMVCGLQDVPSQAN

SEQ ID NO: 36329 - DNA, 2009 bp, Arabidopsis thaliana
  misc_feature (1)..(2009): Ceres Seq. ID no. 13645749
  misc_feature (1)..(2009): Ortholog of  Ceres SEQ ID NO 13584744 as cited in SEQ ID NO 69137
aatgtcattttctttttgagtaaagaaactttcttcttttgcaacttgaaaattttcgatttcgagagcgaaggaagagagagagagagggagagatcaaaaaaatttgtgaaaaaagagatttattttagggttttgttgattttctttgttcattttgccgtcgtctctttctctttctcttgtgaagaaaaagaagaaaaatgaaacttctgggtttggtcttcttgctgtttaatctgtttatgttttcgttttctcggaaacttttaaccgagagtggtggtggtctccacgacgaagctgctctgttgaagttgaagagtagtttcttggatccaaatggagttctgtctagctgggtttccgacagctcatcaaaccattgttcttggtacggtgtctcttgcaactctgattcgagagtcgtttctttaattctcagaggctgtgatgagcttgaaggtagtggtgttcttcatctcccagatttgtcttcttgttcttcaagtaaaagaagacttggtggtgtaatctctcctgttgttggagatttgtctgaaattagggttttatctctgtcttttaatgatcttagaggtgagattccaaaggagatttgggggttggagaaattagagattcttgatcttaaaggtaacaactttatcggtggaattagggttgttgataatgttgttcttaggaaacttatgagttttgaggatgaagatgaaattggtccaagctcagctgatgatgattctcctggtaaatctggattgtatccgattgagatagcttctattgtgtcagcttcagtgattgtctttgtgcttcttgttcttgtgatcttgttcatctacacgaggaaatggaaacgaaactctcaggttcaggtagatgagatcaaggagattaaagtgtttgttgacattggtattcctctgacgtatgagatcattgttagagctactggttactttagtaactctaactgtatcggtcacggcggtttcggttcgacttataaagcagaggtgtctccaacgaatgtgtttgctgttaaaagactctctgttgggaggtttcaaggtgatcaacagtttcatgctgagatctctgctcttgagatggttaggcatccgaatcttgttatgttaatcggttaccatgcgagcgaaaccgagatgtttcttatttacaactacttatctggaggaaaccttcaagatttcattaaagagagatcgaaagctgctattgagtggaaggtacttcacaagattgctcttgatgtagcgcgtgctctctcctatcttcacgaacagtgttctcctaaagtcttgcatagagatatcaaaccgagtaacatactcttggacaacaactacaacgcttatctatctgatttcggactctcgaaactcttgggaacttcgcagtctcatgtcacaactggtgtggctggaacattcggatatgtagctccagagtacgcaatgacatgccgagtctcggagaaagcagatgtttacagctatgggatagtcctcttggagctgatatcggacaaacgagctctggatccttctttctcatcgcatgagaacgggttcaacattgtctcgtgggctcatatgatgttgagtcaaggcaaagcgaaagaagtcttcaccacaggactatgggagactggtcctccagacgatttggtcgaggttctgcatttggcactcaaatgcaccgtcgatagcctctcgataaggccgacaatgaaacaagctgtaagactgctgaaacgaatccagccttctagattgtgatacaaagctagaagaaaggtgtttttagaggatttgtacagcagcaaacaagtgcctagccattagaatctttctcaagtctgttttttatattttcagtgctagggaggtttttcatatgcatcatcaaaatgttattctcagtctactctcttgaaaactgatataaatgatgtttctttc

SEQ ID NO: 36330 - protein, 540 aa, Arabidopsis thaliana
  peptide (1)..(540): Ceres Seq. ID no. 13645750
MKLLGLVFLLFNLFMFSFSRKLLTESGGGLHDEAALLKLKSSFLDPNGVLSSWVSDSSSNHCSWYGVSCNSDSRVVSLILRGCDELEGSGVLHLPDLSSCSSSKRRLGGVISPVVGDLSEIRVLSLSFNDLRGEIPKEIWGLEKLEILDLKGNNFIGGIRVVDNVVLRKLMSFEDEDEIGPSSADDDSPGKSGLYPIEIASIVSASVIVFVLLVLVILFIYTRKWKRNSQVQVDEIKEIKVFVDIGIPLTYEIIVRATGYFSNSNCIGHGGFGSTYKAEVSPTNVFAVKRLSVGRFQGDQQFHAEISALEMVRHPNLVMLIGYHASETEMFLIYNYLSGGNLQDFIKERSKAAIEWKVLHKIALDVARALSYLHEQCSPKVLHRDIKPSNILLDNNYNAYLSDFGLSKLLGTSQSHVTTGVAGTFGYVAPEYAMTCRVSEKADVYSYGIVLLELISDKRALDPSFSSHENGFNIVSWAHMMLSQGKAKEVFTTGLWETGPPDDLVEVLHLALKCTVDSLSIRPTMKQAVRLLKRIQPSRL

SEQ ID NO: 36331 - protein, 526 aa, Arabidopsis thaliana
  peptide (1)..(526): Ceres Seq. ID no. 13645751
MFSFSRKLLTESGGGLHDEAALLKLKSSFLDPNGVLSSWVSDSSSNHCSWYGVSCNSDSRVVSLILRGCDELEGSGVLHLPDLSSCSSSKRRLGGVISPVVGDLSEIRVLSLSFNDLRGEIPKEIWGLEKLEILDLKGNNFIGGIRVVDNVVLRKLMSFEDEDEIGPSSADDDSPGKSGLYPIEIASIVSASVIVFVLLVLVILFIYTRKWKRNSQVQVDEIKEIKVFVDIGIPLTYEIIVRATGYFSNSNCIGHGGFGSTYKAEVSPTNVFAVKRLSVGRFQGDQQFHAEISALEMVRHPNLVMLIGYHASETEMFLIYNYLSGGNLQDFIKERSKAAIEWKVLHKIALDVARALSYLHEQCSPKVLHRDIKPSNILLDNNYNAYLSDFGLSKLLGTSQSHVTTGVAGTFGYVAPEYAMTCRVSEKADVYSYGIVLLELISDKRALDPSFSSHENGFNIVSWAHMMLSQGKAKEVFTTGLWETGPPDDLVEVLHLALKCTVDSLSIRPTMKQAVRLLKRIQPSRL

SEQ ID NO: 36332 - protein, 370 aa, Arabidopsis thaliana
  peptide (1)..(370): Ceres Seq. ID no. 13645752
MSFEDEDEIGPSSADDDSPGKSGLYPIEIASIVSASVIVFVLLVLVILFIYTRKWKRNSQVQVDEIKEIKVFVDIGIPLTYEIIVRATGYFSNSNCIGHGGFGSTYKAEVSPTNVFAVKRLSVGRFQGDQQFHAEISALEMVRHPNLVMLIGYHASETEMFLIYNYLSGGNLQDFIKERSKAAIEWKVLHKIALDVARALSYLHEQCSPKVLHRDIKPSNILLDNNYNAYLSDFGLSKLLGTSQSHVTTGVAGTFGYVAPEYAMTCRVSEKADVYSYGIVLLELISDKRALDPSFSSHENGFNIVSWAHMMLSQGKAKEVFTTGLWETGPPDDLVEVLHLALKCTVDSLSIRPTMKQAVRLLKRIQPSRL

SEQ ID NO: 36333 - DNA, 719 bp, Arabidopsis thaliana
  misc_feature (1)..(719): Ceres Seq. ID no. 12332348
  misc_feature (1)..(719): Ortholog of  Ceres SEQ ID NO 15225657 as cited in SEQ ID NO 329
aaacaacaggtcagagaataaatagaaaaaccaaaaccctttagcgtctcccaaatcctctcaatcctctgctgctcaatctctcatcatcggcatcgctctctctaaaaatgtctcagatggatcccgacgctgtatctaaggccttcgtcgaacattactattccaccttcgacaccaaccgtgtcggtctcgctggtctctatcaggaagcttctatgctcaccttcgaaggtcaaaagatccaaggagtccagagcatcgtcgctaagctcacctctcttcctttccagcagtgcaagcatcacatctccaccgttgattgtcagccttctggtcctgcttccggtatgctcgttttcgtttccggtaatctccagctcgccggagaagaacacgctctcaagttcagccagatgtttcatttgatgccgacgccacaaggaagcttttacgtgttcaacgatatattcaggttgaactatgcctgaacagaaatcagattgttgttagcatacatcattgttgcatttctatactatttgagcaaatccttctatcaatttttctcgtctttttcttgttattcctagatgatttaccttgggaacagaggaatattgtctctcatcatgtatttggtttggattgtttgttcatttgtcattacaatctattgactttataagacaatttgaatggtcatttggctcttgtcc

SEQ ID NO: 36334 - protein, 126 aa, Arabidopsis thaliana
  peptide (1)..(126): Ceres Seq. ID no. 12332349
MSQMDPDAVSKAFVEHYYSTFDTNRVGLAGLYQEASMLTFEGQKIQGVQSIVAKLTSLPFQQCKHHISTVDCQPSGPASGMLVFVSGNLQLAGEEHALKFSQMFHLMPTPQGSFYVFNDIFRLNYA

SEQ ID NO: 36335 - protein, 123 aa, Arabidopsis thaliana
  peptide (1)..(123): Ceres Seq. ID no. 12332350
MDPDAVSKAFVEHYYSTFDTNRVGLAGLYQEASMLTFEGQKIQGVQSIVAKLTSLPFQQCKHHISTVDCQPSGPASGMLVFVSGNLQLAGEEHALKFSQMFHLMPTPQGSFYVFNDIFRLNYA

SEQ ID NO: 36336 - protein, 90 aa, Arabidopsis thaliana
  peptide (1)..(90): Ceres Seq. ID no. 12332351
MLTFEGQKIQGVQSIVAKLTSLPFQQCKHHISTVDCQPSGPASGMLVFVSGNLQLAGEEHALKFSQMFHLMPTPQGSFYVFNDIFRLNYA

SEQ ID NO: 36337 - DNA, 1071 bp, Arabidopsis thaliana
  misc_feature (1)..(1071): Ceres Seq. ID no. 12333126
  misc_feature (1)..(1071): Ortholog of  Ceres SEQ ID NO 12608127 as cited in SEQ ID NO 57579
  misc_feature (1)..(1071): Ortholog of  Ceres SEQ ID NO 12634558 as cited in SEQ ID NO 0
aacaccactaataaactcaacatggctagatccttgttgctctcgctaaccctcacattcctcttcgccggaattgtctcagctcgtgactggaacatcctgagccagctcaaaggaaccacaaccaccacgaagactagccaaaccggcgtcacatctttgaaagctcccaacctaaacggatactgtgagagctggagagtcaacgtggagcttaacaacataagggactttaaggtggttccacaggaatgtgtatggttcgtccaaaagtacatgacctcatctcaatacgaagatgacgtggagagagccgtcgatgaagccatcctctacctcggaaaaacttgttgcgagaagaagacatgcgatggcatggatgcttggatctttgacattgatgacactcttctctcaaccattccttaccacaagagcaacggttgtttcggtggtgagcaactgaacacgaccaagttcgaggaatggcaaaattcgggcaaggcaccagcggttccacacatggtgaagttgtaccatgagatcagagagagaggtttcaagatctttttgatctcttctcgtaaagagtatctcagatctgccaccgtcgaaaatcttattgaagccggttaccacagctggtctaacctccttctgaggggagaagatgatgaaaagaagagtgtgagccaatacaaagcagatttgaggacatggcttacaagtcttgggtacagagtttggggagtgatgggtgcacaatggaacagcttctctggttgtccagttcccaagagaaccttcaagctccctaactccatctactatgtcgcctgattaaatcttatttactaacaaaacaataagatcagagtttcattctgattcttgagtcttttttttctctctccctcttttcatttctggtttatataaccaattcaaatgcttatgatccatgcatgaaccatgatcatctttgtgtttttttttccttctgtattaccattttgggcctttgtgaaattgattttgggcttttgttatataatctcctctttctctttc

SEQ ID NO: 36338 - protein, 279 aa, Arabidopsis thaliana
  peptide (1)..(279): Ceres Seq. ID no. 12333127
NTTNKLNMARSLLLSLTLTFLFAGIVSARDWNILSQLKGTTTTTKTSQTGVTSLKAPNLNGYCESWRVNVELNNIRDFKVVPQECVWFVQKYMTSSQYEDDVERAVDEAILYLGKTCCEKKTCDGMDAWIFDIDDTLLSTIPYHKSNGCFGGEQLNTTKFEEWQNSGKAPAVPHMVKLYHEIRERGFKIFLISSRKEYLRSATVENLIEAGYHSWSNLLLRGEDDEKKSVSQYKADLRTWLTSLGYRVWGVMGAQWNSFSGCPVPKRTFKLPNSIYYVA

SEQ ID NO: 36339 - protein, 272 aa, Arabidopsis thaliana
  peptide (1)..(272): Ceres Seq. ID no. 12333128
MARSLLLSLTLTFLFAGIVSARDWNILSQLKGTTTTTKTSQTGVTSLKAPNLNGYCESWRVNVELNNIRDFKVVPQECVWFVQKYMTSSQYEDDVERAVDEAILYLGKTCCEKKTCDGMDAWIFDIDDTLLSTIPYHKSNGCFGGEQLNTTKFEEWQNSGKAPAVPHMVKLYHEIRERGFKIFLISSRKEYLRSATVENLIEAGYHSWSNLLLRGEDDEKKSVSQYKADLRTWLTSLGYRVWGVMGAQWNSFSGCPVPKRTFKLPNSIYYVA

SEQ ID NO: 36340 - protein, 187 aa, Arabidopsis thaliana
  peptide (1)..(187): Ceres Seq. ID no. 12333129
MTSSQYEDDVERAVDEAILYLGKTCCEKKTCDGMDAWIFDIDDTLLSTIPYHKSNGCFGGEQLNTTKFEEWQNSGKAPAVPHMVKLYHEIRERGFKIFLISSRKEYLRSATVENLIEAGYHSWSNLLLRGEDDEKKSVSQYKADLRTWLTSLGYRVWGVMGAQWNSFSGCPVPKRTFKLPNSIYYVA

SEQ ID NO: 36341 - DNA, 1270 bp, Arabidopsis thaliana
  misc_feature (1)..(1270): Ceres Seq. ID no. 13489040
  misc_feature (1)..(1270): Ortholog of  Ceres SEQ ID NO 15168537 as cited in SEQ ID NO 57100
  misc_feature (1)..(1270): Ortholog of  Ceres SEQ ID NO 15178681 as cited in SEQ ID NO 63192
  misc_feature (1)..(1270): Ortholog of  Ceres SEQ ID NO 13579918 as cited in SEQ ID NO 64644
  misc_feature (1)..(1270): Ortholog of  Ceres SEQ ID NO 13654122 as cited in SEQ ID NO 68192
ctctctcgctttctctctataaaaagctcctctttcttcaccataactcttcaaactttactttcttacagaacaagaacataaatatcttaaactcatgtctgaatgtggatgtttttcggcaacaactatgttgagaatttgtgtagtattgataatatgtttgcatatgtgttgtgcctcgagtgattgtacaagtcacgatgatcctgtgtctcaagacgaagcagagaaagcgacgaagctaaagcttggttcgatagctttacttcttgtagccggaggagtcggcgtgagtctaccgttgatcgggaaaaggattccggcgttacaaccggaaaatgatatcttcttcatggtgaaagcttttgctgcaggagtgatcctctgcacaggtttcgttcatatcttaccagacgcgttcgagagattgagctctccatgtcttgaggacactacagctgggaagttcccgtttgctggttttgtagcgatgctgtcggcgatggggactcttatgatcgacacattcgcgacagggtattacaagaggcaacattttagcaataaccatgggagcaagcaagtgaacgtagtagtagatgaagaagagcatgcgggtcatgttcacattcacacgcacgctagtcacggacacacacatggttcgaccgagttgatcagaagacgtatagtgtcgcaggtgcttgagattgggatagttgtgcattcggttattatagggatatcacttggagcttcacagagcatagacaccataaagccactcatggctgcactatctttccatcagttctttgaaggtcttggcctcggtggatgcatctccctggcggatatgaagtcgaaatcgacagtgctaatggcgacatttttctcggtgacggcgccacttgggataggaatagggttggggatgtcaagtggtttaggctacaggaaagagagcaaagaggcaataatggtggaaggaatgttgaatgctgcatctgctgggatactcatatacatgtcacttgttgatcttcttgctactgattttatgaatccaagattgcaatccaatctctggcttcacttggctgcttatctctctctcgtcctaggcgcaggttccatgtctctcctcgccatctgggcctgattcttgatctgaaactaacaaacaaacaaaccaaatgccgctctttttctcgaatctgtaatggtgtttctaatctcagaatcaatactattctatcttgaacac

SEQ ID NO: 36342 - protein, 355 aa, Arabidopsis thaliana
  peptide (1)..(355): Ceres Seq. ID no. 13489041
MSECGCFSATTMLRICVVLIICLHMCCASSDCTSHDDPVSQDEAEKATKLKLGSIALLLVAGGVGVSLPLIGKRIPALQPENDIFFMVKAFAAGVILCTGFVHILPDAFERLSSPCLEDTTAGKFPFAGFVAMLSAMGTLMIDTFATGYYKRQHFSNNHGSKQVNVVVDEEEHAGHVHIHTHASHGHTHGSTELIRRRIVSQVLEIGIVVHSVIIGISLGASQSIDTIKPLMAALSFHQFFEGLGLGGCISLADMKSKSTVLMATFFSVTAPLGIGIGLGMSSGLGYRKESKEAIMVEGMLNAASAGILIYMSLVDLLATDFMNPRLQSNLWLHLAAYLSLVLGAGSMSLLAIWA

SEQ ID NO: 36343 - protein, 344 aa, Arabidopsis thaliana
  peptide (1)..(344): Ceres Seq. ID no. 13489042
MLRICVVLIICLHMCCASSDCTSHDDPVSQDEAEKATKLKLGSIALLLVAGGVGVSLPLIGKRIPALQPENDIFFMVKAFAAGVILCTGFVHILPDAFERLSSPCLEDTTAGKFPFAGFVAMLSAMGTLMIDTFATGYYKRQHFSNNHGSKQVNVVVDEEEHAGHVHIHTHASHGHTHGSTELIRRRIVSQVLEIGIVVHSVIIGISLGASQSIDTIKPLMAALSFHQFFEGLGLGGCISLADMKSKSTVLMATFFSVTAPLGIGIGLGMSSGLGYRKESKEAIMVEGMLNAASAGILIYMSLVDLLATDFMNPRLQSNLWLHLAAYLSLVLGAGSMSLLAIWA

SEQ ID NO: 36344 - protein, 331 aa, Arabidopsis thaliana
  peptide (1)..(331): Ceres Seq. ID no. 13489043
MCCASSDCTSHDDPVSQDEAEKATKLKLGSIALLLVAGGVGVSLPLIGKRIPALQPENDIFFMVKAFAAGVILCTGFVHILPDAFERLSSPCLEDTTAGKFPFAGFVAMLSAMGTLMIDTFATGYYKRQHFSNNHGSKQVNVVVDEEEHAGHVHIHTHASHGHTHGSTELIRRRIVSQVLEIGIVVHSVIIGISLGASQSIDTIKPLMAALSFHQFFEGLGLGGCISLADMKSKSTVLMATFFSVTAPLGIGIGLGMSSGLGYRKESKEAIMVEGMLNAASAGILIYMSLVDLLATDFMNPRLQSNLWLHLAAYLSLVLGAGSMSLLAIWA

SEQ ID NO: 36345 - DNA, 1156 bp, Arabidopsis thaliana
  misc_feature (1)..(1156): Ceres Seq. ID no. 12330381
  misc_feature (1)..(1156): Ortholog of  Ceres SEQ ID NO 15168580 as cited in SEQ ID NO 60279
atttttcgtcaaaagaatcagtaaaaactaaacattttgactatatcctacttgaatcaattcttcggctgattttgaagttttgtgacattcagatattctagggttttgtggtaaatggaatcgaatcacgaaggcaacgcgatacaagtgattgaccaagtaacaaccatgacccatctgtctgacccgaatccgaaaaccaaaccgggtatgatgctcatgaaacaagaagacgggtatttgcagccggtgaagactaaaccggctccgaagagaccgacttctaaagaccgtcacacgaaagtagaaggacgaggtcggaggatccgaatgccggcgggttgcgctgctcgggtctttcaattgacccgtgaacttggtcacaaatccgacggagaaacgatacggtggttattggaacgagctgaaccggcgataattgaagcaaccggaaccggaactgtaccggctattgctgtatcggttaacggaactttaaaaatcccgacgagctctccagtgttgaatgacggcggccgtgacggtgacggtgacctaatgaagaaacggaggaagagaaactgtacgagcgatttcgtagacgttaatgacagctgtcatagctccgttacttctgggttagctccgataacggcgtcaaactacggcgttaatatcctgaacgttaatacacaggggtttgtgccgttttggcctatgggtatgggtactgcgtatgttactggtgggccggatcaaatgggccaaatgtgggctattcctaccgttgctacagctccgtttctcaatgttggtgctagaccggtgtctagttatgtctcaaacgcttcagacgctgaggcggagatggaaacgagcggtggcggaacgacgcaaccgctgagggatttttcgttggagatttatgataagagagagcttcagtttttgggtggctcagggaactcatctccgtcttcatgtcatgagacttaaggaattttaactcttagttctagtttctttttagtttttagtaagtttgattcctgatttaggttaagtaagatttgtaaaagaattgggagcacaatttcaattttatgtttctgtcaaacattttggtaattaatgaaactatcctatcattttt

SEQ ID NO: 36346 - protein, 293 aa, Arabidopsis thaliana
  peptide (1)..(293): Ceres Seq. ID no. 12330382
MESNHEGNAIQVIDQVTTMTHLSDPNPKTKPGMMLMKQEDGYLQPVKTKPAPKRPTSKDRHTKVEGRGRRIRMPAGCAARVFQLTRELGHKSDGETIRWLLERAEPAIIEATGTGTVPAIAVSVNGTLKIPTSSPVLNDGGRDGDGDLMKKRRKRNCTSDFVDVNDSCHSSVTSGLAPITASNYGVNILNVNTQGFVPFWPMGMGTAYVTGGPDQMGQMWAIPTVATAPFLNVGARPVSSYVSNASDAEAEMETSGGGTTQPLRDFSLEIYDKRELQFLGGSGNSSPSSCHET

SEQ ID NO: 36347 - protein, 275 aa, Arabidopsis thaliana
  peptide (1)..(275): Ceres Seq. ID no. 12330383
MTHLSDPNPKTKPGMMLMKQEDGYLQPVKTKPAPKRPTSKDRHTKVEGRGRRIRMPAGCAARVFQLTRELGHKSDGETIRWLLERAEPAIIEATGTGTVPAIAVSVNGTLKIPTSSPVLNDGGRDGDGDLMKKRRKRNCTSDFVDVNDSCHSSVTSGLAPITASNYGVNILNVNTQGFVPFWPMGMGTAYVTGGPDQMGQMWAIPTVATAPFLNVGARPVSSYVSNASDAEAEMETSGGGTTQPLRDFSLEIYDKRELQFLGGSGNSSPSSCHET

SEQ ID NO: 36348 - protein, 261 aa, Arabidopsis thaliana
  peptide (1)..(261): Ceres Seq. ID no. 12330384
MMLMKQEDGYLQPVKTKPAPKRPTSKDRHTKVEGRGRRIRMPAGCAARVFQLTRELGHKSDGETIRWLLERAEPAIIEATGTGTVPAIAVSVNGTLKIPTSSPVLNDGGRDGDGDLMKKRRKRNCTSDFVDVNDSCHSSVTSGLAPITASNYGVNILNVNTQGFVPFWPMGMGTAYVTGGPDQMGQMWAIPTVATAPFLNVGARPVSSYVSNASDAEAEMETSGGGTTQPLRDFSLEIYDKRELQFLGGSGNSSPSSCHET

SEQ ID NO: 36349 - DNA, 751 bp, Arabidopsis thaliana
  misc_feature (1)..(751): Ceres Seq. ID no. 12395378
  misc_feature (1)..(751): Ortholog of  Ceres SEQ ID NO 15176862 as cited in SEQ ID NO 67415
agatttttgttttgtttttaatcgggaaagatgaaggcggagacgatgacgctgcttctggtgaatctagccggaataatggaaagagccgatgaatctctgcttccaggtgtatacaaagaggtcggtttagctcttcataccgatccaaccggactcgggtcattaacgttgctacgatccatggttcaagccgcttgctatcccttagctgcttacatggccattagacataaccgagctcacgttatagctctgggtgcatttctctggtccgctgctactttccttgtcgctttctcttccactttcttccaggtagcagtgtctagagctctgaatggaattggtcttgctcttgtggctccagctattcagtctctcgttgctgactcaactgatgatgctaaccgtggtactgcttttggatggttacaattaacagcaaatattggttcgattttaggcgggctttgctctgttttaatagctccattaacctttatgggcatacctggttggagagttgctttctatatcgtaggtgtgatcagtgttattgttggtgtgctagttagagttttcgccaatgatccacattttgtgaaggatggtgttgatgtttcgaatcaaccaggttcgaggaaacctttttgtacagaggtgaaggatttggtccgggaagctgatactgtcataaagattcggtcttttcagatcattgtagctcanggagtgacaggatcgtttc

SEQ ID NO: 36350 - protein, 240 aa, Arabidopsis thaliana
  peptide (1)..(240): Ceres Seq. ID no. 12395379
  misc_feature (234)..(234): Xaa is any aa, unknown or other
MKAETMTLLLVNLAGIMERADESLLPGVYKEVGLALHTDPTGLGSLTLLRSMVQAACYPLAAYMAIRHNRAHVIALGAFLWSAATFLVAFSSTFFQVAVSRALNGIGLALVAPAIQSLVADSTDDANRGTAFGWLQLTANIGSILGGLCSVLIAPLTFMGIPGWRVAFYIVGVISVIVGVLVRVFANDPHFVKDGVDVSNQPGSRKPFCTEVKDLVREADTVIKIRSFQIIVAXGVTGSF

SEQ ID NO: 36351 - protein, 235 aa, Arabidopsis thaliana
  peptide (1)..(235): Ceres Seq. ID no. 12395380
  misc_feature (229)..(229): Xaa is any aa, unknown or other
MTLLLVNLAGIMERADESLLPGVYKEVGLALHTDPTGLGSLTLLRSMVQAACYPLAAYMAIRHNRAHVIALGAFLWSAATFLVAFSSTFFQVAVSRALNGIGLALVAPAIQSLVADSTDDANRGTAFGWLQLTANIGSILGGLCSVLIAPLTFMGIPGWRVAFYIVGVISVIVGVLVRVFANDPHFVKDGVDVSNQPGSRKPFCTEVKDLVREADTVIKIRSFQIIVAXGVTGSF

SEQ ID NO: 36352 - protein, 224 aa, Arabidopsis thaliana
  peptide (1)..(224): Ceres Seq. ID no. 12395381
  misc_feature (218)..(218): Xaa is any aa, unknown or other
MERADESLLPGVYKEVGLALHTDPTGLGSLTLLRSMVQAACYPLAAYMAIRHNRAHVIALGAFLWSAATFLVAFSSTFFQVAVSRALNGIGLALVAPAIQSLVADSTDDANRGTAFGWLQLTANIGSILGGLCSVLIAPLTFMGIPGWRVAFYIVGVISVIVGVLVRVFANDPHFVKDGVDVSNQPGSRKPFCTEVKDLVREADTVIKIRSFQIIVAXGVTGSF

SEQ ID NO: 36353 - DNA, 1855 bp, Arabidopsis thaliana
  misc_feature (1)..(1855): Ceres Seq. ID no. 13575995
  misc_feature (1)..(1855): Ortholog of  Ceres SEQ ID NO 14313463 as cited in SEQ ID NO 64209
ggaagaacaaacactgaaacaaaagagaaaaatcccaaagctagaaaccctaatcccaaacgaatcaatggagcgagacgaagaagcgagtggaccgatgatggagatgtgcactaacggcggcgaagagacgtctaatcgaagacctatcataagtggcgaaccgctcgacatcgaggcctacgcggctctctacaaaggtcgcacgaagatcatgcggcttctcttcatcgctaaccactgcggaggaaaccacgcgcttcagtttgacgcgttgaggatggcttacgatgagatcaaaaagggtgagaatacgcagttgttcagagaagtggtcaataagattggcaacaggcttggggaaaagtatgggatggatcttgcttggtgtgaggccgtcgatcgtcgtgctgaacagaagaaagtaaagctggagaatgagctcagttcttatcggacaaatttgatcaaggaaagcatcagaatgggttacaatgactttggagatttctattacgcatgtggtatgctcggagatgctttcaagaactatatccgaacacgcgactactgcactacgacaaagcacatcattcacatgtgtatgaatgcgattcttgtcagcatcgaaatgggtcagtttactcatgttacaagctatgtgaacaaggcagagcagaatcctgaaacccttgaacctatggttaatgcaaaactgcgatgtgcatctggattggctcatttggagttgaagaagtacaagctagctgctcgtaagttcttagatgttaacccagaacttggaaattcctataatgaagtcattgctcctcaagatattgccacctatggtggactctgtgccctggcaagctttgatcgatcagaattgaagcaaaaagtcattgacaatatcaacttccggaatttcttggagctagtgcctgatgtgagggaacttatcaacgatttctattcaagccgctatgcttcctgcctggaatatcttgcaagtctcaaatcgaatctgctgctggacatccatcttcatgatcacgttgacacactatatgatcagataaggaagaaggcactgatccagtacacattgccatttgtctctgttgatttgagcaggatggccgatgcattcaagactagcgtctctggtctagagaaagaacttgaagccttgatcacagacaaccagattcaggcaaggattgattcacacaacaaaatcctctatgcaagacacgcggatcagaggaatgcaactttccaaaaggtacttcagatgggaaacgaattcgatagagatgtcagggcgatgctgttaagagccaacctcctgaaacatgagtatcatgccagatcggcaaggaaactttgatgacatctgctttgctaaactgagaggaatattcaagggtgttttttcaagattcgaaccaaacgagaaattgggcaagattacttttttgtaagaaccaagtgtttcaatgagtcgatgacatttagagtaagtaaaggttttattctaagatggacagtccattattaatcaactattgaatgatattgccttttaaatgagtcttaggtagcatcgcaataactccatgtttactcaaaactcacaaaccatgaagttaagaatccgccaaatttggaagatgggccaactctaaatttactcaccccaatactccatttattttgggttgcattgatgaaagtaatttgtataattgataggttgtgtatcaaaaaccggatctcattatttgtgatctttgcattagttatttttggagactaataaccatctttctaaactgtgagtaatacaaat

SEQ ID NO: 36354 - protein, 463 aa, Arabidopsis thaliana
  peptide (1)..(463): Ceres Seq. ID no. 13575996
EEQTLKQKRKIPKLETLIPNESMERDEEASGPMMEMCTNGGEETSNRRPIISGEPLDIEAYAALYKGRTKIMRLLFIANHCGGNHALQFDALRMAYDEIKKGENTQLFREVVNKIGNRLGEKYGMDLAWCEAVDRRAEQKKVKLENELSSYRTNLIKESIRMGYNDFGDFYYACGMLGDAFKNYIRTRDYCTTTKHIIHMCMNAILVSIEMGQFTHVTSYVNKAEQNPETLEPMVNAKLRCASGLAHLELKKYKLAARKFLDVNPELGNSYNEVIAPQDIATYGGLCALASFDRSELKQKVIDNINFRNFLELVPDVRELINDFYSSRYASCLEYLASLKSNLLLDIHLHDHVDTLYDQIRKKALIQYTLPFVSVDLSRMADAFKTSVSGLEKELEALITDNQIQARIDSHNKILYARHADQRNATFQKVLQMGNEFDRDVRAMLLRANLLKHEYHARSARKL

SEQ ID NO: 36355 - protein, 441 aa, Arabidopsis thaliana
  peptide (1)..(441): Ceres Seq. ID no. 13575997
MERDEEASGPMMEMCTNGGEETSNRRPIISGEPLDIEAYAALYKGRTKIMRLLFIANHCGGNHALQFDALRMAYDEIKKGENTQLFREVVNKIGNRLGEKYGMDLAWCEAVDRRAEQKKVKLENELSSYRTNLIKESIRMGYNDFGDFYYACGMLGDAFKNYIRTRDYCTTTKHIIHMCMNAILVSIEMGQFTHVTSYVNKAEQNPETLEPMVNAKLRCASGLAHLELKKYKLAARKFLDVNPELGNSYNEVIAPQDIATYGGLCALASFDRSELKQKVIDNINFRNFLELVPDVRELINDFYSSRYASCLEYLASLKSNLLLDIHLHDHVDTLYDQIRKKALIQYTLPFVSVDLSRMADAFKTSVSGLEKELEALITDNQIQARIDSHNKILYARHADQRNATFQKVLQMGNEFDRDVRAMLLRANLLKHEYHARSARKL

SEQ ID NO: 36356 - protein, 431 aa, Arabidopsis thaliana
  peptide (1)..(431): Ceres Seq. ID no. 13575998
MMEMCTNGGEETSNRRPIISGEPLDIEAYAALYKGRTKIMRLLFIANHCGGNHALQFDALRMAYDEIKKGENTQLFREVVNKIGNRLGEKYGMDLAWCEAVDRRAEQKKVKLENELSSYRTNLIKESIRMGYNDFGDFYYACGMLGDAFKNYIRTRDYCTTTKHIIHMCMNAILVSIEMGQFTHVTSYVNKAEQNPETLEPMVNAKLRCASGLAHLELKKYKLAARKFLDVNPELGNSYNEVIAPQDIATYGGLCALASFDRSELKQKVIDNINFRNFLELVPDVRELINDFYSSRYASCLEYLASLKSNLLLDIHLHDHVDTLYDQIRKKALIQYTLPFVSVDLSRMADAFKTSVSGLEKELEALITDNQIQARIDSHNKILYARHADQRNATFQKVLQMGNEFDRDVRAMLLRANLLKHEYHARSARKL

SEQ ID NO: 36357 - DNA, 1102 bp, Arabidopsis thaliana
  misc_feature (1)..(1102): Ceres Seq. ID no. 13489044
  misc_feature (1)..(1102): Ortholog of  Ceres SEQ ID NO 13592852 as cited in SEQ ID NO 20709
  misc_feature (1)..(1102): Ortholog of  Ceres SEQ ID NO 13532807 as cited in SEQ ID NO 53012
  misc_feature (1)..(1102): Ortholog of  Ceres SEQ ID NO 13663060 as cited in SEQ ID NO 60964
  misc_feature (1)..(1102): Ortholog of  Ceres SEQ ID NO 13598532 as cited in SEQ ID NO 65204
  misc_feature (1)..(1102): Ortholog of  Ceres SEQ ID NO 13656849 as cited in SEQ ID NO 65764
  misc_feature (1)..(1102): Ortholog of  Ceres SEQ ID NO 13500573 as cited in SEQ ID NO 67431
  misc_feature (1)..(1102): Ortholog of  Ceres SEQ ID NO 13656501 as cited in SEQ ID NO 69206
aaaagaagagatggagaaaagggaagatggagggatcttgacatatgatggtagatatgttatgtacaatgtactcggtaacattttcgagctatcttcaaaatacatccctcctattgaacccatcggccgaggtgcttatggtattgtctgctgtgctacaaactcagagacaaatgaagaggttgctataaagaagatagcaaacgcgtttgacaacagagttgatgctaaaagaactctccgagagatcaagctcctttcccacatggatcatgacaatgttatcaaaattaaagatataattgagctaccagagaaagaaaggttcgaagatgtatatattgtttatgagttgatggatacagatttgcaccagatcattagatccactcaaactctaactgatgaccattgtcagtacttcctttaccaaattttgagaggccttaagtacatacactctgcaaatgttcttcaccgcgatctgaaaccgagcaacttggttctgaatacgaactgtgacctgaaaatctgtgattttgggctagcaagaacgtcgaatgagacagagataatgactgagtatgttgtgacgagatggtaccgtgcacctgaattgcttctcaacagctctgaatacacaggagctattgacatttggtctgttggttgcattttcatggagatacttagaagagagacgcttttccctggtaaagattacgttcagcagctgaaacttattactgagctcttagggtcaccagatgactcggatctcgacttcttgagaagcgataatgcgcggaagtacgtaaaacaactcccacatgttcaaaaacaatcattcagagaaaagtttccaaacatttccccaatggctctagatcttgctgaaaagatgctagttttcgatccttcaaagcgcatcacagtggatgaagcattgaagcagccgtacttggcaagtctccatgagatcaacgaagaaccaacatgtcctactcctttcagctttgactttgaggagacagccttagatgaacaagacatcaaggagcttgtctggagagagtctttacacttcaagaatatgtaa

SEQ ID NO: 36358 - protein, 366 aa, Arabidopsis thaliana
  peptide (1)..(366): Ceres Seq. ID no. 13489045
KEEMEKREDGGILTYDGRYVMYNVLGNIFELSSKYIPPIEPIGRGAYGIVCCATNSETNEEVAIKKIANAFDNRVDAKRTLREIKLLSHMDHDNVIKIKDIIELPEKERFEDVYIVYELMDTDLHQIIRSTQTLTDDHCQYFLYQILRGLKYIHSANVLHRDLKPSNLVLNTNCDLKICDFGLARTSNETEIMTEYVVTRWYRAPELLLNSSEYTGAIDIWSVGCIFMEILRRETLFPGKDYVQQLKLITELLGSPDDSDLDFLRSDNARKYVKQLPHVQKQSFREKFPNISPMALDLAEKMLVFDPSKRITVDEALKQPYLASLHEINEEPTCPTPFSFDFEETALDEQDIKELVWRESLHFKNM

SEQ ID NO: 36359 - protein, 363 aa, Arabidopsis thaliana
  peptide (1)..(363): Ceres Seq. ID no. 13489046
MEKREDGGILTYDGRYVMYNVLGNIFELSSKYIPPIEPIGRGAYGIVCCATNSETNEEVAIKKIANAFDNRVDAKRTLREIKLLSHMDHDNVIKIKDIIELPEKERFEDVYIVYELMDTDLHQIIRSTQTLTDDHCQYFLYQILRGLKYIHSANVLHRDLKPSNLVLNTNCDLKICDFGLARTSNETEIMTEYVVTRWYRAPELLLNSSEYTGAIDIWSVGCIFMEILRRETLFPGKDYVQQLKLITELLGSPDDSDLDFLRSDNARKYVKQLPHVQKQSFREKFPNISPMALDLAEKMLVFDPSKRITVDEALKQPYLASLHEINEEPTCPTPFSFDFEETALDEQDIKELVWRESLHFKNM

SEQ ID NO: 36360 - protein, 346 aa, Arabidopsis thaliana
  peptide (1)..(346): Ceres Seq. ID no. 13489047
MYNVLGNIFELSSKYIPPIEPIGRGAYGIVCCATNSETNEEVAIKKIANAFDNRVDAKRTLREIKLLSHMDHDNVIKIKDIIELPEKERFEDVYIVYELMDTDLHQIIRSTQTLTDDHCQYFLYQILRGLKYIHSANVLHRDLKPSNLVLNTNCDLKICDFGLARTSNETEIMTEYVVTRWYRAPELLLNSSEYTGAIDIWSVGCIFMEILRRETLFPGKDYVQQLKLITELLGSPDDSDLDFLRSDNARKYVKQLPHVQKQSFREKFPNISPMALDLAEKMLVFDPSKRITVDEALKQPYLASLHEINEEPTCPTPFSFDFEETALDEQDIKELVWRESLHFKNM

SEQ ID NO: 36361 - DNA, 1481 bp, Arabidopsis thaliana
  misc_feature (1)..(1481): Ceres Seq. ID no. 13646085
  misc_feature (1)..(1481): Ortholog of  Ceres SEQ ID NO 14316017 as cited in SEQ ID NO 67028
  misc_feature (1)..(1481): Ortholog of  Ceres SEQ ID NO 15177500 as cited in SEQ ID NO 0
atctccaccttctatttattccgccaaaagcctttacggttactacaagccatccaacaatgtcttcttcttcttccgtaagaatctctctctccttcattttcttggctctgctaatctcaccggctgtgtcacaaacatgtaagtcacagactttttccggcgataaaacttaccctcactgccttgacctccctcaactcaaagccttccttcattattcctatgatgcctctaacacaactctggccgtcgtcttctctgctccgccggcaaagcctggcggatggatcgcgtgggcgattaatccaaaggctaccggtatggtcggatctcaaacccttgtcgcttacaaggatccaggtaatggtgttgccgtggtgaagacgctaaacattagctcctatagctcgctgattccgtcgaagctggcgtttgatgtttgggatatgaaagccgaggaggcggcgagagatggaggaagtttgagaatctttgctagggttaaggttccggctgatttggtggcaaagggaaaggttaatcaggtttggcaagttggtcctgaattaggtcctggtggaatgattgggaggcacgctttcgactcggcgaatctcgcttctatgagctctcttgatttaaaaggtgacaacagcggtggcacaatctctggaggcgacgaggtaaatgccaagatcaagaacagaaatattcatgggatattaaacgcagtgagttggggaattttgtttccgataggagcaataatagccaggtacatgagagtatttgactcggccgatccggcctggttttacctccacgtttcttgtcaattctctgcttatgtcatcggtgttgccggttgggctaccggacttaagctcggtaacgagtccgagggtattcgcttctccgcccaccgtaacatcggcattgccctcttcacccttgccaccattcagatgtttgcgatgttgttgcggcctaagaaagatcacaagtacagattctattggaatatctaccaccatggagtcggttatgcgatcctcacccttgggatcattaatgtcttcaaaggtctcaacatcttgaaaccacaagacacgtacaagacggcttacattgcagtgattgccgttcttggaggcattgctttgctcttagaagccatcacttgggtcgttgtactcaagagaaaatcaaacaactcaatgaagcctcttaggacctaagccaacaaagatctggtcaacttattaaaggttcatctgcagttgttgttattaatttattatgagctcttgtattattaatgtttatagaacaagggtgtcacatgtattattgttctcttgttttgtagctttttggttttgtttgttgagtatttcttgggttatgaattcttgtaggggatgaatgtttttgaaatagttcttattttactttgaatcaatgagttttttcagttc

SEQ ID NO: 36362 - protein, 412 aa, Arabidopsis thaliana
  peptide (1)..(412): Ceres Seq. ID no. 13646086
LHLLFIPPKAFTVTTSHPTMSSSSSVRISLSFIFLALLISPAVSQTCKSQTFSGDKTYPHCLDLPQLKAFLHYSYDASNTTLAVVFSAPPAKPGGWIAWAINPKATGMVGSQTLVAYKDPGNGVAVVKTLNISSYSSLIPSKLAFDVWDMKAEEAARDGGSLRIFARVKVPADLVAKGKVNQVWQVGPELGPGGMIGRHAFDSANLASMSSLDLKGDNSGGTISGGDEVNAKIKNRNIHGILNAVSWGILFPIGAIIARYMRVFDSADPAWFYLHVSCQFSAYVIGVAGWATGLKLGNESEGIRFSAHRNIGIALFTLATIQMFAMLLRPKKDHKYRFYWNIYHHGVGYAILTLGIINVFKGLNILKPQDTYKTAYIAVIAVLGGIALLLEAITWVVVLKRKSNNSMKPLRT

SEQ ID NO: 36363 - protein, 393 aa, Arabidopsis thaliana
  peptide (1)..(393): Ceres Seq. ID no. 13646087
MSSSSSVRISLSFIFLALLISPAVSQTCKSQTFSGDKTYPHCLDLPQLKAFLHYSYDASNTTLAVVFSAPPAKPGGWIAWAINPKATGMVGSQTLVAYKDPGNGVAVVKTLNISSYSSLIPSKLAFDVWDMKAEEAARDGGSLRIFARVKVPADLVAKGKVNQVWQVGPELGPGGMIGRHAFDSANLASMSSLDLKGDNSGGTISGGDEVNAKIKNRNIHGILNAVSWGILFPIGAIIARYMRVFDSADPAWFYLHVSCQFSAYVIGVAGWATGLKLGNESEGIRFSAHRNIGIALFTLATIQMFAMLLRPKKDHKYRFYWNIYHHGVGYAILTLGIINVFKGLNILKPQDTYKTAYIAVIAVLGGIALLLEAITWVVVLKRKSNNSMKPLRT

SEQ ID NO: 36364 - protein, 305 aa, Arabidopsis thaliana
  peptide (1)..(305): Ceres Seq. ID no. 13646088
MVGSQTLVAYKDPGNGVAVVKTLNISSYSSLIPSKLAFDVWDMKAEEAARDGGSLRIFARVKVPADLVAKGKVNQVWQVGPELGPGGMIGRHAFDSANLASMSSLDLKGDNSGGTISGGDEVNAKIKNRNIHGILNAVSWGILFPIGAIIARYMRVFDSADPAWFYLHVSCQFSAYVIGVAGWATGLKLGNESEGIRFSAHRNIGIALFTLATIQMFAMLLRPKKDHKYRFYWNIYHHGVGYAILTLGIINVFKGLNILKPQDTYKTAYIAVIAVLGGIALLLEAITWVVVLKRKSNNSMKPLRT

SEQ ID NO: 36365 - DNA, 1391 bp, Arabidopsis thaliana
  misc_feature (1)..(1391): Ceres Seq. ID no. 12336525
  misc_feature (1)..(1391): Ortholog of  Ceres SEQ ID NO 15177298 as cited in SEQ ID NO 52711
aggtccgtcgcttctcttccatttcttctcattttcgattttgattcttatttctttccagtagctcctgctctgtgaatttctccgctcacgatagatctgcttatactccttacattcaaccttagatctgaaacatgggtgcaggtggaagaatgccggttcctacttcttccaagaaatcggaaaccgacaccacaaagcgtgtgccgtgcgagaaaccgcctttctcggtgggagatctgaagaaagcaatcccgccgcattgtttcaaacgctcaatccctcgctctttctcctaccttatcagtgacatcattatagcctcatgcttctactacgtcgccaccaattacttctctctcctccctcagcctctctcttacttggcttggccactctattgggcctgtcaaggctgtgtcctaactggtatctgggtcatagcccacgaatgcggtcaccacgcattcagcgactaccaatggctggatgacacagttggtcttatcttccattccttcctcctcgtcccttacttctcctggaagtatagtcatcgccgtcaccattccaacactggatccctcgaaagagatgaagtatttgtcccaaagcagaaatcagcaatcaagtggtacgggaaatacctcaacaaccctcttggacgcatcatgatgttaaccgtccagtttgtcctcgggtggcccttgtacttagcctttaacgtctctggcagaccgtatgacgggttcgcttgccatttcttccccaacgctcccatctacaatgaccgagaacgcctccagatatacctctctgatgcgggtattctagccgtctgttttggtctttaccgttacgctgctgcacaagggatggcctcgatgatctgcctctacggagtaccgcttctgatagtgaatgcgttcctcgtcttgatcacttacttgcagcacactcatccctcgttgcctcactacgattcatcagagtgggactggctcaggggagctttggctaccgtagacagagactacggaatcttgaacaaggtgttccacaacattacagacacacacgtggctcatcacctgttctcgacaatgccgcattataacgcaatggaagctacaaaggcgataaagccaattctggggagaccattaccagttcgatggaacaccgtggtatgtggcgatgtatagggaggcaaaggagtgtatctatgtagaaccggacagggaaggtgacaagaaaggtgtgtactggtacaacaataagttatgaggatgatggtgaagaaattgtcgacttttctcttgtctgtttgtcttttgttaaagaagctatgcttcgttttaataatcttattgtccattttgttgtgc

SEQ ID NO: 36366 - protein, 356 aa, Arabidopsis thaliana
  peptide (1)..(356): Ceres Seq. ID no. 12336526
MGAGGRMPVPTSSKKSETDTTKRVPCEKPPFSVGDLKKAIPPHCFKRSIPRSFSYLISDIIIASCFYYVATNYFSLLPQPLSYLAWPLYWACQGCVLTGIWVIAHECGHHAFSDYQWLDDTVGLIFHSFLLVPYFSWKYSHRRHHSNTGSLERDEVFVPKQKSAIKWYGKYLNNPLGRIMMLTVQFVLGWPLYLAFNVSGRPYDGFACHFFPNAPIYNDRERLQIYLSDAGILAVCFGLYRYAAAQGMASMICLYGVPLLIVNAFLVLITYLQHTHPSLPHYDSSEWDWLRGALATVDRDYGILNKVFHNITDTHVAHHLFSTMPHYNAMEATKAIKPILGRPLPVRWNTVVCGDV

SEQ ID NO: 36367 - protein, 350 aa, Arabidopsis thaliana
  peptide (1)..(350): Ceres Seq. ID no. 12336527
MPVPTSSKKSETDTTKRVPCEKPPFSVGDLKKAIPPHCFKRSIPRSFSYLISDIIIASCFYYVATNYFSLLPQPLSYLAWPLYWACQGCVLTGIWVIAHECGHHAFSDYQWLDDTVGLIFHSFLLVPYFSWKYSHRRHHSNTGSLERDEVFVPKQKSAIKWYGKYLNNPLGRIMMLTVQFVLGWPLYLAFNVSGRPYDGFACHFFPNAPIYNDRERLQIYLSDAGILAVCFGLYRYAAAQGMASMICLYGVPLLIVNAFLVLITYLQHTHPSLPHYDSSEWDWLRGALATVDRDYGILNKVFHNITDTHVAHHLFSTMPHYNAMEATKAIKPILGRPLPVRWNTVVCGDV

SEQ ID NO: 36368 - DNA, 1053 bp, Arabidopsis thaliana
  misc_feature (1)..(1053): Ceres Seq. ID no. 13580576
  misc_feature (1)..(1053): Ortholog of  Ceres SEQ ID NO 13599102 as cited in SEQ ID NO 1347
  misc_feature (1)..(1053): Ortholog of  Ceres SEQ ID NO 15176238 as cited in SEQ ID NO 55058
  misc_feature (1)..(1053): Ortholog of  Ceres SEQ ID NO 13598630 as cited in SEQ ID NO 65440
aaaagaggaccaaaaggtcaaaaacgaataaactgtatctctcattcgccggagtttccagccgtttctttccgattctcggatttttcctgggaatcaaacgcatcgccgagaatcggaagagagggataaggttatggctcctcatggagatggattaagtgacatcgaagaacctgaggtcgatgctcaatcggagattcttcgaccgatctcctcagtcgtcttcgtcatcgctatgcaagcggaggctcttcctttggtcaacaagttcggactctctgaaactactgattcgccgcttggtaaaggattgccctgggttctgtatcacggcgtgcataaagatcttcgaatcaatgtagtttgccccggaagagatgcagctttagggatcgatagtgttggaactgttccagcttctctcataacttttgcttccatccaagcattaaaacctgacatcataatcaatgccggaacctgcggtggcttcaaggtcaaaggagccaacataggcgatgtattccttgtatctgatgttgtgtttcatgatagaagaataccaattccgatgtttgatctgtatggagttggtctccgtcaggcattctcgacacccaatctcctcaaggaactcaatttgaagattggcaggttatctactggtgactcgttggatatgtccacgcaagatgaaacattgatcattgccaatgatgctacgctaaaggacatggagggtgctgccgtggcgtatgtggctgatcttctgaaaataccagtcgtgttcctcaaagccgtgaccgatctagtggacggagataaacctacagcagaagagttcttgcagaacttgacagttgtgaccgctgcattagagggaactgctactaaagtgatcaacttcatcaatgggagaaacctttcggacctttaacttctgttctcttccttttttatggagagtgattttttaaaatgcgttcaacgtgcttgttgcagtttcactgatttccagtgatcatatttctcgttaataaatttcaagtt

SEQ ID NO: 36369 - protein, 267 aa, Arabidopsis thaliana
  peptide (1)..(267): Ceres Seq. ID no. 13580577
MAPHGDGLSDIEEPEVDAQSEILRPISSVVFVIAMQAEALPLVNKFGLSETTDSPLGKGLPWVLYHGVHKDLRINVVCPGRDAALGIDSVGTVPASLITFASIQALKPDIIINAGTCGGFKVKGANIGDVFLVSDVVFHDRRIPIPMFDLYGVGLRQAFSTPNLLKELNLKIGRLSTGDSLDMSTQDETLIIANDATLKDMEGAAVAYVADLLKIPVVFLKAVTDLVDGDKPTAEEFLQNLTVVTAALEGTATKVINFINGRNLSDL

SEQ ID NO: 36370 - protein, 233 aa, Arabidopsis thaliana
  peptide (1)..(233): Ceres Seq. ID no. 13580578
MQAEALPLVNKFGLSETTDSPLGKGLPWVLYHGVHKDLRINVVCPGRDAALGIDSVGTVPASLITFASIQALKPDIIINAGTCGGFKVKGANIGDVFLVSDVVFHDRRIPIPMFDLYGVGLRQAFSTPNLLKELNLKIGRLSTGDSLDMSTQDETLIIANDATLKDMEGAAVAYVADLLKIPVVFLKAVTDLVDGDKPTAEEFLQNLTVVTAALEGTATKVINFINGRNLSDL

SEQ ID NO: 36371 - DNA, 1160 bp, Arabidopsis thaliana
  misc_feature (1)..(1160): Ceres Seq. ID no. 13509186
  misc_feature (1)..(1160): Ortholog of  Ceres SEQ ID NO 13594252 as cited in SEQ ID NO 57528
  misc_feature (1)..(1160): Ortholog of  Ceres SEQ ID NO 14305682 as cited in SEQ ID NO 59267
  misc_feature (1)..(1160): Ortholog of  Ceres SEQ ID NO 13594430 as cited in SEQ ID NO 60181
  misc_feature (1)..(1160): Ortholog of  Ceres SEQ ID NO 13597809 as cited in SEQ ID NO 64598
  misc_feature (1)..(1160): Ortholog of  Ceres SEQ ID NO 14313544 as cited in SEQ ID NO 68424
  misc_feature (1)..(1160): Ortholog of  Ceres SEQ ID NO 12617960 as cited in SEQ ID NO 69051
  misc_feature (1)..(1160): Ortholog of  Ceres SEQ ID NO 13589401 as cited in SEQ ID NO 0
aaaaactttgggaagcagctaaaatactgtgttctttatttcttccatcgaaatcgaaaaaagctaagatctttgcgttttgaaacgatggcggaagaacataagcatgatgaatctgtgatcgctcctgagccagctgttgaggttgtggagagagaatcgttgatggataagaagaagaagactaagaagccctcttctccttcgtcttctatgaaatcgaaagtttaccgcttgttcggacgagagcagcctgttcataaggttctcggcggtggaaagccggctgatatattcatgtggaagaacaagaagatgtctggtggtgtacttggtggtgctacagctgctttggttgtgtttgaattgatggagtaccatcttctcactctgctttgccacgtgatgattgttgttctcgctgtgctgtttttgtggtctaatgccgctatgttcattaacaagtccccaccaaagattcctgaagttcatatccctgaagaacctattcttcagcttgcgtctgggctcagaatcgagatcaaccgtggattctcttctctccgtgaaattgcatcaggaagggatctcaagaaattcctcattgctattgccgggttatgggttctctcaatcttgggcggttgcttcaacttcttgacattggcatacatagctcttgtgttgctcttcacggttcctcttgcctacgacaagtatgaagacaaagtcgacccattaggtgagaaagcaatgatcgagctcaagaagcagtatgcagtgttggatgagaaggtgttgagcaagatcccacttgggccgttgaagaacaagaagaaagattaggggtttacacaaggttgtccgtggctagcaaaacgggtgttgtgaaatggtatcgaagtaatgtgttttgggcgtttttttaggtggctctttcggttatgtgaatgaacttggaattttcctgactggtttgttctgttgtttatgtcattgttgatcagcgtcgagggataaaagtagtgatatttcttctctctctaagcctctatataactaagaatttcaagatatttgaattttgcaatctcgtggttaatgttgttctttctctatattctcctctttcattacatttgtaaaatggaatcaatgtc

SEQ ID NO: 36372 - protein, 281 aa, Arabidopsis thaliana
  peptide (1)..(281): Ceres Seq. ID no. 13509187
KNFGKQLKYCVLYFFHRNRKKLRSLRFETMAEEHKHDESVIAPEPAVEVVERESLMDKKKKTKKPSSPSSSMKSKVYRLFGREQPVHKVLGGGKPADIFMWKNKKMSGGVLGGATAALVVFELMEYHLLTLLCHVMIVVLAVLFLWSNAAMFINKSPPKIPEVHIPEEPILQLASGLRIEINRGFSSLREIASGRDLKKFLIAIAGLWVLSILGGCFNFLTLAYIALVLLFTVPLAYDKYEDKVDPLGEKAMIELKKQYAVLDEKVLSKIPLGPLKNKKKD

SEQ ID NO: 36373 - protein, 252 aa, Arabidopsis thaliana
  peptide (1)..(252): Ceres Seq. ID no. 13509188
MAEEHKHDESVIAPEPAVEVVERESLMDKKKKTKKPSSPSSSMKSKVYRLFGREQPVHKVLGGGKPADIFMWKNKKMSGGVLGGATAALVVFELMEYHLLTLLCHVMIVVLAVLFLWSNAAMFINKSPPKIPEVHIPEEPILQLASGLRIEINRGFSSLREIASGRDLKKFLIAIAGLWVLSILGGCFNFLTLAYIALVLLFTVPLAYDKYEDKVDPLGEKAMIELKKQYAVLDEKVLSKIPLGPLKNKKKD

SEQ ID NO: 36374 - protein, 226 aa, Arabidopsis thaliana
  peptide (1)..(226): Ceres Seq. ID no. 13509189
MDKKKKTKKPSSPSSSMKSKVYRLFGREQPVHKVLGGGKPADIFMWKNKKMSGGVLGGATAALVVFELMEYHLLTLLCHVMIVVLAVLFLWSNAAMFINKSPPKIPEVHIPEEPILQLASGLRIEINRGFSSLREIASGRDLKKFLIAIAGLWVLSILGGCFNFLTLAYIALVLLFTVPLAYDKYEDKVDPLGEKAMIELKKQYAVLDEKVLSKIPLGPLKNKKKD

SEQ ID NO: 36375 - DNA, 892 bp, Arabidopsis thaliana
  misc_feature (1)..(892): Ceres Seq. ID no. 12558745
  misc_feature (1)..(892): Ortholog of  Ceres SEQ ID NO 15173410 as cited in SEQ ID NO 61812
actatactcaaaacacataaactcatcttcaaaactcaatggccaccactcctctcctcctccttctcctcaccgccgtcttcctctccacggagataaccgctcaacgcgctgctccggctcctggcccggctggtcccatcaacatcacggcaatcctcgaaaaaggcggacaatttgttactcttatccgtcttttaaacacaactcaaataggaaaccagataaacatccaaatcaacagttcatcagaaggcatgaccgtgttagcaccaacagacaacgctttccaaaaccttaaacccggaaccctaaacaaactaagcccggacgaccaagtcaaactcattctttaccatgtcagtcccaaattctacacattggaagatcttctctctgtaagtaacccggtcagaactcaggcttcaggtcgagacgttggtggggtttacggacttaacttcaccggtcaagggaatcaagtcaatgtatctactggtgtcgttgagacacgtctcagtacttcattgagacaagaacgtcctcttgcggtttacgtggtggacatggtattgttgccggaagagatgtttggagaacgtaagatctcaccgatggcgcctccaccaaaatcaaaatctcctgatgtctcagatgattcagagtcctctaagaaagcggctgctccgtcagagtcagagaagtctggctccggtgagatgaatactggattagggcttggtcttggacttgttgtgttgtgtttgaaattcctcctttgagtttgtttatatatattgatttaattgtgcgggttgtaataagaaatttctatatgtttattatgatgcatgatttgaaaactgaaataagagattattatttcgtgtgc

SEQ ID NO: 36376 - protein, 247 aa, Arabidopsis thaliana
  peptide (1)..(247): Ceres Seq. ID no. 12558746
MATTPLLLLLLTAVFLSTEITAQRAAPAPGPAGPINITAILEKGGQFVTLIRLLNTTQIGNQINIQINSSSEGMTVLAPTDNAFQNLKPGTLNKLSPDDQVKLILYHVSPKFYTLEDLLSVSNPVRTQASGRDVGGVYGLNFTGQGNQVNVSTGVVETRLSTSLRQERPLAVYVVDMVLLPEEMFGERKISPMAPPPKSKSPDVSDDSESSKKAAAPSESEKSGSGEMNTGLGLGLGLVVLCLKFLL

SEQ ID NO: 36377 - protein, 174 aa, Arabidopsis thaliana
  peptide (1)..(174): Ceres Seq. ID no. 12558747
MTVLAPTDNAFQNLKPGTLNKLSPDDQVKLILYHVSPKFYTLEDLLSVSNPVRTQASGRDVGGVYGLNFTGQGNQVNVSTGVVETRLSTSLRQERPLAVYVVDMVLLPEEMFGERKISPMAPPPKSKSPDVSDDSESSKKAAAPSESEKSGSGEMNTGLGLGLGLVVLCLKFLL

SEQ ID NO: 36378 - DNA, 811 bp, Arabidopsis thaliana
  misc_feature (1)..(811): Ceres Seq. ID no. 12579903
  misc_feature (1)..(811): Ortholog of  Ceres SEQ ID NO 12626028 as cited in SEQ ID NO 69063
accaacataaactaaacttcactgacattaaaaaaaattcaaaacctttcaaaaaaaccaaaacatcaacaatgttcggcgtcgtcttccccaatcgaagtttccctatagacatctcaaccttcactcaaatcgacacattccactgggttctcgacatgaaccacttcgtcggtgaagcttatgatcaaatctcagagatgtgtatcttcttgttaaacaatttcaatcttccaccagataaagctttagctgtttatgttcaatctccaggatcagcttttgtgttctgtggtgctgtaactttagctagaccatctgctgttttatcactccaatggcctgaacctggtagtgctgcaaagatgcaactcacggcgggtgattcgagttccttatcggcgaagatcggtgtttcggtggaggatgtagcaacgttgaggtcgttggatgttgttgcggagaggaggattgagaaattggctatgaaagttggagagaatttgtttaactttatgcagtctttttgtggtgttgatggaagtaaattggttgttcctatggatattttggatcgttggtttaagaagtttcaggagaaagctaaacgtgatcctgatttcctcaaaagctttgctttgtaaggttagcgtttttgtaaaatttgatcttgtggttctatgtgatgaattgaacaagagattgtagttttactttgtttgtcaatgtttattaactagttgatcatactctgcttttaagcaatttaaagtgttgaactttaaaaaaaaaaaaaaacttgagtcctgtg

SEQ ID NO: 36379 - protein, 213 aa, Arabidopsis thaliana
  peptide (1)..(213): Ceres Seq. ID no. 12579904
QHKLNFTDIKKNSKPFKKTKTSTMFGVVFPNRSFPIDISTFTQIDTFHWVLDMNHFVGEAYDQISEMCIFLLNNFNLPPDKALAVYVQSPGSAFVFCGAVTLARPSAVLSLQWPEPGSAAKMQLTAGDSSSLSAKIGVSVEDVATLRSLDVVAERRIEKLAMKVGENLFNFMQSFCGVDGSKLVVPMDILDRWFKKFQEKAKRDPDFLKSFAL

SEQ ID NO: 36380 - protein, 190 aa, Arabidopsis thaliana
  peptide (1)..(190): Ceres Seq. ID no. 12579905
MFGVVFPNRSFPIDISTFTQIDTFHWVLDMNHFVGEAYDQISEMCIFLLNNFNLPPDKALAVYVQSPGSAFVFCGAVTLARPSAVLSLQWPEPGSAAKMQLTAGDSSSLSAKIGVSVEDVATLRSLDVVAERRIEKLAMKVGENLFNFMQSFCGVDGSKLVVPMDILDRWFKKFQEKAKRDPDFLKSFAL

SEQ ID NO: 36381 - protein, 161 aa, Arabidopsis thaliana
  peptide (1)..(161): Ceres Seq. ID no. 12579906
MNHFVGEAYDQISEMCIFLLNNFNLPPDKALAVYVQSPGSAFVFCGAVTLARPSAVLSLQWPEPGSAAKMQLTAGDSSSLSAKIGVSVEDVATLRSLDVVAERRIEKLAMKVGENLFNFMQSFCGVDGSKLVVPMDILDRWFKKFQEKAKRDPDFLKSFAL

SEQ ID NO: 36382 - DNA, 1245 bp, Arabidopsis thaliana
  misc_feature (1)..(1245): Ceres Seq. ID no. 12600816
  misc_feature (1)..(1245): Ortholog of  Ceres SEQ ID NO 12608620 as cited in SEQ ID NO 60192
  misc_feature (1)..(1245): Ortholog of  Ceres SEQ ID NO 13662898 as cited in SEQ ID NO 66199
  misc_feature (1)..(1245): Ortholog of  Ceres SEQ ID NO 14313358 as cited in SEQ ID NO 67347
  misc_feature (1)..(1245): Ortholog of  Ceres SEQ ID NO 13654314 as cited in SEQ ID NO 67914
gtcgtgccattagcctttgatttcagaaaaaacacttacaaagctgatatctttcttactacttcgaagaaatcttcttctcccttccaaaaaaacaatccctaaacccggaaccaaagatcgacattcatggctctcttcgacactcataacacatgggcctttgttttcggcttgctcggaaacctcatttcctttgctgttttcctctctcccgtgccaacgttctataggatttgtaagaagaaaaccacagaaggatttcaatctattccctatgtggtggcgctcttcagcgcgatgctttggctctactacgctactcagaagaaagatgtcttccttctcgtcaccatcaacagctttggttgcttcattgaaaccatatacatctccatctttgttgccttcgcatccaagaaagcccgaatgctaacggtgaagctcttgttgctaatgaactttggagggttctgtttgattctcctcctctgccaattcttggcaaaaggaaccacacgtgcgaagatcattggaggtatctgtgtcggattctctgtctgcgtttttgctgcgccgcttagcattatcagaacggtgataaagacgaaaagtgtggagtacatgccgtttagcttatccttgactcttaccatcagtgcggtcatatggctcctttatggtcttgctcttaaggatatctatgttgccttcccaaacgtgattgggtttgttctaggtgcacttcaaatgatactctatgtggtttacaaatactgcaaaacgccgtcggatttggttgagaaagaacttgaggctgcgaaattgccagaagtgagcatcgatatggtgaagttaggtacactcacatctcctgaaccagtagcgatcaccgtcgtccgatcggtgaacacatgtaactgtaacgatcgaaatgctgagattgaaaatggtcagggagttagaaacagtgctgcaactacttgagtttgcccaagaaaccctaataagaaacctatttgttgactattttgactttgtacccttcttgatatacctatcaatcaccattgtccacgtgtactagtttcgttgtagtaattttcaaagtttatcgaagtatgcgtattcgaggattaattaaatcgggaattacattttcctgagttaattttttctctttttcttttacttatgggacaatgtaatgaaactatctgttgcatataaatattttccaagttg

SEQ ID NO: 36383 - protein, 285 aa, Arabidopsis thaliana
  peptide (1)..(285): Ceres Seq. ID no. 12600817
MALFDTHNTWAFVFGLLGNLISFAVFLSPVPTFYRICKKKTTEGFQSIPYVVALFSAMLWLYYATQKKDVFLLVTINSFGCFIETIYISIFVAFASKKARMLTVKLLLLMNFGGFCLILLLCQFLAKGTTRAKIIGGICVGFSVCVFAAPLSIIRTVIKTKSVEYMPFSLSLTLTISAVIWLLYGLALKDIYVAFPNVIGFVLGALQMILYVVYKYCKTPSDLVEKELEAAKLPEVSIDMVKLGTLTSPEPVAITVVRSVNTCNCNDRNAEIENGQGVRNSAATT

SEQ ID NO: 36384 - protein, 228 aa, Arabidopsis thaliana
  peptide (1)..(228): Ceres Seq. ID no. 12600818
MLWLYYATQKKDVFLLVTINSFGCFIETIYISIFVAFASKKARMLTVKLLLLMNFGGFCLILLLCQFLAKGTTRAKIIGGICVGFSVCVFAAPLSIIRTVIKTKSVEYMPFSLSLTLTISAVIWLLYGLALKDIYVAFPNVIGFVLGALQMILYVVYKYCKTPSDLVEKELEAAKLPEVSIDMVKLGTLTSPEPVAITVVRSVNTCNCNDRNAEIENGQGVRNSAATT

SEQ ID NO: 36385 - protein, 185 aa, Arabidopsis thaliana
  peptide (1)..(185): Ceres Seq. ID no. 12600819
MLTVKLLLLMNFGGFCLILLLCQFLAKGTTRAKIIGGICVGFSVCVFAAPLSIIRTVIKTKSVEYMPFSLSLTLTISAVIWLLYGLALKDIYVAFPNVIGFVLGALQMILYVVYKYCKTPSDLVEKELEAAKLPEVSIDMVKLGTLTSPEPVAITVVRSVNTCNCNDRNAEIENGQGVRNSAATT

SEQ ID NO: 36386 - DNA, 1060 bp, Arabidopsis thaliana
  misc_feature (1)..(1060): Ceres Seq. ID no. 12330580
  misc_feature (1)..(1060): Ortholog of  Ceres SEQ ID NO 13594548 as cited in SEQ ID NO 51267
  misc_feature (1)..(1060): Ortholog of  Ceres SEQ ID NO 12614847 as cited in SEQ ID NO 61970
cataaacatcaaatggttctaattggtctttgatcttaaacccatttgattatggtatctaaagtttgatccttttgatgcactctcatcgcagtttctcgtgattttaatattattgaactcttttgatttgtggtgaagcaaaccttctctgtcacaactagctccattagaagccattctgtttgatgttgatggaacactctgtgactcagatcccatccaccttattgccttccaagaactgcttcaagagattggttttaacaatggggtcccaatcgatgagaaattctttgttgagaacattgctggaaaacacaattctgaaattgctctacttctgttccctgatgatgtttcaagagggttaaaattctgtgatgaaaaggaagctctttaccgcaaaattgttgcagagaagataaagccacttgatgggcttataaaactgaccaaatggatcgaagatcgtggattgaaacgagctgcggtaacaaacgctccaaaagaaaacgcagagctcatgatatcgaaacttggtctgactgatttctttcaagcagtgattcttggctctgaatgtgaatttcccaaaccacaccctggaccttacttgaaggctcttgaagtgcttaacgtgtcaaaggagcacacgctagttttcgaagactcgatctctgggataaaagctggagttgcagctggaatgccagtgattggactgactacagggaatccagcaagcctgcttatgcaagcaaaacccgcttttctcatcgagaactatgcggatccaaaactgtgggctgtgttggaagaacttgataacaagtcttaagtctcacttgtttggcttatggaaacccacacatgcatgagcagcctctgaagtttaccttatgtcttagatgatcattgttgaataattcattgggagtttatgacaatgggagctttcaaatatctgattattttgtattgatacatgcacaatgctagatttgtatccaggagatagttgcataaaccaatatactataccctcggatcttagctc

SEQ ID NO: 36387 - protein, 104 aa, Arabidopsis thaliana
  peptide (1)..(104): Ceres Seq. ID no. 12330581
MISKLGLTDFFQAVILGSECEFPKPHPGPYLKALEVLNVSKEHTLVFEDSISGIKAGVAAGMPVIGLTTGNPASLLMQAKPAFLIENYADPKLWAVLEELDNKS

SEQ ID NO: 36388 - protein, 61 aa, Arabidopsis thaliana
  peptide (1)..(61): Ceres Seq. ID no. 12330582
MLMEHSVTQIPSTLLPSKNCFKRLVLTMGSQSMRNSLLRTLLENTILKLLYFCSLMMFQEG

SEQ ID NO: 36389 - protein, 59 aa, Arabidopsis thaliana
  peptide (1)..(59): Ceres Seq. ID no. 12330583
MEHSVTQIPSTLLPSKNCFKRLVLTMGSQSMRNSLLRTLLENTILKLLYFCSLMMFQEG

SEQ ID NO: 36390 - DNA, 1538 bp, Arabidopsis thaliana; identical to SEQ ID NO: 29845
  misc_feature (1)..(1538): Ceres Seq. ID no. 12580443
  misc_feature (1)..(1538): Ortholog of  Ceres SEQ ID NO 14314567 as cited in SEQ ID NO 52335
  misc_feature (1)..(1538): Ortholog of  Ceres SEQ ID NO 14308803 as cited in SEQ ID NO 55038
  misc_feature (1)..(1538): Ortholog of  Ceres SEQ ID NO 13595437 as cited in SEQ ID NO 56562
  misc_feature (1)..(1538): Ortholog of  Ceres SEQ ID NO 14315985 as cited in SEQ ID NO 57720

SEQ ID NO: 36391 - protein, 356 aa, Arabidopsis thaliana; identical to SEQ ID NO: 29846
  peptide (1)..(356): Ceres Seq. ID no. 12580444

SEQ ID NO: 36392 - protein, 352 aa, Arabidopsis thaliana; identical to SEQ ID NO: 29847
  peptide (1)..(352): Ceres Seq. ID no. 12580445

SEQ ID NO: 36393 - protein, 277 aa, Arabidopsis thaliana; identical to SEQ ID NO: 29848
  peptide (1)..(277): Ceres Seq. ID no. 12580446

SEQ ID NO: 36394 - DNA, 1296 bp, Arabidopsis thaliana
  misc_feature (1)..(1296): Ceres Seq. ID no. 13489389
  misc_feature (1)..(1296): Ortholog of  Ceres SEQ ID NO 15169248 as cited in SEQ ID NO 55022
  misc_feature (1)..(1296): Ortholog of  Ceres SEQ ID NO 14315042 as cited in SEQ ID NO 56959
  misc_feature (1)..(1296): Ortholog of  Ceres SEQ ID NO 12608620 as cited in SEQ ID NO 60192
  misc_feature (1)..(1296): Ortholog of  Ceres SEQ ID NO 15173077 as cited in SEQ ID NO 64566
  misc_feature (1)..(1296): Ortholog of  Ceres SEQ ID NO 13662898 as cited in SEQ ID NO 66199
aaaataaaagtttctataagaagaaatctcgtctctgtttaattctctctttaacgttttgatccgtttccataagaacataacagagcaagaaaaaaaagaaagcacaagctttgttgttctgaagagaaaacaaacaaaacagagagtttaagacagagagaagctcatggatgtttttgctttcaatgcttctttatccatgtgtaaagatgttgccggaatcgcaggcaacatatttgcatttggactcttcgtttcaccaatgccaacgtttaggaggatcatgaggaacaaatcgacggagcaattctccggtttaccatacatttacgctctcttaaactgcttgatctgcctttggtatggcacacctttcatatcacacagcaatgccatgcttatgactgtgaattccgttggagctacgtttcagctttgctacattatcctcttcatcatgcatacagacaagaagaacaagatgaagatgcttggtttgctttttgtggtgtttgctgtggttggagtgattgtagctggaagtttgcagatacctgaccagctcacacggtggtactttgtcgggttcttgagctgcggttctcttgtttcaatgtttgcctcgccgttgtttgttattaacctagtgattcggactaagagcgttgagtttatgccgttttatctctcgctatcgactttcttgatgagtgcttccttccttctttacgggttattcaacagcgatgcctttgtttatacaccaaatggaataggaacgattcttggcattgtgcagctggctttgtactgttactaccacaggaattctatagaagaagaaacaaaagagcctttgattgtttcttacgtgtgaggttcgcgcaaagaagcaaatttatagtggggaaattaaaagaaaccagaaaatgtggtgacatcaagattctttgttgttgttgttattgttgtctactctgtgtagctcattgtgactatctaccggctttcattctctcatggcgtgaagatgtttattctctctgcttctgtcatgatcgaaggatggaagtctttttcagttttgatggctcaattgctgaagattatgtgaagacacatgacagattcactggtgtacgtgggttttgtttttttgtggtggaaatctcatggtgggtcgataacgtttgtccatatattgtttgttttttttgaagattactctatttttttgttcataagattttttttctttgatatggaaatctctggtgggttgatttgaagacc

SEQ ID NO: 36395 - protein, 236 aa, Arabidopsis thaliana
  peptide (1)..(236): Ceres Seq. ID no. 13489390
MDVFAFNASLSMCKDVAGIAGNIFAFGLFVSPMPTFRRIMRNKSTEQFSGLPYIYALLNCLICLWYGTPFISHSNAMLMTVNSVGATFQLCYIILFIMHTDKKNKMKMLGLLFVVFAVVGVIVAGSLQIPDQLTRWYFVGFLSCGSLVSMFASPLFVINLVIRTKSVEFMPFYLSLSTFLMSASFLLYGLFNSDAFVYTPNGIGTILGIVQLALYCYYHRNSIEEETKEPLIVSYV

SEQ ID NO: 36396 - protein, 225 aa, Arabidopsis thaliana
  peptide (1)..(225): Ceres Seq. ID no. 13489391
MCKDVAGIAGNIFAFGLFVSPMPTFRRIMRNKSTEQFSGLPYIYALLNCLICLWYGTPFISHSNAMLMTVNSVGATFQLCYIILFIMHTDKKNKMKMLGLLFVVFAVVGVIVAGSLQIPDQLTRWYFVGFLSCGSLVSMFASPLFVINLVIRTKSVEFMPFYLSLSTFLMSASFLLYGLFNSDAFVYTPNGIGTILGIVQLALYCYYHRNSIEEETKEPLIVSYV

SEQ ID NO: 36397 - protein, 204 aa, Arabidopsis thaliana
  peptide (1)..(204): Ceres Seq. ID no. 13489392
MPTFRRIMRNKSTEQFSGLPYIYALLNCLICLWYGTPFISHSNAMLMTVNSVGATFQLCYIILFIMHTDKKNKMKMLGLLFVVFAVVGVIVAGSLQIPDQLTRWYFVGFLSCGSLVSMFASPLFVINLVIRTKSVEFMPFYLSLSTFLMSASFLLYGLFNSDAFVYTPNGIGTILGIVQLALYCYYHRNSIEEETKEPLIVSYV

SEQ ID NO: 36398 - DNA, 1379 bp, Arabidopsis thaliana
  misc_feature (1)..(1379): Ceres Seq. ID no. 12339588
  misc_feature (1)..(1379): Ortholog of  Ceres SEQ ID NO 13639645 as cited in SEQ ID NO 57488
aaattcccagacgtggtggagtgaacaaccaaaaaaacaacatgattgattgattctgaaattcactttaattttcaagagagagtttctgaggatcttgatatcagaatctgtcatgagagaagcaggagaagagaaagtggcgtggaagtactttaccagagatgttgtgccgtttgctgcgatgtttgcggtggagtgtgccactgttgggtcaaacacgctgtttaaggctgctactttaagaggattgagcttctatgtctttgtcttctactcttatattgtttcaacacttctccttcttccactttctgtaatctttggaaggtcaagaagattaccagcagctaagtctcctcttttcttcaagattttcttacttgggcttgttggattgctggttgtaaaggtattgcatacagttccccaactcttgcatctgctatcagcaatctcacaccggctttcacattcacactcgctgttatcttcaggatggagcaagtaaggttaaggagctctgcgactcaggctaaaatcattggtgcaatactatctatatctggtgctctggtagttgtgctgtataaaggcccacaagttctcgcctctgcatcttttacaactgtattacctaccgttacacttcaccagcatttgacctcaatagagtcaagctggataatcggagggctcttgcttgcttcacagtattttcttatatccgtctgactcgtgtcatggaggtttaccctgaagagataaccgtagtcttcttctacaatttatttgcaacactaatctcagtaccagtatgtctttttgcggagagcaacttgacttcttgggtgcttaaaccagacatttccctcgctgcaatcatatactcgggagtcttcgtttcattattcagcgcgcttacccacacatggggtctgcatctgaagggtccggtatacatatccttgttcaggccattgtctattgcgattgcagtcgccatgggtgctatattcctcggcgatgcacttcaccttgggagtgtcattggatcaatgatattgtgcattggattctacactgtgatttggggcaaagcaagagaggatacaatcaaaactgtagctggttctgagcagtcacctttgctgcttacacatatcatagaagatggagcctttccattaagctaggattgatgcaagtgaaatccttatactatttattaataaatatggatccctaaaagaggtgtaccatatatgtttatatatgtctatagttacatataagatatctgttctttttttcttgttttattttgatgttacatatgaatgagaattatgaatctataagaaatatttggtcctttt

SEQ ID NO: 36399 - protein, 150 aa, Arabidopsis thaliana
  peptide (1)..(150): Ceres Seq. ID no. 12339589
MEVYPEEITVVFFYNLFATLISVPVCLFAESNLTSWVLKPDISLAAIIYSGVFVSLFSALTHTWGLHLKGPVYISLFRPLSIAIAVAMGAIFLGDALHLGSVIGSMILCIGFYTVIWGKAREDTIKTVAGSEQSPLLLTHIIEDGAFPLS

SEQ ID NO: 36400 - protein, 131 aa, Arabidopsis thaliana
  peptide (1)..(131): Ceres Seq. ID no. 12339590
MREAGEEKVAWKYFTRDVVPFAAMFAVECATVGSNTLFKAATLRGLSFYVFVFYSYIVSTLLLLPLSVIFGRSRRLPAAKSPLFFKIFLLGLVGLLVVKVLHTVPQLLHLLSAISHRLSHSHSLLSSGWSK

SEQ ID NO: 36401 - protein, 108 aa, Arabidopsis thaliana
  peptide (1)..(108): Ceres Seq. ID no. 12339591
MFAVECATVGSNTLFKAATLRGLSFYVFVFYSYIVSTLLLLPLSVIFGRSRRLPAAKSPLFFKIFLLGLVGLLVVKVLHTVPQLLHLLSAISHRLSHSHSLLSSGWSK

SEQ ID NO: 36402 - DNA, 1517 bp, Arabidopsis thaliana
  misc_feature (1)..(1517): Ceres Seq. ID no. 12329204
  misc_feature (1)..(1517): Ortholog of  Ceres SEQ ID NO 13597019 as cited in SEQ ID NO 64303
  misc_feature (1)..(1517): Ortholog of  Ceres SEQ ID NO 13654191 as cited in SEQ ID NO 68235
actttttctgaactcagttggtttcgattttcttcggaccttctattgttaaatcagctttataacctcacaagcttctcctctattccatagatcaaaccacaactttgtttgacctttttttgagtacttctcttgtcttttcttcttcaagtttacttagttctttgagaacaaatttctgttgattttttttctttcttgtagagggataattacaagtttaatttccctagagtgtctttaccttttgccttgtctccctctcgagacaaaaagagaaagagaaacactttctgtcctctttttttttcctctctttttctctctcgctggaaaccttttcatattcaagtgtaattttaatatttcaagcaattttctagctaattatggccttggaggctgtagtttacccgcaagatccgttctcctacatctcttgcaaagattttccgttttacgacttatactttcaagaagaagaagatcaagatccacaagatactaagaacaacattaagctagggcaaggacaaggacatggttttgcgagtaataattacaacggtagaaccggagattatagtgatgattataattacaacgaagaggatctccaatggccacgagaccttccttatggatctgccgtcgacaccgagagccagcctccaccgtcggatgtggcggcgggaggagggaggaggaaaaggaggaggacgaggagtagcaagaacaaagaagagatcgagaaccagaggatgactcacatcgccgttgaaagaaatcgccggaaacagatgaacgagtacctcgccgttctccggtctctcatgccaccttattatgctcaaaggggagatcaagcatcgatagtaggcggagccattaactacttaaaggagcttgagcatcatttacaatcaatggaacctccggttaagaccgccacagaagacaccggagccggccacgaccagaccaaaacaacctcggctagttcgtcgggaccattctcggatttctttgcatttcctcagtactcgaaccggcctacctctgcggcggcggctgaggggatggcggagatagaggtaacgatggtagagagccatgcgagtctgaaaatacttgcgaaaaagagaccgagacagcttcttaaactggtctcatcgatacagagcctaaggctcactcttctccatctaaacgtcacaactcgagacgactccgtcctctattccatcagcgtcaaggttgaagaagggagccaattgaatacagtagaagatattgcagcagctgtgaatcaaatcctaaggaggatcgaagaagagtcatcctttagctagtattgttgaattttagttatggcacatttagaggagctctaatttttcatgtgtgatcttttgctctctctttttcatatattaaataatataaatttcctttttctttttgttaacgttaattctaatgcattatatattggagtttttgtgtgattgacc

SEQ ID NO: 36403 - protein, 320 aa, Arabidopsis thaliana
  peptide (1)..(320): Ceres Seq. ID no. 12329205
MALEAVVYPQDPFSYISCKDFPFYDLYFQEEEDQDPQDTKNNIKLGQGQGHGFASNNYNGRTGDYSDDYNYNEEDLQWPRDLPYGSAVDTESQPPPSDVAAGGGRRKRRRTRSSKNKEEIENQRMTHIAVERNRRKQMNEYLAVLRSLMPPYYAQRGDQASIVGGAINYLKELEHHLQSMEPPVKTATEDTGAGHDQTKTTSASSSGPFSDFFAFPQYSNRPTSAAAAEGMAEIEVTMVESHASLKILAKKRPRQLLKLVSSIQSLRLTLLHLNVTTRDDSVLYSISVKVEEGSQLNTVEDIAAAVNQILRRIEEESSFS

SEQ ID NO: 36404 - protein, 196 aa, Arabidopsis thaliana
  peptide (1)..(196): Ceres Seq. ID no. 12329206
MTHIAVERNRRKQMNEYLAVLRSLMPPYYAQRGDQASIVGGAINYLKELEHHLQSMEPPVKTATEDTGAGHDQTKTTSASSSGPFSDFFAFPQYSNRPTSAAAAEGMAEIEVTMVESHASLKILAKKRPRQLLKLVSSIQSLRLTLLHLNVTTRDDSVLYSISVKVEEGSQLNTVEDIAAAVNQILRRIEEESSFS

SEQ ID NO: 36405 - protein, 183 aa, Arabidopsis thaliana
  peptide (1)..(183): Ceres Seq. ID no. 12329207
MNEYLAVLRSLMPPYYAQRGDQASIVGGAINYLKELEHHLQSMEPPVKTATEDTGAGHDQTKTTSASSSGPFSDFFAFPQYSNRPTSAAAAEGMAEIEVTMVESHASLKILAKKRPRQLLKLVSSIQSLRLTLLHLNVTTRDDSVLYSISVKVEEGSQLNTVEDIAAAVNQILRRIEEESSFS

SEQ ID NO: 36406 - DNA, 1753 bp, Arabidopsis thaliana
  misc_feature (1)..(1753): Ceres Seq. ID no. 12394650
  misc_feature (1)..(1753): Ortholog of  Ceres SEQ ID NO 15169326 as cited in SEQ ID NO 53578
aagaaggcctcattgataatttacaatcgagagagagagcgataaagtcaactcgttgactaaaatgaaagatttcccgatagcaatctcccttctgttcgctctactatcgccggttcttctaccttgctccggcgattccaccggcggcgtcgaggatgattctccagcgaccgtatgtatcgtcgggagtgggatcggaggctcatccgtagctcacttcctccgtaactactctgtttccaccggcttaaatcaagccaagatcctgatgtttgagcgtcacgagatagtcggtggacgcatgaggaccgtcactgtcgccggtgatactttcgaagccggcggttcgattctccatccgaagaactaccacgttaaggatttcgtcgaaaggttcaatctgacggttcgattaccgacgccgattgaagaatcttcagcgattggaatctgggatgggaagagatttgtcgtcaagacattcggttccggtaccaaatttccgtttttggatacgatcgtctcttgggtgaatgatctctacttgttcttacgttatgggttatcactgctgagaatgagcagcttcattgagaatacagttgataatttcttgaagtactatgaaagcttagagtcaagacctatcttcgacaatgttgaagggatgcttaaatggtcaggcttgtacaatctcacaaagctcactctacaggagaaattatctgaagctcagctttctcctttgttagtcaacgagctggttacggttattacaaggataaactatggacagagtgtactcatcagtgggttggcaggtgctgtctctttggcgggttcaggtggaggattatggtctgttgaaggtggaaactggcagatggctgcaaagctcattaatcattcagatgttacgttacacctgaacgagaaaattgaatccatttcatatctcgaaaaccattacgagcttaaatccactaaaggaaacagctacaagtgtgatgtcacagtagttgccacaccattagacgaagtggatattcagttctcacccacgatctcaattcctaagagagaactacaacacacgcacacgacatttgtgagggggcttttaaacccaggatactttgggatgaaatcgctttcagatgttccagctttggtgggaacccttgaagatcctctaattccattctcatgcatctcaattctaaggaaatatagtaaaacagatatgacatacaagatttttacgcgacaacctgcatcagattcgttgcttgatgagctcttcagtaggagaaccgaaaccgttcgaatagactggggtgcatacccaaagtaccacgcgcctgaagttttcgcaccattcatattagatgaccatcacttgtactatgtgaatgcttttgaaaacgcggcaagcacaatggagacaagtgcagtggctggtgagaacattgccagactcataatttccagattcatgacaaaggaatcattatcttcctcggacaaaagaagctgtagttctggtctgcactcagactcataaacaactttggtccccacataaacaaggactattggctgtgtgtgttttgaagaagaatatgatgtttatgtatatagacacataaaacagttttgagttactgattgtgtttgttcctcgtaacctaagcttcttcttttttttaatctttttcgagttcttgaatcagaccattggcattagcat

SEQ ID NO: 36407 - protein, 500 aa, Arabidopsis thaliana
  peptide (1)..(500): Ceres Seq. ID no. 12394651
MKDFPIAISLLFALLSPVLLPCSGDSTGGVEDDSPATVCIVGSGIGGSSVAHFLRNYSVSTGLNQAKILMFERHEIVGGRMRTVTVAGDTFEAGGSILHPKNYHVKDFVERFNLTVRLPTPIEESSAIGIWDGKRFVVKTFGSGTKFPFLDTIVSWVNDLYLFLRYGLSLLRMSSFIENTVDNFLKYYESLESRPIFDNVEGMLKWSGLYNLTKLTLQEKLSEAQLSPLLVNELVTVITRINYGQSVLISGLAGAVSLAGSGGGLWSVEGGNWQMAAKLINHSDVTLHLNEKIESISYLENHYELKSTKGNSYKCDVTVVATPLDEVDIQFSPTISIPKRELQHTHTTFVRGLLNPGYFGMKSLSDVPALVGTLEDPLIPFSCISILRKYSKTDMTYKIFTRQPASDSLLDELFSRRTETVRIDWGAYPKYHAPEVFAPFILDDHHLYYVNAFENAASTMETSAVAGENIARLIISRFMTKESLSSSDKRSCSSGLHSDS

SEQ ID NO: 36408 - protein, 431 aa, Arabidopsis thaliana
  peptide (1)..(431): Ceres Seq. ID no. 12394652
MFERHEIVGGRMRTVTVAGDTFEAGGSILHPKNYHVKDFVERFNLTVRLPTPIEESSAIGIWDGKRFVVKTFGSGTKFPFLDTIVSWVNDLYLFLRYGLSLLRMSSFIENTVDNFLKYYESLESRPIFDNVEGMLKWSGLYNLTKLTLQEKLSEAQLSPLLVNELVTVITRINYGQSVLISGLAGAVSLAGSGGGLWSVEGGNWQMAAKLINHSDVTLHLNEKIESISYLENHYELKSTKGNSYKCDVTVVATPLDEVDIQFSPTISIPKRELQHTHTTFVRGLLNPGYFGMKSLSDVPALVGTLEDPLIPFSCISILRKYSKTDMTYKIFTRQPASDSLLDELFSRRTETVRIDWGAYPKYHAPEVFAPFILDDHHLYYVNAFENAASTMETSAVAGENIARLIISRFMTKESLSSSDKRSCSSGLHSDS

SEQ ID NO: 36409 - protein, 420 aa, Arabidopsis thaliana
  peptide (1)..(420): Ceres Seq. ID no. 12394653
MRTVTVAGDTFEAGGSILHPKNYHVKDFVERFNLTVRLPTPIEESSAIGIWDGKRFVVKTFGSGTKFPFLDTIVSWVNDLYLFLRYGLSLLRMSSFIENTVDNFLKYYESLESRPIFDNVEGMLKWSGLYNLTKLTLQEKLSEAQLSPLLVNELVTVITRINYGQSVLISGLAGAVSLAGSGGGLWSVEGGNWQMAAKLINHSDVTLHLNEKIESISYLENHYELKSTKGNSYKCDVTVVATPLDEVDIQFSPTISIPKRELQHTHTTFVRGLLNPGYFGMKSLSDVPALVGTLEDPLIPFSCISILRKYSKTDMTYKIFTRQPASDSLLDELFSRRTETVRIDWGAYPKYHAPEVFAPFILDDHHLYYVNAFENAASTMETSAVAGENIARLIISRFMTKESLSSSDKRSCSSGLHSDS

SEQ ID NO: 36410 - DNA, 1666 bp, Arabidopsis thaliana
  misc_feature (1)..(1666): Ceres Seq. ID no. 13489048
  misc_feature (1)..(1666): Ortholog of  Ceres SEQ ID NO 13594345 as cited in SEQ ID NO 58043
  misc_feature (1)..(1666): Ortholog of  Ceres SEQ ID NO 12614112 as cited in SEQ ID NO 60891
  misc_feature (1)..(1666): Ortholog of  Ceres SEQ ID NO 13597574 as cited in SEQ ID NO 64677
  misc_feature (1)..(1666): Ortholog of  Ceres SEQ ID NO 13597678 as cited in SEQ ID NO 65375
  misc_feature (1)..(1666): Ortholog of  Ceres SEQ ID NO 13662880 as cited in SEQ ID NO 65422
  misc_feature (1)..(1666): Ortholog of  Ceres SEQ ID NO 12779098 as cited in SEQ ID NO 67698
  misc_feature (1)..(1666): Ortholog of  Ceres SEQ ID NO 13596180 as cited in SEQ ID NO 67941
  misc_feature (1)..(1666): Ortholog of  Ceres SEQ ID NO 13591190 as cited in SEQ ID NO 68044
  misc_feature (1)..(1666): Ortholog of  Ceres SEQ ID NO 13596089 as cited in SEQ ID NO 68373
acaaacatacaaataattctttacttcaccaaaagaaaaaaaaaatgggatccatatcagaaatggtgttcgaaacttgtccatctccaaacccaattcatgtaatgctcgtctcgtttcaaggacaaggccacgtcaaccctcttcttcgtctcggcaagttaattgcttcaaagggtttactcgttaccttcgttacaacggagctttggggcaagaaaatgagacaagccaacaaaatcgttgacggtgaacttaaaccggttggttccggttcaatccggtttgagttctttgatgaagaatgggcagaggatgatgaccggagagctgatttctctttgtacattgctcacctagagagcgttgggatacgagaagtgtctaagcttgtgagaagatacgaggaagcgaacgagcctgtctcgtgtcttatcaataacccgtttatcccatgggtctgccacgtggcggaagagttcaacattccttgtgcggttctctgggttcagtcttgtgcttgtttctctgcttattaccattaccaagatggctctgtttcattccctacggaaacagagcctgagctcgatgtgaagcttccttgtgttcctgtcttgaagaacgacgagattcctagctttctccatccttcttctaggttcacgggttttcgacaagcgattcttgggcaattcaagaatctgagcaagtccttctgtgttctaatcgattcttttgactcattggaacaagaagttatcgattacatgtcaagtctttgtccggttaaaaccgttggaccgcttttcaaagttgctaggacagttacttctgacgtaagcggtgacatttgcaaatcaacagataaatgcctcgagtggttagactcgaggcctaaatcgtcagttgtctacatttcgttcgggacagttgcatatttgaagcaagaacagatcgaagagatcgctcacggagttttgaagtcgggtttatcgttcttgtgggtgattagacctccaccacacgatctgaaggtcgagacacatgtcttgcctcaagaacttaaagagagtagtgctaaaggtaaagggatgattgtggattggtgcccacaagagcaagtcttgtctcatccttcagtggcatgcttcgtgactcattgtggatggaactcgacaatggaatctttgtcttcaggtgttccggtggtttgttgtccgcaatggggagatcaagtgactgatgcagtgtatttgatcgatgttttcaagaccggggttagactaggccgtggagcgaccgaggagagggtagtgccaagggaggaagtggcggagaagcttttggaagcgacagttggggagaaggcagaggagttgagaaagaacgctttgaaatggaaggcggaggcggaagcagcggtggctccaggaggttcgtcggataagaattttagggagtttgtggagaagttaggtgcgggagtaacgaagactaaagataatggatactaggcaaaagtctttgactgtctatattctattttgataatgcattattactgttccatctttgtcttggtgaattctaaagattgcttgttttgtagttggtaaccgtggtgtaattgattaattcaatgttcggcttcggcacatgtttg

SEQ ID NO: 36411 - protein, 504 aa, Arabidopsis thaliana
  peptide (1)..(504): Ceres Seq. ID no. 13489049
KHTNNSLLHQKKKKMGSISEMVFETCPSPNPIHVMLVSFQGQGHVNPLLRLGKLIASKGLLVTFVTTELWGKKMRQANKIVDGELKPVGSGSIRFEFFDEEWAEDDDRRADFSLYIAHLESVGIREVSKLVRRYEEANEPVSCLINNPFIPWVCHVAEEFNIPCAVLWVQSCACFSAYYHYQDGSVSFPTETEPELDVKLPCVPVLKNDEIPSFLHPSSRFTGFRQAILGQFKNLSKSFCVLIDSFDSLEQEVIDYMSSLCPVKTVGPLFKVARTVTSDVSGDICKSTDKCLEWLDSRPKSSVVYISFGTVAYLKQEQIEEIAHGVLKSGLSFLWVIRPPPHDLKVETHVLPQELKESSAKGKGMIVDWCPQEQVLSHPSVACFVTHCGWNSTMESLSSGVPVVCCPQWGDQVTDAVYLIDVFKTGVRLGRGATEERVVPREEVAEKLLEATVGEKAEELRKNALKWKAEAEAAVAPGGSSDKNFREFVEKLGAGVTKTKDNGY

SEQ ID NO: 36412 - protein, 490 aa, Arabidopsis thaliana
  peptide (1)..(490): Ceres Seq. ID no. 13489050
MGSISEMVFETCPSPNPIHVMLVSFQGQGHVNPLLRLGKLIASKGLLVTFVTTELWGKKMRQANKIVDGELKPVGSGSIRFEFFDEEWAEDDDRRADFSLYIAHLESVGIREVSKLVRRYEEANEPVSCLINNPFIPWVCHVAEEFNIPCAVLWVQSCACFSAYYHYQDGSVSFPTETEPELDVKLPCVPVLKNDEIPSFLHPSSRFTGFRQAILGQFKNLSKSFCVLIDSFDSLEQEVIDYMSSLCPVKTVGPLFKVARTVTSDVSGDICKSTDKCLEWLDSRPKSSVVYISFGTVAYLKQEQIEEIAHGVLKSGLSFLWVIRPPPHDLKVETHVLPQELKESSAKGKGMIVDWCPQEQVLSHPSVACFVTHCGWNSTMESLSSGVPVVCCPQWGDQVTDAVYLIDVFKTGVRLGRGATEERVVPREEVAEKLLEATVGEKAEELRKNALKWKAEAEAAVAPGGSSDKNFREFVEKLGAGVTKTKDNGY

SEQ ID NO: 36413 - protein, 484 aa, Arabidopsis thaliana
  peptide (1)..(484): Ceres Seq. ID no. 13489051
MVFETCPSPNPIHVMLVSFQGQGHVNPLLRLGKLIASKGLLVTFVTTELWGKKMRQANKIVDGELKPVGSGSIRFEFFDEEWAEDDDRRADFSLYIAHLESVGIREVSKLVRRYEEANEPVSCLINNPFIPWVCHVAEEFNIPCAVLWVQSCACFSAYYHYQDGSVSFPTETEPELDVKLPCVPVLKNDEIPSFLHPSSRFTGFRQAILGQFKNLSKSFCVLIDSFDSLEQEVIDYMSSLCPVKTVGPLFKVARTVTSDVSGDICKSTDKCLEWLDSRPKSSVVYISFGTVAYLKQEQIEEIAHGVLKSGLSFLWVIRPPPHDLKVETHVLPQELKESSAKGKGMIVDWCPQEQVLSHPSVACFVTHCGWNSTMESLSSGVPVVCCPQWGDQVTDAVYLIDVFKTGVRLGRGATEERVVPREEVAEKLLEATVGEKAEELRKNALKWKAEAEAAVAPGGSSDKNFREFVEKLGAGVTKTKDNGY

SEQ ID NO: 36414 - DNA, 1811 bp, Arabidopsis thaliana
  misc_feature (1)..(1811): Ceres Seq. ID no. 12329212
  misc_feature (1)..(1811): Ortholog of  Ceres SEQ ID NO 13594317 as cited in SEQ ID NO 57796
aagaaaaaatctatctccgccatgaacgcgagagctcttctttgctcttcaaatattcactctctctacacttcaaatcgtccacctgaaaaaacctcttcttctcgcagcctccgtaatctcaaaccatctccaaagtcgttacgggtatggatctacccgcgaaataggtccagtgttttccgggtattagttcggagctccgacaagagtgaaagcagtaattcgtattacgtagaaggagataaagtaagtggaaacaatgacgtcgtttctgattcgcctagctctatcgtcctcccatggtgggaagagtttccgaagcggtgggtgattgtgttactctgtttctcagcttttcttctctgcaatatggacagagtgaatatgagtatagctatacttccgatgtcagctgagtatggttggaatccagcaacagttggtctgattcagtcttctttcttctggggttaccttcttacacagatagctggtggaatttgggcagacactgtaggagggaaaagggttcttggattcggtgttatttggtggtcaatcgctacaattctcactcctgtagctgctaaactcggtcttccttacttgctcgttgttcgtgctttcatgggagttggagagggtgttgcaatgcctgctatgaataatatattgtcgaagtgggttcctgtgcaagagagaagcagatcactcgcgcttgtttacagcggaatgtaccttggatctgtcaccggtttagccttttcgcctttcttgattcatcaatttggatggccttctgtgttttattctttcgggtctcttggaactgtatggttgactctgtggctaactaaggcagagagttcaccattagaagatccaacattgctccctgaagaaagaaagctaattgcagacaactgtgctagcaaagagccagtgaagtcgatcccgtggaggctgatattgtcgaaaccaccggtttgggctctcatcagttgccacttttgtcacaactggggaacattcattctcttaacatggatgccaacttattaccatcaagtgctgaagttcaaccttatggagtcaggacttctctctgtatttccatggatgacaatggcaatatctgcaaatgccggtggatggattgccgatacacttgtcagccgaggtttctctgtcacgaatgtccgcaagataatgcaaacaatagggtttcttggaccagcgttcttcctaacacagctgaaacacatagattctcctacaatggctgttttgtgcatggcttgtagtcaggggactgatgcgttttcacagtctggtctatactctaaccatcaagacatcgctccaagatactctggagtgttacttggtttgtctaatactgctggagtacttgccggagttcttggcacagctgcgactggtcacatactacaacacggttcttgggatgacgttttcacgatttcggtcggtctttacctcgttgggaccgtcatttggaacctattttcaaccggagagaagataatcgattgatccattccgagaatagtaaatagttcggctccaagacctctcatcaggtgcaacttcacctcacgccagtctctgattatacaagtatcattgcagtctgagagctagccggaatattccttttttgccagaaaattcttcaggatctttctgctcgttgatttaggccaaacgcatatgaataatactttgtagatgaaagatatacagatgattttttgtaaataaacaaagctcacactttctcaaga

SEQ ID NO: 36415 - protein, 519 aa, Arabidopsis thaliana
  peptide (1)..(519): Ceres Seq. ID no. 12329213
KKKSISAMNARALLCSSNIHSLYTSNRPPEKTSSSRSLRNLKPSPKSLRVWIYPRNRSSVFRVLVRSSDKSESSNSYYVEGDKVSGNNDVVSDSPSSIVLPWWEEFPKRWVIVLLCFSAFLLCNMDRVNMSIAILPMSAEYGWNPATVGLIQSSFFWGYLLTQIAGGIWADTVGGKRVLGFGVIWWSIATILTPVAAKLGLPYLLVVRAFMGVGEGVAMPAMNNILSKWVPVQERSRSLALVYSGMYLGSVTGLAFSPFLIHQFGWPSVFYSFGSLGTVWLTLWLTKAESSPLEDPTLLPEERKLIADNCASKEPVKSIPWRLILSKPPVWALISCHFCHNWGTFILLTWMPTYYHQVLKFNLMESGLLSVFPWMTMAISANAGGWIADTLVSRGFSVTNVRKIMQTIGFLGPAFFLTQLKHIDSPTMAVLCMACSQGTDAFSQSGLYSNHQDIAPRYSGVLLGLSNTAGVLAGVLGTAATGHILQHGSWDDVFTISVGLYLVGTVIWNLFSTGEKIID

SEQ ID NO: 36416 - protein, 512 aa, Arabidopsis thaliana
  peptide (1)..(512): Ceres Seq. ID no. 12329214
MNARALLCSSNIHSLYTSNRPPEKTSSSRSLRNLKPSPKSLRVWIYPRNRSSVFRVLVRSSDKSESSNSYYVEGDKVSGNNDVVSDSPSSIVLPWWEEFPKRWVIVLLCFSAFLLCNMDRVNMSIAILPMSAEYGWNPATVGLIQSSFFWGYLLTQIAGGIWADTVGGKRVLGFGVIWWSIATILTPVAAKLGLPYLLVVRAFMGVGEGVAMPAMNNILSKWVPVQERSRSLALVYSGMYLGSVTGLAFSPFLIHQFGWPSVFYSFGSLGTVWLTLWLTKAESSPLEDPTLLPEERKLIADNCASKEPVKSIPWRLILSKPPVWALISCHFCHNWGTFILLTWMPTYYHQVLKFNLMESGLLSVFPWMTMAISANAGGWIADTLVSRGFSVTNVRKIMQTIGFLGPAFFLTQLKHIDSPTMAVLCMACSQGTDAFSQSGLYSNHQDIAPRYSGVLLGLSNTAGVLAGVLGTAATGHILQHGSWDDVFTISVGLYLVGTVIWNLFSTGEKIID

SEQ ID NO: 36417 - protein, 395 aa, Arabidopsis thaliana
  peptide (1)..(395): Ceres Seq. ID no. 12329215
MDRVNMSIAILPMSAEYGWNPATVGLIQSSFFWGYLLTQIAGGIWADTVGGKRVLGFGVIWWSIATILTPVAAKLGLPYLLVVRAFMGVGEGVAMPAMNNILSKWVPVQERSRSLALVYSGMYLGSVTGLAFSPFLIHQFGWPSVFYSFGSLGTVWLTLWLTKAESSPLEDPTLLPEERKLIADNCASKEPVKSIPWRLILSKPPVWALISCHFCHNWGTFILLTWMPTYYHQVLKFNLMESGLLSVFPWMTMAISANAGGWIADTLVSRGFSVTNVRKIMQTIGFLGPAFFLTQLKHIDSPTMAVLCMACSQGTDAFSQSGLYSNHQDIAPRYSGVLLGLSNTAGVLAGVLGTAATGHILQHGSWDDVFTISVGLYLVGTVIWNLFSTGEKIID

SEQ ID NO: 36418 - DNA, 516 bp, Arabidopsis thaliana
  misc_feature (1)..(516): Ceres Seq. ID no. 12329216
  misc_feature (1)..(516): Ortholog of  Ceres SEQ ID NO 13582188 as cited in SEQ ID NO 55950
  misc_feature (1)..(516): Ortholog of  Ceres SEQ ID NO 12611286 as cited in SEQ ID NO 56182
  misc_feature (1)..(516): Ortholog of  Ceres SEQ ID NO 15173288 as cited in SEQ ID NO 58150
  misc_feature (1)..(516): Ortholog of  Ceres SEQ ID NO 13663461 as cited in SEQ ID NO 66601
atgatccgattcatattattgcagaacagacaaggtaagactcgtctagccaaatactatgtccctctcgaagaatccgagaaacacaaagtcgaatacgaggttcatagattagtggtgaatcgcgacgccaaattcaccaacttcgttgagtttagaacacacaaggtgatatacaggcgttatgctggattgtttttctctgtgtgcgtggatataaccgacaatgagttggcttacttggagagtatccatttgtttgtggagatattggaccatttcttcagcaatgtttgtgagctagatttggtgtttaatttccacaaggtgtacttgatactcgatgagttcattcttgctggggagctccaagaaacaagcaaaagggcaatcatcgaaaggatgtcagaactcgagaagctacagtgatgacggttaagaatcacattctacttggttaactgcgtacctgccagatgtttcttggcatgttcagagatttgctatactttgttg

SEQ ID NO: 36419 - protein, 142 aa, Arabidopsis thaliana
  peptide (1)..(142): Ceres Seq. ID no. 12329217
MIRFILLQNRQGKTRLAKYYVPLEESEKHKVEYEVHRLVVNRDAKFTNFVEFRTHKVIYRRYAGLFFSVCVDITDNELAYLESIHLFVEILDHFFSNVCELDLVFNFHKVYLILDEFILAGELQETSKRAIIERMSELEKLQ

SEQ ID NO: 36420 - DNA, 1638 bp, Arabidopsis thaliana
  misc_feature (1)..(1638): Ceres Seq. ID no. 12481896
  misc_feature (1)..(1638): Ortholog of  Ceres SEQ ID NO 13593889 as cited in SEQ ID NO 53305
  misc_feature (1)..(1638): Ortholog of  Ceres SEQ ID NO 13581959 as cited in SEQ ID NO 56156
acaacttccccattttctgcttctttttgttcaactccaatcacacaattcacaacccattgagaaaccaataaaataacctcaatcaaaaaaaaaaaaaaaaaaagatgaaaatctcaatttagtaaaggagaaaaaagccatttcgaataacttgaaaaggttttggttttgcagaagaaaatgaaggagaaggcggagagtggtggaggagtaggatacgtgagagcagatcagatagatttaaagagtctggacgagcaattgcagagacacttaagtaaagcatggacgatggagaagaggaagagtttgagtgatggtgaagataacgtcaataacacccgacataaccagaacaacttcggacatcgacagcttgtgtttcagaggccgcttcttggtggtggatatagcaacaacaacaacagcagcaagaacgacataattaggtcgaccgaggttgagaagtcgaggagagagtgggagattgatccttctaagcttataatcaaaagtgtgattgctagaggtacttttggtacggttcaccgtggaatctacgatggtcaagatgtcgccgtaaaactactagactggggagaagaggggcacaggtcagacgcagagatagcttcgcttagagctgctttcactcaagaagttgctgtgtggcataagctcgaccatcccaatgtcaccaagttcataggagcggcgatggggacatcggagatgagcatacaaacggaaaacgggcaaatgggaatgccgagtaacgtttgctgtgtcgtggttgagtattgccccggcggcgctctcaagtcattcctcatcaaaactcgccgccgcaaactcgccttcaaagtcgttatccaactctcccttgatcttgctcgcgggttgagttacttgcactctcagaagattgtgcatagagacgtgaaaacggagaacatgcttttagataagtcacgcaccttaaagattgcagattttggtgtggctcgtctagaggcttcaaaccctaacgacatgaccggtgagaccggaaccttgggctatatggctcctgaggtgctaaacgggagtccctacaacagaaagtgcgatgtgtatagctttgggatatgtctttgggagatttactgttgcgacatgccttatcctgacctcagcttctccgaagtaacctccgccgtcgtccgccagaatttgagaccagagatacctagatgttgtccaagctcgctggcgaacgtgatgaagaggtgttgggatgcgaatccggagaagcggccggagatggaggaagttgtggctatgttggaggctattgatacttccaaaggcggaggaatgattcctcctgaccaacaacaaggctgtttctgtttccgccgacaccgaggcccatgaagtacacacacatgcactacgttcccattattattataattaactcttactattttggaagaagagagattatttttaaaagttaattgtggggtaattaaaatgttttaattagtttggtgtttgatttataggatgaatgtcgtacctatttcaaacgatcatctcatacgttatacataacacacaacaaaaccttattcttgatcttcgcttgtt

SEQ ID NO: 36421 - protein, 411 aa, Arabidopsis thaliana
  peptide (1)..(411): Ceres Seq. ID no. 12481897
MKEKAESGGGVGYVRADQIDLKSLDEQLQRHLSKAWTMEKRKSLSDGEDNVNNTRHNQNNFGHRQLVFQRPLLGGGYSNNNNSSKNDIIRSTEVEKSRREWEIDPSKLIIKSVIARGTFGTVHRGIYDGQDVAVKLLDWGEEGHRSDAEIASLRAAFTQEVAVWHKLDHPNVTKFIGAAMGTSEMSIQTENGQMGMPSNVCCVVVEYCPGGALKSFLIKTRRRKLAFKVVIQLSLDLARGLSYLHSQKIVHRDVKTENMLLDKSRTLKIADFGVARLEASNPNDMTGETGTLGYMAPEVLNGSPYNRKCDVYSFGICLWEIYCCDMPYPDLSFSEVTSAVVRQNLRPEIPRCCPSSLANVMKRCWDANPEKRPEMEEVVAMLEAIDTSKGGGMIPPDQQQGCFCFRRHRGP

SEQ ID NO: 36422 - protein, 374 aa, Arabidopsis thaliana
  peptide (1)..(374): Ceres Seq. ID no. 12481898
MEKRKSLSDGEDNVNNTRHNQNNFGHRQLVFQRPLLGGGYSNNNNSSKNDIIRSTEVEKSRREWEIDPSKLIIKSVIARGTFGTVHRGIYDGQDVAVKLLDWGEEGHRSDAEIASLRAAFTQEVAVWHKLDHPNVTKFIGAAMGTSEMSIQTENGQMGMPSNVCCVVVEYCPGGALKSFLIKTRRRKLAFKVVIQLSLDLARGLSYLHSQKIVHRDVKTENMLLDKSRTLKIADFGVARLEASNPNDMTGETGTLGYMAPEVLNGSPYNRKCDVYSFGICLWEIYCCDMPYPDLSFSEVTSAVVRQNLRPEIPRCCPSSLANVMKRCWDANPEKRPEMEEVVAMLEAIDTSKGGGMIPPDQQQGCFCFRRHRGP

SEQ ID NO: 36423 - protein, 232 aa, Arabidopsis thaliana
  peptide (1)..(232): Ceres Seq. ID no. 12481899
MGTSEMSIQTENGQMGMPSNVCCVVVEYCPGGALKSFLIKTRRRKLAFKVVIQLSLDLARGLSYLHSQKIVHRDVKTENMLLDKSRTLKIADFGVARLEASNPNDMTGETGTLGYMAPEVLNGSPYNRKCDVYSFGICLWEIYCCDMPYPDLSFSEVTSAVVRQNLRPEIPRCCPSSLANVMKRCWDANPEKRPEMEEVVAMLEAIDTSKGGGMIPPDQQQGCFCFRRHRGP

SEQ ID NO: 36424 - DNA, 1569 bp, Arabidopsis thaliana
  misc_feature (1)..(1569): Ceres Seq. ID no. 13646090
  misc_feature (1)..(1569): Ortholog of  Ceres SEQ ID NO 13654989 as cited in SEQ ID NO 63117
  misc_feature (1)..(1569): Ortholog of  Ceres SEQ ID NO 13584744 as cited in SEQ ID NO 69137
atcatcgtcttttctcttttgtttgtttgctcctaacgtttctctttcttggaacaatctccagcaaaccaaactaatccgtctgagagaagtagttttgactttctctactccgtgatcgcgatgtcggactctggtggtggttctcacaagtcctccacaacaaaaccttccgttttcggactaaacctttacttagtcatcgcgatttgttctgttttcatactcttgatctcactcttgatcttcctcttcgtctgcttgaatcgcgtctcacgcgctcgtagaatgcgcgttaaacacagctccggctcgatcccgctcgtctctaaagaaatctcggagatcaagacggtcggcaaattcataaactccgacgattccaagggtaaaatcggaaacgaagttgttgttgttgtctccgccacaagcaaagaagcgacaagtggttttgatactttgtcggtggcttcgagcggtgacgttggtacttctgaggcaatgggatggggaaaatggtacagcttgaaagatctggagattgcgacacgtggcttctctgatgataacatgatcggtgaaggagggtacggtgtcgtttacagagctgatttctctgacggttctgtcgccgccgtcaagaatctccttaacaacaagggtcaggcggagaaggagttcaaagttgaagtagaagcaattgggaaagtaagacataagaacttggttggtctgatgggatattgtgctgacagtgctcaaagtcaaaggatgcttgtgtatgaatatattgataatggaaacttggagcagtggttacacggtgatgtaggtccggtgagtcctcttacgtgggatatccgcatgaagatagccattggaacagcaaaaggattagcctatttacatgaagggcttgaacctaaggttgtgcaccgtgatgtgaaatctagtaacatcttgctcgataagaaatggaacgcgaaagtgtctgattttggtttggccaagttattaggatctgaaacaagctacgtgacaactcgtgtgatgggaacttttggatatgtttcaccggaatatgcaagtactggtatgctcaatgagtgtagtgatgtctacagtttcggtgttctgctcatggagatcattacaggaaggagcccagttgattattcaagaccgcctggcgagatgaacttagtggattggttcaaaggaatggttgcaagtagacgtggagaagaagttatagaccctaaaatcaagacatcacctcctccaagagctttgaaaagagctttgcttgtttgtttgcgttgcatagaccttgactctagtaaacgaccaaagatgggacaaatcattcacatgcttgaggctgaagattttccattccgtcctgtaagtgtgtcaaaagctaaaaagagatttgatcctttatgcaatttactgattttaagtttcatgttgtcacacaggaacacagatcaaaccaggaaagatcgaagtaagaaagattattgggcaaacaataatgtcttggggaagaccacacttgagcgttga

SEQ ID NO: 36425 - protein, 481 aa, Arabidopsis thaliana
  peptide (1)..(481): Ceres Seq. ID no. 13646091
MSDSGGGSHKSSTTKPSVFGLNLYLVIAICSVFILLISLLIFLFVCLNRVSRARRMRVKHSSGSIPLVSKEISEIKTVGKFINSDDSKGKIGNEVVVVVSATSKEATSGFDTLSVASSGDVGTSEAMGWGKWYSLKDLEIATRGFSDDNMIGEGGYGVVYRADFSDGSVAAVKNLLNNKGQAEKEFKVEVEAIGKVRHKNLVGLMGYCADSAQSQRMLVYEYIDNGNLEQWLHGDVGPVSPLTWDIRMKIAIGTAKGLAYLHEGLEPKVVHRDVKSSNILLDKKWNAKVSDFGLAKLLGSETSYVTTRVMGTFGYVSPEYASTGMLNECSDVYSFGVLLMEIITGRSPVDYSRPPGEMNLVDWFKGMVASRRGEEVIDPKIKTSPPPRALKRALLVCLRCIDLDSSKRPKMGQIIHMLEAEDFPFRPVSVSKAKKRFDPLCNLLILSFMLSHRNTDQTRKDRSKKDYWANNNVLGKTTLER

SEQ ID NO: 36426 - protein, 426 aa, Arabidopsis thaliana
  peptide (1)..(426): Ceres Seq. ID no. 13646092
MRVKHSSGSIPLVSKEISEIKTVGKFINSDDSKGKIGNEVVVVVSATSKEATSGFDTLSVASSGDVGTSEAMGWGKWYSLKDLEIATRGFSDDNMIGEGGYGVVYRADFSDGSVAAVKNLLNNKGQAEKEFKVEVEAIGKVRHKNLVGLMGYCADSAQSQRMLVYEYIDNGNLEQWLHGDVGPVSPLTWDIRMKIAIGTAKGLAYLHEGLEPKVVHRDVKSSNILLDKKWNAKVSDFGLAKLLGSETSYVTTRVMGTFGYVSPEYASTGMLNECSDVYSFGVLLMEIITGRSPVDYSRPPGEMNLVDWFKGMVASRRGEEVIDPKIKTSPPPRALKRALLVCLRCIDLDSSKRPKMGQIIHMLEAEDFPFRPVSVSKAKKRFDPLCNLLILSFMLSHRNTDQTRKDRSKKDYWANNNVLGKTTLER

SEQ ID NO: 36427 - protein, 355 aa, Arabidopsis thaliana
  peptide (1)..(355): Ceres Seq. ID no. 13646093
MGWGKWYSLKDLEIATRGFSDDNMIGEGGYGVVYRADFSDGSVAAVKNLLNNKGQAEKEFKVEVEAIGKVRHKNLVGLMGYCADSAQSQRMLVYEYIDNGNLEQWLHGDVGPVSPLTWDIRMKIAIGTAKGLAYLHEGLEPKVVHRDVKSSNILLDKKWNAKVSDFGLAKLLGSETSYVTTRVMGTFGYVSPEYASTGMLNECSDVYSFGVLLMEIITGRSPVDYSRPPGEMNLVDWFKGMVASRRGEEVIDPKIKTSPPPRALKRALLVCLRCIDLDSSKRPKMGQIIHMLEAEDFPFRPVSVSKAKKRFDPLCNLLILSFMLSHRNTDQTRKDRSKKDYWANNNVLGKTTLER

SEQ ID NO: 36428 - DNA, 473 bp, Arabidopsis thaliana
  misc_feature (1)..(473): Ceres Seq. ID no. 11032658
  misc_feature (1)..(473): Ortholog of  Ceres SEQ ID NO 14302474 as cited in SEQ ID NO 60589
atcctatataacaaactcaattttcatttcgatcaatcaacacaatttggtaaaatcaaatagtctttttactattttctaaggttcgaatttaatttcccaagagaaaaatgtcaggccgaggaaagggaggaaaaggattaggaaagggaggagccaagaggcatcggaaagttctccgagacaacatccaagggattaccaaacctgcgattcgtcgtctcgcgagaagaggaggcgtgaagcgtatcagtggtttgatctatgaagagactcgcggcgttctcaagatctttctcgagaacgtgattcgtgacgccgttacttacacggagcacgctcgccggaaaactgttacggcgatggatgtcgtttacgctctcaagagacaaggacgaactttgtatggattcggcggctaaatccttatgatttcaacttcggattttgtaaactctttaatttcaagttct

SEQ ID NO: 36429 - protein, 103 aa, Arabidopsis thaliana; identical to SEQ ID NO: 7737
  peptide (1)..(103): Ceres Seq. ID no. 11032659

SEQ ID NO: 36430 - DNA, 1237 bp, Arabidopsis thaliana
  misc_feature (1)..(1237): Ceres Seq. ID no. 13575166
  misc_feature (1)..(1237): Ortholog of  Ceres SEQ ID NO 13502952 as cited in SEQ ID NO 62271
  misc_feature (1)..(1237): Ortholog of  Ceres SEQ ID NO 13502973 as cited in SEQ ID NO 68052
  misc_feature (1)..(1237): Ortholog of  Ceres SEQ ID NO 13596000 as cited in SEQ ID NO 68188
  misc_feature (1)..(1237): Ortholog of  Ceres SEQ ID NO 15179420 as cited in SEQ ID NO 0
aaaaattaagagcaaaagtcatttaactttcctaaaacaatggctttaaaacatatgcaaatctttctcttcgtcgctatattttcatcattctgtttctccatcactctttctcgtccactcgacaatgaactcatcatgcaaaagaggcacatcgagtggatgactaaacacggccgtgtctacgcggatgtgaaggaggaaaacaatcgctacgttgtgttcaaaaacaacgtcgaacgcattgaacatttaaatagcattcctgccggaagaactttcaaacttgcggtaaatcagtttgctgatttaaccaatgacgaatttcgttccatgtacactggtttcaaaggtgtctcggcattatctagccaaagccaaactaaaatgtcgccgtttaggtaccaaaacgtttcttctggtgctttgccggtttctgttgactggaggaagaaaggagctgtgacccctatcaagaatcaaggcagctgcggatgttgttgggcgttttcagcggttgcggctattgaaggagcaacacaaataaagaaagggaaacttatatctttgtcagaacaacagcttgttgattgcgacacaaacgattttggctgcgaaggcggtttaatggatactgcgtttgagcatataaaagcgactggcggcttgacaactgagtcaaattatccttacaaaggcgaagacgctacttgcaattccaaaaagaccaatccaaaagcaacttctattacaggttatgaggatgtcccggttaatgatgagcaagcactgatgaaggcagtggcacaccaaccggttagcgttggaattgaaggaggtggttttgatttccaattctattcgtctggtgtgttcactggagagtgcactacgtatcttgatcatgcagtaactgcgattggatacggcgaatctactaacggatcaaagtattggatcatcaagaattcatggggaacaaaatggggagaaagtggatatatgaggattcaaaaagatgtcaaggataaacaaggactatgtggtcttgccatgaaagcttcttacccaactatatgaattcaaaaccgtgttaagcttttaattgtgtatgtttgtgtgggattgatgtctaaaaataatttgaattgttttatgtaaaaaaattgtatttagactgttgtatgcattttatgaaattgtaagcttatgtaatgcaaaggattgataattttcg

SEQ ID NO: 36431 - protein, 346 aa, Arabidopsis thaliana
  peptide (1)..(346): Ceres Seq. ID no. 13575167
MALKHMQIFLFVAIFSSFCFSITLSRPLDNELIMQKRHIEWMTKHGRVYADVKEENNRYVVFKNNVERIEHLNSIPAGRTFKLAVNQFADLTNDEFRSMYTGFKGVSALSSQSQTKMSPFRYQNVSSGALPVSVDWRKKGAVTPIKNQGSCGCCWAFSAVAAIEGATQIKKGKLISLSEQQLVDCDTNDFGCEGGLMDTAFEHIKATGGLTTESNYPYKGEDATCNSKKTNPKATSITGYEDVPVNDEQALMKAVAHQPVSVGIEGGGFDFQFYSSGVFTGECTTYLDHAVTAIGYGESTNGSKYWIIKNSWGTKWGESGYMRIQKDVKDKQGLCGLAMKASYPTI

SEQ ID NO: 36432 - protein, 341 aa, Arabidopsis thaliana
  peptide (1)..(341): Ceres Seq. ID no. 13575168
MQIFLFVAIFSSFCFSITLSRPLDNELIMQKRHIEWMTKHGRVYADVKEENNRYVVFKNNVERIEHLNSIPAGRTFKLAVNQFADLTNDEFRSMYTGFKGVSALSSQSQTKMSPFRYQNVSSGALPVSVDWRKKGAVTPIKNQGSCGCCWAFSAVAAIEGATQIKKGKLISLSEQQLVDCDTNDFGCEGGLMDTAFEHIKATGGLTTESNYPYKGEDATCNSKKTNPKATSITGYEDVPVNDEQALMKAVAHQPVSVGIEGGGFDFQFYSSGVFTGECTTYLDHAVTAIGYGESTNGSKYWIIKNSWGTKWGESGYMRIQKDVKDKQGLCGLAMKASYPTI

SEQ ID NO: 36433 - protein, 313 aa, Arabidopsis thaliana
  peptide (1)..(313): Ceres Seq. ID no. 13575169
MQKRHIEWMTKHGRVYADVKEENNRYVVFKNNVERIEHLNSIPAGRTFKLAVNQFADLTNDEFRSMYTGFKGVSALSSQSQTKMSPFRYQNVSSGALPVSVDWRKKGAVTPIKNQGSCGCCWAFSAVAAIEGATQIKKGKLISLSEQQLVDCDTNDFGCEGGLMDTAFEHIKATGGLTTESNYPYKGEDATCNSKKTNPKATSITGYEDVPVNDEQALMKAVAHQPVSVGIEGGGFDFQFYSSGVFTGECTTYLDHAVTAIGYGESTNGSKYWIIKNSWGTKWGESGYMRIQKDVKDKQGLCGLAMKASYPTI

SEQ ID NO: 36434 - DNA, 1328 bp, Arabidopsis thaliana
  misc_feature (1)..(1328): Ceres Seq. ID no. 12421197
  misc_feature (1)..(1328): Ortholog of  Ceres SEQ ID NO 14307296 as cited in SEQ ID NO 53966
  misc_feature (1)..(1328): Ortholog of  Ceres SEQ ID NO 13528157 as cited in SEQ ID NO 60102
  misc_feature (1)..(1328): Ortholog of  Ceres SEQ ID NO 15179340 as cited in SEQ ID NO 0
tttcttcttcttcttcatttttctattcacattctctgaaactcataccatattttcaaagctcttaacccaaaaaccctaagtcttttttttcttcaaattattggttatattaatgttttaagctatgatggatatgactcctacaataacaacaacaacaacaccaactcctaaatcacccgaacccgaatccgaaactccgacccggatccaaccggcgaaacccatttcctttagcaacggcatcatcaaacgccaccaccaccaccaccatcctctcctctttacttacaaagaatgtctcaaaaaccacgcggcggctttaggtggtcacgctctcgacggttgcggcgaattcatgccgtctccgtcgtcaatctcctccgatccaacttctctcaaatgtgctgcttgtggctgccaccgtaatttccaccgccgtgatccagataacaacaacgactcttcccaaatccctcctcctccttccaccgccgtagagtatcaacctcaccaccgtcatcatccaccaccaccaccacctcctccaccaccacgtagtcctaactcagcttctcctccaccaatctcttcctcttacatgctcttatctctctccggtactaataacaacaacaacaacttagcttctttctccgatcttaacttctccgccggaaacaaccaccaccaccaccaccaacatactcttcacggatctcgtaaaagattccgaacaaaattcagccagtttcagaaagagaagatgcatgaattcgccgaacgtgttggttggaagatgcaaaaacgtgacgaagacgatgttcgtgatttttgccggcagatcggagttgataaaagtgttctcaaagtttggatgcataacaacaaaaacacctttaaccgccgtgatatcgccggaaacgagatccggcaaatcgataacggcggaggaaaccacactccgattctcgccggcgagattaataaccataacaatggacaccacggtgtcggaggaggaggagagcttcaccagagtgttagtagcggcggtggtggcggaggatttgatagtgatagcggcggagctaacggtggtaacgttaacggatcatcgtcgtcgtgaagttaaagatgagagtgtcaggttaataagaagcttagagtaagcttattcgtattatcatcgttaataactttctattaaatattaattaagatctttagctttgtttgtttttgcattattattagttttgatttaatgttctttaccacgtcggtgtctcgctcgatgaggaataataccataacaatgttcg

SEQ ID NO: 36435 - protein, 334 aa, Arabidopsis thaliana
  peptide (1)..(334): Ceres Seq. ID no. 12421198
MMDMTPTITTTTTPTPKSPEPESETPTRIQPAKPISFSNGIIKRHHHHHHPLLFTYKECLKNHAAALGGHALDGCGEFMPSPSSISSDPTSLKCAACGCHRNFHRRDPDNNNDSSQIPPPPSTAVEYQPHHRHHPPPPPPPPPPRSPNSASPPPISSSYMLLSLSGTNNNNNNLASFSDLNFSAGNNHHHHHQHTLHGSRKRFRTKFSQFQKEKMHEFAERVGWKMQKRDEDDVRDFCRQIGVDKSVLKVWMHNNKNTFNRRDIAGNEIRQIDNGGGNHTPILAGEINNHNNGHHGVGGGGELHQSVSSGGGGGGFDSDSGGANGGNVNGSSSS

SEQ ID NO: 36436 - protein, 333 aa, Arabidopsis thaliana
  peptide (1)..(333): Ceres Seq. ID no. 12421199
MDMTPTITTTTTPTPKSPEPESETPTRIQPAKPISFSNGIIKRHHHHHHPLLFTYKECLKNHAAALGGHALDGCGEFMPSPSSISSDPTSLKCAACGCHRNFHRRDPDNNNDSSQIPPPPSTAVEYQPHHRHHPPPPPPPPPPRSPNSASPPPISSSYMLLSLSGTNNNNNNLASFSDLNFSAGNNHHHHHQHTLHGSRKRFRTKFSQFQKEKMHEFAERVGWKMQKRDEDDVRDFCRQIGVDKSVLKVWMHNNKNTFNRRDIAGNEIRQIDNGGGNHTPILAGEINNHNNGHHGVGGGGELHQSVSSGGGGGGFDSDSGGANGGNVNGSSSS

SEQ ID NO: 36437 - protein, 331 aa, Arabidopsis thaliana
  peptide (1)..(331): Ceres Seq. ID no. 12421200
MTPTITTTTTPTPKSPEPESETPTRIQPAKPISFSNGIIKRHHHHHHPLLFTYKECLKNHAAALGGHALDGCGEFMPSPSSISSDPTSLKCAACGCHRNFHRRDPDNNNDSSQIPPPPSTAVEYQPHHRHHPPPPPPPPPPRSPNSASPPPISSSYMLLSLSGTNNNNNNLASFSDLNFSAGNNHHHHHQHTLHGSRKRFRTKFSQFQKEKMHEFAERVGWKMQKRDEDDVRDFCRQIGVDKSVLKVWMHNNKNTFNRRDIAGNEIRQIDNGGGNHTPILAGEINNHNNGHHGVGGGGELHQSVSSGGGGGGFDSDSGGANGGNVNGSSSS

SEQ ID NO: 36438 - DNA, 1277 bp, Arabidopsis thaliana
  misc_feature (1)..(1277): Ceres Seq. ID no. 12738378
  misc_feature (1)..(1277): Ortholog of  Ceres SEQ ID NO 15169511 as cited in SEQ ID NO 65927
atttcttcttcaccgttagatttttcctcgcttaatttctcaataacgctctcagagagaccatttgatgaagcttctcgcttctggaatttgaaaaggatttgataagacgagttcatagaagattaccgcaagttcatcaactttttgaacttgttatggagataatctcactgaacgttgtgccccagtgctctgtggttacttggagtagtaaattagcaacgataagattggtcccaaatcggtcaagtttgttattctcaggggtcaaaaaatccagacttgtgattcgaagtggaaattccgatggttatgttgttggtgagaatgatgacttgggtcgtatagccagaagaggagaatcaacgtcaaaggttttgattcctggtttgcctgatgaatcaaatggtgaaattgctgctcgaatcagtcattctcactgcgagtggaagcccaagcttagagtacattatgagaaagccggttgtgacaatctcgatgctcctgcggtgttgtttcttcctggctttggcgttggttcatttcactatgagaagcagcttaccgatttgggaagggattatcgagtatgggctattgattttcttggacagggtttatctctccctactgaagatcctactaccatgactgaagaaaccagttcctcggaagataaggaaccattttggggatttggtgacaaaactgaaccgtgggctgatcaacttgtattctctctggatctctggagggatcaagttcagtattttgtagaagaggttatcggtgagcctgtgtacattgctgggaactcacttggagggtatgtagctctctactttgcagcaacccatcctcacctggttaagggtgttaccttgcttaatgcaacacctttctggggtttcttccctaatccagtaagatccccaaagctagcacgtctctttccatggcccggagcattccctctgccggaaagagtgaaaaaaaatcacagaattggtgtggcaaaagataagtgatcctgaaagcatagctgagatacttaaacaggtctacacagaccattctaccaatgtggataaagtattctcacgtattgtggaggtcacacagcatccggctgctgcagcatcgtttgcttcaattatgcttgctcctggtggagagctatctttctccgaagctttatctaggtgtaaggaaaacaatgttcagatatgtctcatgtatggaagagaagatccatgggtgagaccgttatgggg

SEQ ID NO: 36439 - protein, 290 aa, Arabidopsis thaliana
  peptide (1)..(290): Ceres Seq. ID no. 12738379
MEIISLNVVPQCSVVTWSSKLATIRLVPNRSSLLFSGVKKSRLVIRSGNSDGYVVGENDDLGRIARRGESTSKVLIPGLPDESNGEIAARISHSHCEWKPKLRVHYEKAGCDNLDAPAVLFLPGFGVGSFHYEKQLTDLGRDYRVWAIDFLGQGLSLPTEDPTTMTEETSSSEDKEPFWGFGDKTEPWADQLVFSLDLWRDQVQYFVEEVIGEPVYIAGNSLGGYVALYFAATHPHLVKGVTLLNATPFWGFFPNPVRSPKLARLFPWPGAFPLPERVKKNHRIGVAKDK

SEQ ID NO: 36440 - DNA, 1737 bp, Arabidopsis thaliana
  misc_feature (1)..(1737): Ceres Seq. ID no. 12395169
  misc_feature (1)..(1737): Ortholog of  Ceres SEQ ID NO 13596034 as cited in SEQ ID NO 62066
aatttgacagattcattcattagaagaagaagacaacaatccatcttcttctccccattcctcgtttcaattttgcagatctcgtctccttctcgatttattattaatatagagatggcaagttcaaaggggtctcagaatcatagaaatctgggatgcaatgggaaacaagctttactgcctccgaaaagtccgtttacgggtggtccaacgtttagtgcagattttgttccaagtagtgtgattggatccaaggctgttcagaagcttggagaaggaaatgccaatcatcatcgaacttcatctgagagttttcttattgaggaacagccttcttggcttgacgatcttctcaacgaacctgaaacacctgtacggaaaggagggcatcgacggtcatcgagtgattcatttgcatatgtagatgttcctgttggttttgatgttgattacacgctttgggatggtggtagatataataacaataatggtttctctaatcacgttagaggtcccaaggagtctgattaccttagaagccagcctgttcctttctacccttcagctcatttgtccaaacagaaaataagaccgtgggattcattaccagattccggtgctcgcccgaacagtagttctggttgttaggagagcagctctatcacaagatcagggtcttctggtagcctacgtgatacagaaaaggcttattctgctgctgatagcaagaaagatttcataaataatttcgcaaagtcgtcattcgaaaaacgggataatcctctggctaagtctgctacttccgaggctgatacgaaacgtgctagacagcagtttgcacagcgctctcgagtccgtaaaattcagtacatagctgaactggaaaggaacgttcagatgttacaagtagagggttctgaagtgtctgcggagcttgagtttctcaatcagcagaatctaattctcagcttggagaacaagtcccttaagaatcggttggaaagcttagcacaagagcagcttataaagtacttagaacatgatgtattggagaaagagattgtgaggctaagggctttataccagcttcaacagcagcaagagccgcagcagcaacatcagacaaaaaagcaaggatcatctagccaccagcgttcgaagagtagagatctagagtcgcaattcacgaatctgtccttgaggccttaacggttcaaagttcctgccgaaaatatttttatgcttatggctagagcttgagctgtcttcatggttccaggccagcttcttgtgtgtctttccctatcgcattagtagctgctcagtttgtgcttatgcttcttagtttattttcatctttgttgacccggtttgacatctcgatgagcaagtgccagcgattgatgggaaaacggcataaatgaaacaacgagttcgctggaggcggtttggtctgtctctgcgcacatcaggtatttatgataagatattattaactcatttgttcatgtctgctcaatagactgcaatccttatcacgatagtggcttcattctagggctctcaaatctcgggctgtgtctcgcttgtattgtgtgtctgaagagaatgttccctgtaaaacgtgtagtggtgtaagctttgtatcaactgtcgtttgtcttgctcatctgtttgtgtaaccaaattctcatcatttatcagaaacttgaacaccttaagaaatattttggttct

SEQ ID NO: 36441 - protein, 215 aa, Arabidopsis thaliana
  peptide (1)..(215): Ceres Seq. ID no. 12395170
NLTDSFIRRRRQQSIFFSPFLVSILQISSPSRFIINIEMASSKGSQNHRNLGCNGKQALLPPKSPFTGGPTFSADFVPSSVIGSKAVQKLGEGNANHHRTSSESFLIEEQPSWLDDLLNEPETPVRKGGHRRSSSDSFAYVDVPVGFDVDYTLWDGGRYNNNNGFSNHVRGPKESDYLRSQPVPFYPSAHLSKQKIRPWDSLPDSGARPNSSSGC

SEQ ID NO: 36442 - protein, 177 aa, Arabidopsis thaliana
  peptide (1)..(177): Ceres Seq. ID no. 12395171
MASSKGSQNHRNLGCNGKQALLPPKSPFTGGPTFSADFVPSSVIGSKAVQKLGEGNANHHRTSSESFLIEEQPSWLDDLLNEPETPVRKGGHRRSSSDSFAYVDVPVGFDVDYTLWDGGRYNNNNGFSNHVRGPKESDYLRSQPVPFYPSAHLSKQKIRPWDSLPDSGARPNSSSGC

SEQ ID NO: 36443 - DNA, 1910 bp, Arabidopsis thaliana
  misc_feature (1)..(1910): Ceres Seq. ID no. 12370285
  misc_feature (1)..(1910): Ortholog of  Ceres SEQ ID NO 12587870 as cited in SEQ ID NO 63523
atttaaaaaagaaaaaagaagaaaagagagagagagactcacaaatcataatatctccttcattaactcataatcactttaaagaacattggaatcagattcattacatagggattgatatggaaaagtcaaaccaaccagttcatgtaaccttgtccgaattgaaggacggagataaagaaatcgttgatgctgaatttttggttgatcttcttgagagctatagatttggtaaagataatgttcccgcccgagaatttcgatccaaggcggcagcgacggctccggcgccggtcaacaccaccgagatagagttggaagaggataatgatggatctcaagctcaaggtaacaattctgttagtgaaagtacatcatcgctattttccgattcagatccaatagtacttgagagtactgtgagcgaaaccggttcaaacgaagaatctgaaaccggttcaaacgaagaaaatggtaataattggttagagtcgagctccacaaacttgccaaatgtagagaacaaaaggcaacggaatggagaagattgtgagatagaagaggaagaagaaaataacgagagatcattatcggattcagaagagaagtcaaacctagagaagttgcttgggacacaagaaaactatgagcttggaaatgaggatgaagaaaagaacgagagatcatcgtcagattcagaagagaagtcaaacctagagaattttcttgcgacacaagaaaactacgagctttactgtcctagctgtagcacatgtatcaccagaaatgtggttctcaagaaaagaaaacgagggaagcacgttaattcatctctggatctgaaacccgatataccggttgttgaaccggacgaaccaagcgacattgaggagatggaatcaccagttaaggtttatgtccctgagactcggattgaggatgatcaagaagataaagagggaactatctttacttgcttggtttgtgatctaaagtacttcatccggttaggaacaaagttcttacaacttgattatatcaggggaaaaccggttgagaaatcagttgaagaatatatagatgtgaggaagagtataaacaccacacaatcaccaccacaaattcaaccggacggagaaagattcgccattgagttgttaaagagcaccgtctacggcggtctcactgagaccatcaccagcctcggcgttgtatcatctgcttctgcctctggttcctccaccatgaatatattggctcttgctgtcgcaaatttggccggtgggctcatcgtcctcgctcaaaactttcaagatctaagaaacagttcagatcaagagaaagataggtacgaggaattgttagggagacgtactaaatcccggatacatatcttagtagcggtcatgtcttacattttcttcggcctaattcctccgttagtttacgcattttccttctacgaaaccggaatcaagaactacaagctcatctcggttttcttgggttctctggtttgcgtaattttgctcggttcgatcaaggtctatgtccgaaaaccaaccaattcatgtggatcgactaaagcttatctcaaatctgcggcttattatacgtctattgttgttgcttcttgcggaatctcatacgttgtcggagatattatgggagagtatatcgagaagctcagtttggttggtttagaccagatcagtataacttcaccatgttatggaattaaacccgaggagtgccggtttacttccttttaatatacagtgggactaagaaccggtctgaccaacgttgtataatttctgttctaattacttactaaatctctgtatcttttctagtaaaaaatcaaaactaatgctttcatagaataaatgtgttttgaggtttttctc

SEQ ID NO: 36444 - protein, 589 aa, Arabidopsis thaliana
  peptide (1)..(589): Ceres Seq. ID no. 12370286
LKKKKEEKRERDSQIIISPSLTHNHFKEHWNQIHYIGIDMEKSNQPVHVTLSELKDGDKEIVDAEFLVDLLESYRFGKDNVPAREFRSKAAATAPAPVNTTEIELEEDNDGSQAQGNNSVSESTSSLFSDSDPIVLESTVSETGSNEESETGSNEENGNNWLESSSTNLPNVENKRQRNGEDCEIEEEEENNERSLSDSEEKSNLEKLLGTQENYELGNEDEEKNERSSSDSEEKSNLENFLATQENYELYCPSCSTCITRNVVLKKRKRGKHVNSSLDLKPDIPVVEPDEPSDIEEMESPVKVYVPETRIEDDQEDKEGTIFTCLVCDLKYFIRLGTKFLQLDYIRGKPVEKSVEEYIDVRKSINTTQSPPQIQPDGERFAIELLKSTVYGGLTETITSLGVVSSASASGSSTMNILALAVANLAGGLIVLAQNFQDLRNSSDQEKDRYEELLGRRTKSRIHILVAVMSYIFFGLIPPLVYAFSFYETGIKNYKLISVFLGSLVCVILLGSIKVYVRKPTNSCGSTKAYLKSAAYYTSIVVASCGISYVVGDIMGEYIEKLSLVGLDQISITSPCYGIKPEECRFTSF

SEQ ID NO: 36445 - protein, 550 aa, Arabidopsis thaliana
  peptide (1)..(550): Ceres Seq. ID no. 12370287
MEKSNQPVHVTLSELKDGDKEIVDAEFLVDLLESYRFGKDNVPAREFRSKAAATAPAPVNTTEIELEEDNDGSQAQGNNSVSESTSSLFSDSDPIVLESTVSETGSNEESETGSNEENGNNWLESSSTNLPNVENKRQRNGEDCEIEEEEENNERSLSDSEEKSNLEKLLGTQENYELGNEDEEKNERSSSDSEEKSNLENFLATQENYELYCPSCSTCITRNVVLKKRKRGKHVNSSLDLKPDIPVVEPDEPSDIEEMESPVKVYVPETRIEDDQEDKEGTIFTCLVCDLKYFIRLGTKFLQLDYIRGKPVEKSVEEYIDVRKSINTTQSPPQIQPDGERFAIELLKSTVYGGLTETITSLGVVSSASASGSSTMNILALAVANLAGGLIVLAQNFQDLRNSSDQEKDRYEELLGRRTKSRIHILVAVMSYIFFGLIPPLVYAFSFYETGIKNYKLISVFLGSLVCVILLGSIKVYVRKPTNSCGSTKAYLKSAAYYTSIVVASCGISYVVGDIMGEYIEKLSLVGLDQISITSPCYGIKPEECRFTSF

SEQ ID NO: 36446 - DNA, 1616 bp, Arabidopsis thaliana
  misc_feature (1)..(1616): Ceres Seq. ID no. 13493832
  misc_feature (1)..(1616): Ortholog of  Ceres SEQ ID NO 13594128 as cited in SEQ ID NO 58608
  misc_feature (1)..(1616): Ortholog of  Ceres SEQ ID NO 14309682 as cited in SEQ ID NO 58908
  misc_feature (1)..(1616): Ortholog of  Ceres SEQ ID NO 15176122 as cited in SEQ ID NO 62462
  misc_feature (1)..(1616): Ortholog of  Ceres SEQ ID NO 12624849 as cited in SEQ ID NO 62773
ccacgcgtccgcatctcttgttctctccgcccatctctgctctcttttattttcccagaaagtttttttttttttttttttccgaattccgttaatctcattggggtttccattgatagcaatggcgacggctttcgctcccactaagctcactgccacggttcctctgcatggatcccatgagaatcgtctcttgctcccgatccgattggctcctccttcttctttcctcggatccacccgttccctctcccttcgcagactcaatcactccaacgccacccgtcgatctcccgtcgtctctgtccaggaagttgtcaaggagaagcaatccaccaataataccagcctgttgataaccaaagaggaaggattggagttgtatgaagatatgatactaggtagatctttcgaagacatgtgtgctcaaatgtattaccgaggcaagatgtttggttttgttcacttgtacaatggccaagaggctgtttctactggctttatcaagctccttaccaagtctgactctgtcgttagtacctaccgtgaccatgtccatgccctcagcaaaggtgtctctgctcgtgctgttatgagcgagctcttcggcaaggttactggatgctgcagaggccaaggtggatccatgcacatgttctccaaagaacacaacatgcttggtggctttgcttttattggtgaaggcattcctgtcgccactggtgctgcctttagctccaagtacaggagggaagtcttgaaacaggattgtgatgatgtcactgtcgcctttttcggagatggaacttgtaacaacggacagttcttcgagtgtctcaacatggctgctctctataaactgcctattatctttgttgtcgagaataacttgtgggccattgggatgtctcacttgagagccacttctgaccccgagatttggaagaaaggtcctgcatttgggatgcctggtgttcatgttgacggtatggatgtcttgaaggtcagggaagtcgctaaagaagctgtcactagagctagaagaggagaaggtccaaccttggttgaatgtgagacttatagattcagaggacactccttggctgatcccgatgagctccgtgatgctgctgagaaagccaaatacgcggctagagacccaatcgcagcattgaagaagtatttgatagagaacaagcttgcaaaggaagcagagctaaagtcaatagagaaaaagatagacgagttggtggaggaagcggttgagtttgcagacgctagtccacagcccggtcgcagtcagttgctagagaatgtgtttgctgatccaaaaggatttggaattggacctgatggacggtacagatgtgaggaccccaagtttaccgaaggcacagctcaagtctgagaagacaagtttaaccataagctgtctactgtctcttcgatgtttctatatatcttattaagttaaatgctacagagaatcagtttgaatcatttgcactttttgctttttgtttggtgttactaaactatcacaaggttcttcttgtagttcgttgggttttcattggttaccacttaccagagaattgtatttttttttttaaagg

SEQ ID NO: 36447 - protein, 468 aa, Arabidopsis thaliana
  peptide (1)..(468): Ceres Seq. ID no. 13493833
HASASLVLSAHLCSLLFSQKVFFFFFFRIPLISLGFPLIAMATAFAPTKLTATVPLHGSHENRLLLPIRLAPPSSFLGSTRSLSLRRLNHSNATRRSPVVSVQEVVKEKQSTNNTSLLITKEEGLELYEDMILGRSFEDMCAQMYYRGKMFGFVHLYNGQEAVSTGFIKLLTKSDSVVSTYRDHVHALSKGVSARAVMSELFGKVTGCCRGQGGSMHMFSKEHNMLGGFAFIGEGIPVATGAAFSSKYRREVLKQDCDDVTVAFFGDGTCNNGQFFECLNMAALYKLPIIFVVENNLWAIGMSHLRATSDPEIWKKGPAFGMPGVHVDGMDVLKVREVAKEAVTRARRGEGPTLVECETYRFRGHSLADPDELRDAAEKAKYAARDPIAALKKYLIENKLAKEAELKSIEKKIDELVEEAVEFADASPQPGRSQLLENVFADPKGFGIGPDGRYRCEDPKFTEGTAQV

SEQ ID NO: 36448 - protein, 428 aa, Arabidopsis thaliana
  peptide (1)..(428): Ceres Seq. ID no. 13493834
MATAFAPTKLTATVPLHGSHENRLLLPIRLAPPSSFLGSTRSLSLRRLNHSNATRRSPVVSVQEVVKEKQSTNNTSLLITKEEGLELYEDMILGRSFEDMCAQMYYRGKMFGFVHLYNGQEAVSTGFIKLLTKSDSVVSTYRDHVHALSKGVSARAVMSELFGKVTGCCRGQGGSMHMFSKEHNMLGGFAFIGEGIPVATGAAFSSKYRREVLKQDCDDVTVAFFGDGTCNNGQFFECLNMAALYKLPIIFVVENNLWAIGMSHLRATSDPEIWKKGPAFGMPGVHVDGMDVLKVREVAKEAVTRARRGEGPTLVECETYRFRGHSLADPDELRDAAEKAKYAARDPIAALKKYLIENKLAKEAELKSIEKKIDELVEEAVEFADASPQPGRSQLLENVFADPKGFGIGPDGRYRCEDPKFTEGTAQV

SEQ ID NO: 36449 - protein, 338 aa, Arabidopsis thaliana; identical to SEQ ID NO: 24106
  peptide (1)..(338): Ceres Seq. ID no. 13493835

SEQ ID NO: 36450 - DNA, 956 bp, Arabidopsis thaliana
  misc_feature (1)..(956): Ceres Seq. ID no. 12395374
  misc_feature (1)..(956): Ortholog of  Ceres SEQ ID NO 12638274 as cited in SEQ ID NO 0
  misc_feature (1)..(956): Ortholog of  Ceres SEQ ID NO 13600563 as cited in SEQ ID NO 0
aaatgaaatgtatagagaggtaaagtgggaattttgacattggtgggtttagggaaaaaacagagagaaagagatggattcgtcgtcagtagggaacaccaacaggtactgggtcctccgccacggcaagagcattcccaacgagagaggcctcgtcgtctcttccatggaaaatggtgtcctccccgagtaccagttagcccctgatggtgtcgctcaggctcgtctcgccggcgaatcgttcctccagcaacttaaggaaagtaacatagaactggacaaggttcgcatttgctactcccccttctccagaaccactcacaccgctagggttgttgctgaggtcctcaatctcccctttgatgctcctcaatgcaagatgatggaagatctgcgcgaacgctattttggacctacatttgaactcaagtcccatgacaagtacccagagatatgggctcttgatgaaaaagatccttttatgggaccagaaggaggtgaaagtgctgatgatgttgtttcccgacttgccactgccatgaaatccatggaagctgaatatcaaaggtgtgcaattctggtggtgagtcatggagatcctctgcagatgttgcagaacgttttccattcagcaaagcaacaggaaggagatggtttggcagagaagtttcagttgagcagagttgcttctgtcttgtcacagcaccgcaagtttgctttgctcactggggaactccgacccctcatctgattggcaatcaatgtattcagcttttggaatgtctttccttgaactcttttgttatcaattcctatttctctcccattggcattcttgcaattgccaaacttggattagcctgtttattatcacctctgtttgttagagaaaacatgaagatttactcctgtaataagaaatcatgctcatttatgttatatgtatcttcaaatct

SEQ ID NO: 36451 - protein, 225 aa, Arabidopsis thaliana
  peptide (1)..(225): Ceres Seq. ID no. 12395375
MDSSSVGNTNRYWVLRHGKSIPNERGLVVSSMENGVLPEYQLAPDGVAQARLAGESFLQQLKESNIELDKVRICYSPFSRTTHTARVVAEVLNLPFDAPQCKMMEDLRERYFGPTFELKSHDKYPEIWALDEKDPFMGPEGGESADDVVSRLATAMKSMEAEYQRCAILVVSHGDPLQMLQNVFHSAKQQEGDGLAEKFQLSRVASVLSQHRKFALLTGELRPLI

SEQ ID NO: 36452 - protein, 194 aa, Arabidopsis thaliana
  peptide (1)..(194): Ceres Seq. ID no. 12395376
MENGVLPEYQLAPDGVAQARLAGESFLQQLKESNIELDKVRICYSPFSRTTHTARVVAEVLNLPFDAPQCKMMEDLRERYFGPTFELKSHDKYPEIWALDEKDPFMGPEGGESADDVVSRLATAMKSMEAEYQRCAILVVSHGDPLQMLQNVFHSAKQQEGDGLAEKFQLSRVASVLSQHRKFALLTGELRPLI

SEQ ID NO: 36453 - protein, 123 aa, Arabidopsis thaliana
  peptide (1)..(123): Ceres Seq. ID no. 12395377
MMEDLRERYFGPTFELKSHDKYPEIWALDEKDPFMGPEGGESADDVVSRLATAMKSMEAEYQRCAILVVSHGDPLQMLQNVFHSAKQQEGDGLAEKFQLSRVASVLSQHRKFALLTGELRPLI

SEQ ID NO: 36454 - DNA, 1348 bp, Arabidopsis thaliana
  misc_feature (1)..(1348): Ceres Seq. ID no. 13497108
  misc_feature (1)..(1348): Ortholog of  Ceres SEQ ID NO 13596359 as cited in SEQ ID NO 68396
cttcaccttccgtcgtagttccccgacaagctaactactgttgagccccgccgcatccgaagccgacttttcaaatcgtcgagcttcaacaatgacgtctcttctccttccttcatctcaatttctccagactcgaacccaaaacaatggccaaccattccttctccctctaacaccactgttcgcaccactaccttctctccgtcagttgagaccgaaacacatctctatttccgccgcagcgccgaagaaaaaatcggagactgtcacggcgccgacaccggcagcgaagaagaattcgagcgtggaggaggaaacagaagaggaagtagaggaagatatgccgtggattcaagagaaggcgttagacctagtcgagttcactggatcggtgagtcaggcgattcctggtcctcgagttggaagtagcaaattgccgtggatgctcgccgttccgttagcttacgccggcgtcactttcgtcactgctttcgtcaaaaccgttcagaagttctcttctcctaaagctcagcgcaagaaactggtgaatcagaatgctatgctttgcagatctatagatgagctattaaggaaagctggaacagtgcatagctctgagcttaaggcacttgaacaaaagacagagtttaacatggaggagatattgcggaaatacattcgttatgcgttgaatgagaaaccgtttaatcccgaccttgttgctgatctcattcatctaagaaaagcttctggtttgaatgattctcagattcctgagattttaaatgagatctctcgtcgtattgtcaaggaaaaaggtccggtagtgatgaaaatgcaaggctttaccgaaaaaggattcaagagaaaactcgccgtgcaagcgctttttggaaagatttactatctttctgagcttcctgacttctgctcaaaagacaactccttaatcgtcaaggaaatattcggcgttacagatgaagacgcagagaagctgcggatacacgctcttgctgaagctggagacatagaggcacttgagaaaatggtggaatttgagaaaactgcggagtcttcttcggataaagaagaagattcaaatgaagaagatgactctaacaccacttcctaagatgtttgttcaacgaccaactttcaacagtagattctttccaaagggggttttcttcttctgttctttgacttataccccaagttgtgttgtttacagcagaagacgtctgattccaacagaaattgtcttttgcaaaaaaccatgacacagctcgtaatacaaattaactgcatctatagtgcagcacagcaatacaagttggggcttatattc

SEQ ID NO: 36455 - protein, 346 aa, Arabidopsis thaliana
  peptide (1)..(346): Ceres Seq. ID no. 13497109
MTSLLLPSSQFLQTRTQNNGQPFLLPLTPLFAPLPSLRQLRPKHISISAAAPKKKSETVTAPTPAAKKNSSVEEETEEEVEEDMPWIQEKALDLVEFTGSVSQAIPGPRVGSSKLPWMLAVPLAYAGVTFVTAFVKTVQKFSSPKAQRKKLVNQNAMLCRSIDELLRKAGTVHSSELKALEQKTEFNMEEILRKYIRYALNEKPFNPDLVADLIHLRKASGLNDSQIPEILNEISRRIVKEKGPVVMKMQGFTEKGFKRKLAVQALFGKIYYLSELPDFCSKDNSLIVKEIFGVTDEDAEKLRIHALAEAGDIEALEKMVEFEKTAESSSDKEEDSNEEDDSNTTS

SEQ ID NO: 36456 - protein, 263 aa, Arabidopsis thaliana
  peptide (1)..(263): Ceres Seq. ID no. 13497110
MPWIQEKALDLVEFTGSVSQAIPGPRVGSSKLPWMLAVPLAYAGVTFVTAFVKTVQKFSSPKAQRKKLVNQNAMLCRSIDELLRKAGTVHSSELKALEQKTEFNMEEILRKYIRYALNEKPFNPDLVADLIHLRKASGLNDSQIPEILNEISRRIVKEKGPVVMKMQGFTEKGFKRKLAVQALFGKIYYLSELPDFCSKDNSLIVKEIFGVTDEDAEKLRIHALAEAGDIEALEKMVEFEKTAESSSDKEEDSNEEDDSNTTS

SEQ ID NO: 36457 - protein, 229 aa, Arabidopsis thaliana
  peptide (1)..(229): Ceres Seq. ID no. 13497111
MLAVPLAYAGVTFVTAFVKTVQKFSSPKAQRKKLVNQNAMLCRSIDELLRKAGTVHSSELKALEQKTEFNMEEILRKYIRYALNEKPFNPDLVADLIHLRKASGLNDSQIPEILNEISRRIVKEKGPVVMKMQGFTEKGFKRKLAVQALFGKIYYLSELPDFCSKDNSLIVKEIFGVTDEDAEKLRIHALAEAGDIEALEKMVEFEKTAESSSDKEEDSNEEDDSNTTS

SEQ ID NO: 36458 - DNA, 1350 bp, Arabidopsis thaliana
  misc_feature (1)..(1350): Ceres Seq. ID no. 12421311
  misc_feature (1)..(1350): Ortholog of  Ceres SEQ ID NO 13594037 as cited in SEQ ID NO 55666
  misc_feature (1)..(1350): Ortholog of  Ceres SEQ ID NO 15171501 as cited in SEQ ID NO 58322
acatagccatatatttttttggtcgtactttgtatctttggcaaaacacaaaaaacaaaaacaaaaaaaaactccttatatttttgtatttgatgctaattgtcgtatagatgcccaaattcaattcaacccaagctcccaatttatttcttctccttctcctccttctcgttatccttctttgttcaacgcaaacacaatgccacaccaaaggtctacgattacgaccaagaaaccagaagaatatgaacacgacgagagatcggacacaaaacccggaagatgagttcatgaaatgggtgagattcgttggaagccttaaacactcagtgttcaaggcagccaagaacaaactcttcccttcttatacactaactgtccacaagaaatccaataaaggtgacttcactaaaatccaagacgccattgattctctccctctcatcaactttgttcgtgtcgtcatcaaggttcatgccggngtttacaaggagaaggtgagcatacccccactgaaggcatttataacaatagaaggagaaggagcagagaagacaacagtggaatggggagacacagcacaaacccctgactcaaaaggcaaccccatgggcacttacaactcggcctcgttcgcggtcaactctcctttctttgtcgctaagaatatcacattcaggaacacgaccccagtccccttgcccggtgcagttggtaaacaggcggtagcattgagggtgtcggcagacaatgccgcgttttttgggtgtagaatgcttggtgctcaagacactctctatgaccatttgggaagacattattacaaagattgttacattgagggatcagtggacttcatctttggaaatgccctttctctttatgaagggtgccacgtgcatgcgatagcggataagctaggagcagtgacggcacaggggaggagcagtgttctagaggacaccggattctcgttcgtaaagtgtaaggtgacagggacaggggttttgtatcttgggagggcatggggtcccttctcaagagtcgtttttgcttacacttacatggacaacatcatcctccctagaggctggtacaattggggagacccttcccgtgagatgacggtgttctatgggcagtacaagtgcacgggagcaggagcaaactatggagggagggtggcttgggcaagagagctcaccgacgaagaagctaagccttttctttctcttacctttatcgacggctctgaatggatcaaactctaaccatatacacctttttttattttctttccacctaattaataatgtacattttccctgtaataaaataaaaatatttttt

SEQ ID NO: 36459 - protein, 386 aa, Arabidopsis thaliana
  peptide (1)..(386): Ceres Seq. ID no. 12421312
  misc_feature (124)..(124): Xaa is any aa, unknown or other
MPKFNSTQAPNLFLLLLLLLVILLCSTQTQCHTKGLRLRPRNQKNMNTTRDRTQNPEDEFMKWVRFVGSLKHSVFKAAKNKLFPSYTLTVHKKSNKGDFTKIQDAIDSLPLINFVRVVIKVHAXVYKEKVSIPPLKAFITIEGEGAEKTTVEWGDTAQTPDSKGNPMGTYNSASFAVNSPFFVAKNITFRNTTPVPLPGAVGKQAVALRVSADNAAFFGCRMLGAQDTLYDHLGRHYYKDCYIEGSVDFIFGNALSLYEGCHVHAIADKLGAVTAQGRSSVLEDTGFSFVKCKVTGTGVLYLGRAWGPFSRVVFAYTYMDNIILPRGWYNWGDPSREMTVFYGQYKCTGAGANYGGRVAWARELTDEEAKPFLSLTFIDGSEWIKL

SEQ ID NO: 36460 - protein, 341 aa, Arabidopsis thaliana
  peptide (1)..(341): Ceres Seq. ID no. 12421313
  misc_feature (79)..(79): Xaa is any aa, unknown or other
MNTTRDRTQNPEDEFMKWVRFVGSLKHSVFKAAKNKLFPSYTLTVHKKSNKGDFTKIQDAIDSLPLINFVRVVIKVHAXVYKEKVSIPPLKAFITIEGEGAEKTTVEWGDTAQTPDSKGNPMGTYNSASFAVNSPFFVAKNITFRNTTPVPLPGAVGKQAVALRVSADNAAFFGCRMLGAQDTLYDHLGRHYYKDCYIEGSVDFIFGNALSLYEGCHVHAIADKLGAVTAQGRSSVLEDTGFSFVKCKVTGTGVLYLGRAWGPFSRVVFAYTYMDNIILPRGWYNWGDPSREMTVFYGQYKCTGAGANYGGRVAWARELTDEEAKPFLSLTFIDGSEWIKL

SEQ ID NO: 36461 - protein, 326 aa, Arabidopsis thaliana
  peptide (1)..(326): Ceres Seq. ID no. 12421314
  misc_feature (64)..(64): Xaa is any aa, unknown or other
MKWVRFVGSLKHSVFKAAKNKLFPSYTLTVHKKSNKGDFTKIQDAIDSLPLINFVRVVIKVHAXVYKEKVSIPPLKAFITIEGEGAEKTTVEWGDTAQTPDSKGNPMGTYNSASFAVNSPFFVAKNITFRNTTPVPLPGAVGKQAVALRVSADNAAFFGCRMLGAQDTLYDHLGRHYYKDCYIEGSVDFIFGNALSLYEGCHVHAIADKLGAVTAQGRSSVLEDTGFSFVKCKVTGTGVLYLGRAWGPFSRVVFAYTYMDNIILPRGWYNWGDPSREMTVFYGQYKCTGAGANYGGRVAWARELTDEEAKPFLSLTFIDGSEWIKL

SEQ ID NO: 36462 - DNA, 1993 bp, Arabidopsis thaliana
  misc_feature (1)..(1993): Ceres Seq. ID no. 13497104
  misc_feature (1)..(1993): Ortholog of  Ceres SEQ ID NO 14307831 as cited in SEQ ID NO 54732
cataaaactcaaaaatctttggtcttcaaacttcaaacacttgagaaaaaagcttttgatttcacatcttaatctaacaagtcaaacacttttcaaaccacaaaattcgtcaaagctctgaaacaaataaacattttttaatttctccctttttaatggaaatctcttctttcccatttccatacctacaagacgacgagtgttcccatttccttggtctatttcaagacatggactcttctccttctactttcggattagaaggttttaatagcaacgacaataatactaatcaaaagaaacgcccaagaaaagacgacgaaggcggtggtggtggcggcggaggaacagaagttctaggagctgttaatggtaataataaggctgcttttggagatatactcgcgacgcttctgttgttagacgaggaagctaaacagcaacaagaacagtgggattttgaatttattaaagagaagtctttacttgaagctaatcataagaagaaagtgaaaacaatggatggttattacaatcaaatgcaagatcattactctgcagctggtgaaaccgatggttcgcgttcaaaacgcgcacggaaaaccgcggttgcggctgtggtttccgcggtagcttccggggcggacacaaccggtttagctgctccggttccgaccgcggatatcgctagcggttccgggtcaggaccgagtcataggaggttatgggttaaagaacgaaccacggactggtgggacagagtaagccggcctgattttccagaagacgagtttcggcgagagttccgtatgagcaaatcgacgtttaacctaatatgcgaggagctagatacgacggtgacgaagaaaaacacgatgttaagagacgcgattccagctccaaaacgcgtaggcgtttgcgtttggcgtttggcgacaggagctccgcttcgccacgtgtcggagcgtttcggtctgggaatctcaacttgccacaaactagtcatcgaagtctgccgcgcgatctacgacgttctcatgcccaagtatctcctctggccgtcggattcagagataaactcaacgaaagccaaattcgaatcggtccacaaaataccaaacgtcgtcggatcaatctacaccacacatattccgatcatcgctccgaaagtccacgtggcggcgtattttaacaagagacacacggagaggaatcagaagacgtcgtactcgataacagtacaaggagtggtcaacgccgacgggatcttcaccgacgtttgtatcggaaacccaggatctctcaccgacgatcagatcctggagaaatcttcgctttcacggcaaagagcggcgcgtgggatgttacgtgacagctggatagttggaaactctgggtttccgttgactgattatcttcttgtaccgtacacgagacagaatctgacgtggacgcagcacgcgtttaacgagagtatcggagagattcaggggattgcgacggctgcgtttgagaggctcaaaggacggtgggcttgtttgcagaaacggacggaggtgaagcttcaggatctgccgtacgtgcttggagcttgttgtgtgttgcataacatttgtgagatgaggaaggaggagatgttgccggagttgaagtttgaggtttttgatgatgtggcggtgccggagaataatatccgatctgctagtgcggttaatacgagggatcatatctctcacaatctcttgcatcgtggacttgccgggacaagaactctataggctctgtttttcaccttttcttattttgaaactgattttttattgcaaattctttttccaaattaggaataaaaacattttagggattggttggatacagaaagaatagttgaattgagagtagaagtggctgatgatattgtttgtgttacttattagcattgtgtaatctttagttcatgtattttctatacaaattgaatctgaaacctctt

SEQ ID NO: 36463 - protein, 540 aa, Arabidopsis thaliana
  peptide (1)..(540): Ceres Seq. ID no. 13497105
MEISSFPFPYLQDDECSHFLGLFQDMDSSPSTFGLEGFNSNDNNTNQKKRPRKDDEGGGGGGGGTEVLGAVNGNNKAAFGDILATLLLLDEEAKQQQEQWDFEFIKEKSLLEANHKKKVKTMDGYYNQMQDHYSAAGETDGSRSKRARKTAVAAVVSAVASGADTTGLAAPVPTADIASGSGSGPSHRRLWVKERTTDWWDRVSRPDFPEDEFRREFRMSKSTFNLICEELDTTVTKKNTMLRDAIPAPKRVGVCVWRLATGAPLRHVSERFGLGISTCHKLVIEVCRAIYDVLMPKYLLWPSDSEINSTKAKFESVHKIPNVVGSIYTTHIPIIAPKVHVAAYFNKRHTERNQKTSYSITVQGVVNADGIFTDVCIGNPGSLTDDQILEKSSLSRQRAARGMLRDSWIVGNSGFPLTDYLLVPYTRQNLTWTQHAFNESIGEIQGIATAAFERLKGRWACLQKRTEVKLQDLPYVLGACCVLHNICEMRKEEMLPELKFEVFDDVAVPENNIRSASAVNTRDHISHNLLHRGLAGTRTL

SEQ ID NO: 36464 - protein, 515 aa, Arabidopsis thaliana
  peptide (1)..(515): Ceres Seq. ID no. 13497106
MDSSPSTFGLEGFNSNDNNTNQKKRPRKDDEGGGGGGGGTEVLGAVNGNNKAAFGDILATLLLLDEEAKQQQEQWDFEFIKEKSLLEANHKKKVKTMDGYYNQMQDHYSAAGETDGSRSKRARKTAVAAVVSAVASGADTTGLAAPVPTADIASGSGSGPSHRRLWVKERTTDWWDRVSRPDFPEDEFRREFRMSKSTFNLICEELDTTVTKKNTMLRDAIPAPKRVGVCVWRLATGAPLRHVSERFGLGISTCHKLVIEVCRAIYDVLMPKYLLWPSDSEINSTKAKFESVHKIPNVVGSIYTTHIPIIAPKVHVAAYFNKRHTERNQKTSYSITVQGVVNADGIFTDVCIGNPGSLTDDQILEKSSLSRQRAARGMLRDSWIVGNSGFPLTDYLLVPYTRQNLTWTQHAFNESIGEIQGIATAAFERLKGRWACLQKRTEVKLQDLPYVLGACCVLHNICEMRKEEMLPELKFEVFDDVAVPENNIRSASAVNTRDHISHNLLHRGLAGTRTL

SEQ ID NO: 36465 - protein, 419 aa, Arabidopsis thaliana
  peptide (1)..(419): Ceres Seq. ID no. 13497107
MDGYYNQMQDHYSAAGETDGSRSKRARKTAVAAVVSAVASGADTTGLAAPVPTADIASGSGSGPSHRRLWVKERTTDWWDRVSRPDFPEDEFRREFRMSKSTFNLICEELDTTVTKKNTMLRDAIPAPKRVGVCVWRLATGAPLRHVSERFGLGISTCHKLVIEVCRAIYDVLMPKYLLWPSDSEINSTKAKFESVHKIPNVVGSIYTTHIPIIAPKVHVAAYFNKRHTERNQKTSYSITVQGVVNADGIFTDVCIGNPGSLTDDQILEKSSLSRQRAARGMLRDSWIVGNSGFPLTDYLLVPYTRQNLTWTQHAFNESIGEIQGIATAAFERLKGRWACLQKRTEVKLQDLPYVLGACCVLHNICEMRKEEMLPELKFEVFDDVAVPENNIRSASAVNTRDHISHNLLHRGLAGTRTL

SEQ ID NO: 36466 - DNA, 1429 bp, Arabidopsis thaliana
  misc_feature (1)..(1429): Ceres Seq. ID no. 12489625
  misc_feature (1)..(1429): Ortholog of  Ceres SEQ ID NO 14304359 as cited in SEQ ID NO 52581
aaaatctcctccaactccgagttatggctacatgttccctcttaccaccaccgtctttttctccgcgccggcgattctgtagtttttctcacaatcgccggtctctaccttcaatattcagtttcaacaaagagcgtgtctcacgaagagtcttctgtagctccaaagagaacgatataaacagagatcggaatcagtctacaggaattcaagtctacggcgaaatcgagaggttattaacagagactgtaaaaaattctcagagtagctccggtggatcctctgattggtcagaagttgagggagcatgggtgctgaaaccaagaaactcgaaaccgaagatggttgttcatttcattggcggtatatttgtcggtgcagcaccacagcttacttatcgattgtttctcgagagattagcggagaaggatgttttggttattgcgacaccatatgctagtggttttgaccacttcaatattgcagatgaagtacaatttaagtatgatagatgttgccgatctctacaagaagaagtgcaggatcttccgtcttttgggatcggtcattcactgggatctgttattcaccttctgattggatcaaggtatgctgttcagcgaaatgggaacgtatttatggcattcaacaacaaggaagcaagcttagctattcctttgttctccccagttcttgtcccgatggctcaaagccttggaccactgttgtcacaggtggcaacatccccaacaatccgccttggggcagagatgacgcgaaagcaattagaaacgcttagccctcccatcatgaagcaaattctgcctttagtggaacagctccctcccttgtacatggacttagtaaagggaagagaagattttgttccaaaaccagaagaaacaagacgccttataagatcctactatggaatctctaggaatctgttgataaaattcgaggatgattcaatagatgaaacatcaatcctagctcaggtgcttggtgtggaatcatccataagctcaaagctagacatgtctatccgtacactgcccggagatcacggtctccctctgcaacaggctcttccggatgttccaccaggaatggcagaagcggtgaatcgaggaagtgagtttttagcgaatattgctgtcgggactccgtgggaatctatggctaaagaggttggaggttcgctgggaatggactcgaagatccttcgtgctgacatgtccaaagatcttgcgcagctcgttgatgcaatcacttcttggatgatttcaaatatgggtccaaagcttctgagaccataatgttttctcatgtacacaaaacatacaaaaatctattaacacagggcgattgcatactatttaatgtaatgtaactgtatatattataacatgaagagtttggttataca

SEQ ID NO: 36467 - protein, 438 aa, Arabidopsis thaliana
  peptide (1)..(438): Ceres Seq. ID no. 12489626
NLLQLRVMATCSLLPPPSFSPRRRFCSFSHNRRSLPSIFSFNKERVSRRVFCSSKENDINRDRNQSTGIQVYGEIERLLTETVKNSQSSSGGSSDWSEVEGAWVLKPRNSKPKMVVHFIGGIFVGAAPQLTYRLFLERLAEKDVLVIATPYASGFDHFNIADEVQFKYDRCCRSLQEEVQDLPSFGIGHSLGSVIHLLIGSRYAVQRNGNVFMAFNNKEASLAIPLFSPVLVPMAQSLGPLLSQVATSPTIRLGAEMTRKQLETLSPPIMKQILPLVEQLPPLYMDLVKGREDFVPKPEETRRLIRSYYGISRNLLIKFEDDSIDETSILAQVLGVESSISSKLDMSIRTLPGDHGLPLQQALPDVPPGMAEAVNRGSEFLANIAVGTPWESMAKEVGGSLGMDSKILRADMSKDLAQLVDAITSWMISNMGPKLLRP

SEQ ID NO: 36468 - protein, 431 aa, Arabidopsis thaliana
  peptide (1)..(431): Ceres Seq. ID no. 12489627
MATCSLLPPPSFSPRRRFCSFSHNRRSLPSIFSFNKERVSRRVFCSSKENDINRDRNQSTGIQVYGEIERLLTETVKNSQSSSGGSSDWSEVEGAWVLKPRNSKPKMVVHFIGGIFVGAAPQLTYRLFLERLAEKDVLVIATPYASGFDHFNIADEVQFKYDRCCRSLQEEVQDLPSFGIGHSLGSVIHLLIGSRYAVQRNGNVFMAFNNKEASLAIPLFSPVLVPMAQSLGPLLSQVATSPTIRLGAEMTRKQLETLSPPIMKQILPLVEQLPPLYMDLVKGREDFVPKPEETRRLIRSYYGISRNLLIKFEDDSIDETSILAQVLGVESSISSKLDMSIRTLPGDHGLPLQQALPDVPPGMAEAVNRGSEFLANIAVGTPWESMAKEVGGSLGMDSKILRADMSKDLAQLVDAITSWMISNMGPKLLRP

SEQ ID NO: 36469 - protein, 325 aa, Arabidopsis thaliana
  peptide (1)..(325): Ceres Seq. ID no. 12489628
MVVHFIGGIFVGAAPQLTYRLFLERLAEKDVLVIATPYASGFDHFNIADEVQFKYDRCCRSLQEEVQDLPSFGIGHSLGSVIHLLIGSRYAVQRNGNVFMAFNNKEASLAIPLFSPVLVPMAQSLGPLLSQVATSPTIRLGAEMTRKQLETLSPPIMKQILPLVEQLPPLYMDLVKGREDFVPKPEETRRLIRSYYGISRNLLIKFEDDSIDETSILAQVLGVESSISSKLDMSIRTLPGDHGLPLQQALPDVPPGMAEAVNRGSEFLANIAVGTPWESMAKEVGGSLGMDSKILRADMSKDLAQLVDAITSWMISNMGPKLLRP

SEQ ID NO: 36470 - DNA, 618 bp, Arabidopsis thaliana
  misc_feature (1)..(618): Ceres Seq. ID no. 12603263
  misc_feature (1)..(618): Ortholog of  Ceres SEQ ID NO 12473409 as cited in SEQ ID NO 104
  misc_feature (1)..(618): Ortholog of  Ceres SEQ ID NO 15170477 as cited in SEQ ID NO 52825
  misc_feature (1)..(618): Ortholog of  Ceres SEQ ID NO 13595055 as cited in SEQ ID NO 55744
  misc_feature (1)..(618): Ortholog of  Ceres SEQ ID NO 13662009 as cited in SEQ ID NO 61951
atcctaatcgaaaaattggttggatcatacacattgtgacaagaaacagttatttggctcatgagagaagaatgttgctttttgtgctttagagtaaacatatcttgattctctataccatcagataacgattttggttatcactagcattgatattctacgattttagatagttcaagtggtcaatgactcgacatgggactctctagttcttaaagcaactgggcctgtagttgtcgacttttgggcaccatggtgtggaccttgcaagatgattgatccgcttgtaaacgatctagcacagcattacactgggaagatcaagttctacaaattaaacactgatgaatctcctaatactcccggccagtacggagttagaagcatcccaacgatcatgatctttgtcggtggcgagaagaaggatacaatcataggtgcagtgcccaaaaccacactcacatctagcctcgacaagttcttgccatgaaatatcacttgtggagtctgtaagatctcgtatctctctgtctctcgttcttgttctcattatctctgtaactcattatcactgaacatctagacctggataaataatatgatgtcatgtcttatgtc

SEQ ID NO: 36471 - protein, 72 aa, Arabidopsis thaliana
  peptide (1)..(72): Ceres Seq. ID no. 12603264
MIDPLVNDLAQHYTGKIKFYKLNTDESPNTPGQYGVRSIPTIMIFVGGEKKDTIIGAVPKTTLTSSLDKFLP

SEQ ID NO: 36472 - DNA, 1226 bp, Arabidopsis thaliana
  misc_feature (1)..(1226): Ceres Seq. ID no. 12330458
  misc_feature (1)..(1226): Ortholog of  Ceres SEQ ID NO 15178302 as cited in SEQ ID NO 0
aacttaatttattttaggcccatgggaagaaaagtcttctgcgttaataatttctagatctttccacaacattcatacgcaactcccttaaatcttgaaacgaccaatttcttcaaaacaatagtttgtttgcgatggcgacagaacaagaagctgaagttggaacagagacatcctctgtttccggaaggtttttgaggaacagagatttatatctcttcttgccttttctcttaggcttctctgatcaagaatcatcaaacggagatgatgatgatgttgcttcatcgcgtgagagaatcattttagtcaacccttttacacaaggaatgattgtgctcgaaggctcatcaggaatgaatcctctgcttcgtagcttactggagtcacgtgaggaaggtcgtcctcctgcgtccaaggcttccatcgatgcgatgccgatcgttgagattgatggctgtgaaggagagtgtgtgatctgtttggaggagtggaagtccgaggagacggtgaaggagatgccgtgtaagcataggtttcacggtggatgtatagagaaatggttagggtttcatgggtcgtgtcctgtttgtaggtacgagatgcctgttgatggagatgagattgggaagaaaagaaacgatgggaatgagatttgggttaggttcagtttcaacgatggtcggagaattagagatttttctgcgcaggacggtggaaacagtgatggtgttgagtccgagaattaggatttacataagaagcttttgtaaaaaaaacttgtgcctttttttgttcttgttctgggaaaaggttgatgaactttttttgtcttaagatggtacaaagtaagctcaggaatctccataatcctcatcaaaccctgaggcatcacttctgatatcacacataacaaagagaaaaaaatgaaaaaacaatcaagaaatgtgcataagaccaaaccacaaacacttcttgattccttgattaagagttttcagaaggacaaagaagatagagacgaactttctggcccaccaagttgattaacagcatcgatgaatctgttttgaagctcacaactccatttcaatctctccttagattcctttgacttatggttcttatcatttaccatgttctgtagtaacaatcaagaatgatcccaaacgcaaaaacattactctggccacaataaagattaaaaagaaggattttattttcac

SEQ ID NO: 36473 - protein, 204 aa, Arabidopsis thaliana
  peptide (1)..(204): Ceres Seq. ID no. 12330459
MATEQEAEVGTETSSVSGRFLRNRDLYLFLPFLLGFSDQESSNGDDDDVASSRERIILVNPFTQGMIVLEGSSGMNPLLRSLLESREEGRPPASKASIDAMPIVEIDGCEGECVICLEEWKSEETVKEMPCKHRFHGGCIEKWLGFHGSCPVCRYEMPVDGDEIGKKRNDGNEIWVRFSFNDGRRIRDFSAQDGGNSDGVESEN

SEQ ID NO: 36474 - protein, 139 aa, Arabidopsis thaliana
  peptide (1)..(139): Ceres Seq. ID no. 12330460
MIVLEGSSGMNPLLRSLLESREEGRPPASKASIDAMPIVEIDGCEGECVICLEEWKSEETVKEMPCKHRFHGGCIEKWLGFHGSCPVCRYEMPVDGDEIGKKRNDGNEIWVRFSFNDGRRIRDFSAQDGGNSDGVESEN

SEQ ID NO: 36475 - protein, 130 aa, Arabidopsis thaliana
  peptide (1)..(130): Ceres Seq. ID no. 12330461
MNPLLRSLLESREEGRPPASKASIDAMPIVEIDGCEGECVICLEEWKSEETVKEMPCKHRFHGGCIEKWLGFHGSCPVCRYEMPVDGDEIGKKRNDGNEIWVRFSFNDGRRIRDFSAQDGGNSDGVESEN

SEQ ID NO: 36476 - DNA, 862 bp, Arabidopsis thaliana
  misc_feature (1)..(862): Ceres Seq. ID no. 12337124
  misc_feature (1)..(862): Ortholog of  Ceres SEQ ID NO 12610385 as cited in SEQ ID NO 55938
  misc_feature (1)..(862): Ortholog of  Ceres SEQ ID NO 13661939 as cited in SEQ ID NO 61170
  misc_feature (1)..(862): Ortholog of  Ceres SEQ ID NO 14309611 as cited in SEQ ID NO 0
attgtcaatttccctttattttctcgacggaatcataaataaaaaccctaaacctaaagtcacaaattcattcttcatctgttattcacgatttgtgttgtcttttcttttgcagtaagatttcgactttagaattgggagatctttccattatgggttctgagcaaaacgacagcacaagcttctctccttcagagccaaagctctgcgtcaaaggatgtggcttcttcggatctccatcgaacatgaacctctgctctaaatgctaccagagacatccgagccacggaggaacaaaccgcttccgctaaagccgccgtcgagaaatctctaaaccctaataaacccaaaactcaaccacaacagagccaagaaatcactcaaggcgtcctcggatctggatcgtcttcctcatcaacgagagggggtgattcggctgctgctccgttggatccaccgaaatcgacggctacgagatgcttgagctgtaacaagaaagttggcgtgacgggtttcaagtgtaggtgtggaagcactttctgtggaactcatagatatccagagagtcacgagtgccaattcgatttcaaaggagttgcgagagaagctattgctaaagctaatcctgtggtgaaggctgataaggttgataggatatgaattggtgaagaaactgttgtgttctcttttgtttttttattttcaagtctcgtgatgttggtggtttggctctctgttttctgctcttattatggttttatttgcttttagggtttcttaggaaaggccttagattctgctattatgtggtttcatgttttgcaacattggatttgttgttctgtaataaagtgttggttat

SEQ ID NO: 36477 - protein, 52 aa, Arabidopsis thaliana
  peptide (1)..(52): Ceres Seq. ID no. 12337125
MGSEQNDSTSFSPSEPKLCVKGCGFFGSPSNMNLCSKCYQRHPSHGGTNRFR

SEQ ID NO: 36478 - protein, 38 aa, Arabidopsis thaliana
  peptide (1)..(38): Ceres Seq. ID no. 12337126
LSISLYFLDGIINKNPKPKVTNSFFICYSRFVLSFLLQ

SEQ ID NO: 36479 - DNA, 913 bp, Arabidopsis thaliana
  misc_feature (1)..(913): Ceres Seq. ID no. 12338821
  misc_feature (1)..(913): Ortholog of  Ceres SEQ ID NO 14316300 as cited in SEQ ID NO 59995
  misc_feature (1)..(913): Ortholog of  Ceres SEQ ID NO 13662758 as cited in SEQ ID NO 64912
  misc_feature (1)..(913): Ortholog of  Ceres SEQ ID NO 13595881 as cited in SEQ ID NO 67709
  misc_feature (1)..(913): Ortholog of  Ceres SEQ ID NO 12614145 as cited in SEQ ID NO 67937
gagagaatccattttcttttaatcgccatgggtttcgctttgtgcattcgtagatcagcttctactttagcttccgtgtgtggtcgtgtggctcgagctcaagccgtctccgctatcgttaatcgctcgtctcttgttcccaagccatctctgcttcggcccttcgtctctcgtggctttccttattcgacggccactgagccgttaaagtccgatcagacgcttatacaagtgattgactctgagatcaaggattctttcgaagcagatgatcacgatgcggatgaagagacgatagactctagtgactttcctttcaaaatcgaagataatcctggacacaggactgtgacattgactagagaatacaatggagagcagattaaagtagaagtaagcatgcctggtcttgccatggatgaaaatgaagatgatgtggatgacgatgaagatggtgatggtcgtcatgagaaatcgaatgaatcaagcattccacttgttgtcactgtgaccaagaagagtggacttagcctagagtttagctgcactgctttccctgatgagattgtcattgatggtttgtctgtgaaccgtccagatgattcttctgaagaacagttgacttatgatgggccagattttcaggagttggatgagaatatgcgcaagtcgttccacaagtttctagagacgagaggaatcaaagcaagcgcaacggatttcttgtatgagtacatgatgaagaaagatagcagagagtacttactatggttgaagaagctcaaaacctttgtccaagaatgaaggagacacgcttaagtagagtaagagctagattgttttatgtttgcagatttcatttgtaatgacttttgagttcacaatggggttttgaatgtgaaatgccgatttg

SEQ ID NO: 36480 - protein, 267 aa, Arabidopsis thaliana
  peptide (1)..(267): Ceres Seq. ID no. 12338822
ERIHFLLIAMGFALCIRRSASTLASVCGRVARAQAVSAIVNRSSLVPKPSLLRPFVSRGFPYSTATEPLKSDQTLIQVIDSEIKDSFEADDHDADEETIDSSDFPFKIEDNPGHRTVTLTREYNGEQIKVEVSMPGLAMDENEDDVDDDEDGDGRHEKSNESSIPLVVTVTKKSGLSLEFSCTAFPDEIVIDGLSVNRPDDSSEEQLTYDGPDFQELDENMRKSFHKFLETRGIKASATDFLYEYMMKKDSREYLLWLKKLKTFVQE

SEQ ID NO: 36481 - protein, 258 aa, Arabidopsis thaliana
  peptide (1)..(258): Ceres Seq. ID no. 12338823
MGFALCIRRSASTLASVCGRVARAQAVSAIVNRSSLVPKPSLLRPFVSRGFPYSTATEPLKSDQTLIQVIDSEIKDSFEADDHDADEETIDSSDFPFKIEDNPGHRTVTLTREYNGEQIKVEVSMPGLAMDENEDDVDDDEDGDGRHEKSNESSIPLVVTVTKKSGLSLEFSCTAFPDEIVIDGLSVNRPDDSSEEQLTYDGPDFQELDENMRKSFHKFLETRGIKASATDFLYEYMMKKDSREYLLWLKKLKTFVQE

SEQ ID NO: 36482 - protein, 134 aa, Arabidopsis thaliana
  peptide (1)..(134): Ceres Seq. ID no. 12338824
MPGLAMDENEDDVDDDEDGDGRHEKSNESSIPLVVTVTKKSGLSLEFSCTAFPDEIVIDGLSVNRPDDSSEEQLTYDGPDFQELDENMRKSFHKFLETRGIKASATDFLYEYMMKKDSREYLLWLKKLKTFVQE

SEQ ID NO: 36483 - DNA, 1551 bp, Arabidopsis thaliana
  misc_feature (1)..(1551): Ceres Seq. ID no. 12367021
  misc_feature (1)..(1551): Ortholog of  Ceres SEQ ID NO 12625388 as cited in SEQ ID NO 63299
  misc_feature (1)..(1551): Ortholog of  Ceres SEQ ID NO 15179860 as cited in SEQ ID NO 66716
atttcttcattcgtaaacaaacacacacgaagcaaaaacaaaaatgaaaactactcatttctcttcctcttcttcttccgatcgcaggatcggtgctctgctccgtcatctcaattccggctcagattcggacaacctgagctctctttatgcatctccgacatcgggaggcaccggtggttctgttttctctcatcttgttcaagctccagaggatcctattcttggggtgacagttgcatacaacaaagatcctagcccagttaagctgaatttaggagttggtgcttaccgaactgaggagggaaaacctttggttcttaatgttgtgaggaaagctgagcagcagcttatcaatgacagaacaagaatcaaggagtatcttcccattgttggattggttgagttcaacaagttaagcgctaagctcatactaggcgctgacagtcctgctattcgggagaatcggattaccaccgtggagtgtttgtctggtactggttctctgagagttggaggagagtttttggctaaacattatcatcagaaaacaatttacatcactcagccaacatggggaaatcatccaaagattttcacgctcgctggtttgacagtgaaaacttaccgatactacgatccagcgacgcgtgggttgaactttcaaggtttattagaagaccttggtgctgccgcacctggttctatagtgcttctccatgcctgtgcccataaccctactggtgttgatccaaccattcaacaatgggagcaaatcaggaagttgatgcgatcaaagggattgatgcccttcttcgatagtgcttatcagggctttgcaagtggaagtcttgatacagatgcgaaacctattaggatgtttgttgctgatggcggagaatgcctcgttgctcaaagttatgcgaagaacatgggactctatggagaacgagttggagctctcagcattgtatgcaaatcagcagatgttgcggggagagttgaaagccaactgaaactagtgataaggccaatgtactcgagtcctccaatccatggtgcatcaatcgtggctgtaatcctccgtgacaagaatttgttcaacgaatggactctggaactgaaggccatggctgatcgtatcatcagcatgaggaaacagcttttcgaggcattacgtactcgaggcactcctggagactggagtcacatcataaagcagattggtatgtttaccttcacagggttaaacccagctcaagtctccttcatgactaaagagtaccacatctacatgacatctgacgggaggataagcatggctggtctgagttcgaagactgtacctcaccttgcagacgctatccatgctgttgtcaccaaagccgtctgagaaactgaacaccaccatgacaccaaagcttcataataaagattttgttcttttctttctattatagcatttccggcagtgacaagataaatgtcgttactattattattgtttcatcccagtatcaataaagtacgcaagaaagcttttgtgctccc

SEQ ID NO: 36484 - protein, 449 aa, Arabidopsis thaliana
  peptide (1)..(449): Ceres Seq. ID no. 12367022
MKTTHFSSSSSSDRRIGALLRHLNSGSDSDNLSSLYASPTSGGTGGSVFSHLVQAPEDPILGVTVAYNKDPSPVKLNLGVGAYRTEEGKPLVLNVVRKAEQQLINDRTRIKEYLPIVGLVEFNKLSAKLILGADSPAIRENRITTVECLSGTGSLRVGGEFLAKHYHQKTIYITQPTWGNHPKIFTLAGLTVKTYRYYDPATRGLNFQGLLEDLGAAAPGSIVLLHACAHNPTGVDPTIQQWEQIRKLMRSKGLMPFFDSAYQGFASGSLDTDAKPIRMFVADGGECLVAQSYAKNMGLYGERVGALSIVCKSADVAGRVESQLKLVIRPMYSSPPIHGASIVAVILRDKNLFNEWTLELKAMADRIISMRKQLFEALRTRGTPGDWSHIIKQIGMFTFTGLNPAQVSFMTKEYHIYMTSDGRISMAGLSSKTVPHLADAIHAVVTKAV

SEQ ID NO: 36485 - DNA, 1041 bp, Arabidopsis thaliana
  misc_feature (1)..(1041): Ceres Seq. ID no. 12377452
  misc_feature (1)..(1041): Ortholog of  Ceres SEQ ID NO 15179743 as cited in SEQ ID NO 62336
atggcgctcaaatcaaaactcgtctctcttctcttcctcatagcaacactatcatccacattcgcagcttcgttttccgattcggattccgattcagatcttctcaacgaacttgtatctctcagatcaacaagcgaatcaggcgtaatccatctcgatgaccatggaatctcaaaattcctaacctccgcttccacgcctcgtccttactcgttactcgtcttcttcgacgctactcaactccacagcaaaaacgagcttcgtcttcaagagctccgtcgcgaattcggcatcgtctccgcttcattcctcgctaacaacaatggatctgaaggaactaagcttttcttctgtgagatcgagttttcgaagtctcaatcttcgttccagctctttggcgttaacgctttacctcacattcgtcttgtaagtccttcgatatcgaatctacgtgatgaatctggtcaaatggatcaatcggattactctagattagctgaatcaatggctgagtttgttgagcaacgaactaaactcaaggtcggtcctattcaacgtccaccgctactttcgaaaccacagatcggtattatcgttgcgttgatcgttatcgctactccgtttatcatcaaaagagttttgaaaggagaaactattcttcatgatactagactttggttatctggtgctatcttcatttacttctttagtgttgctggtacaatgcacaacattatcaggaaaatgccgatgtttcttcaagatcgtaacgatccgaataagcttgtgtttttctaccaaggatctggaatgcagcttggagctgaaggatttgctgttggattcttgtatactgttgttggattgcttttggcgtttgttaccaatgtgcttgttcgagtgaagaatattactgcacaaaggttgattatgcttttggctttgttcatatcgttctgggctgtgaagaaagttgtttacttggataactggaagactggatatggaattcatccgtattggccatcgagttggcgttga

SEQ ID NO: 36486 - protein, 346 aa, Arabidopsis thaliana
  peptide (1)..(346): Ceres Seq. ID no. 12377453
MALKSKLVSLLFLIATLSSTFAASFSDSDSDSDLLNELVSLRSTSESGVIHLDDHGISKFLTSASTPRPYSLLVFFDATQLHSKNELRLQELRREFGIVSASFLANNNGSEGTKLFFCEIEFSKSQSSFQLFGVNALPHIRLVSPSISNLRDESGQMDQSDYSRLAESMAEFVEQRTKLKVGPIQRPPLLSKPQIGIIVALIVIATPFIIKRVLKGETILHDTRLWLSGAIFIYFFSVAGTMHNIIRKMPMFLQDRNDPNKLVFFYQGSGMQLGAEGFAVGFLYTVVGLLLAFVTNVLVRVKNITAQRLIMLLALFISFWAVKKVVYLDNWKTGYGIHPYWPSSWR

SEQ ID NO: 36487 - protein, 190 aa, Arabidopsis thaliana
  peptide (1)..(190): Ceres Seq. ID no. 12377454
MDQSDYSRLAESMAEFVEQRTKLKVGPIQRPPLLSKPQIGIIVALIVIATPFIIKRVLKGETILHDTRLWLSGAIFIYFFSVAGTMHNIIRKMPMFLQDRNDPNKLVFFYQGSGMQLGAEGFAVGFLYTVVGLLLAFVTNVLVRVKNITAQRLIMLLALFISFWAVKKVVYLDNWKTGYGIHPYWPSSWR

SEQ ID NO: 36488 - protein, 178 aa, Arabidopsis thaliana
  peptide (1)..(178): Ceres Seq. ID no. 12377455
MAEFVEQRTKLKVGPIQRPPLLSKPQIGIIVALIVIATPFIIKRVLKGETILHDTRLWLSGAIFIYFFSVAGTMHNIIRKMPMFLQDRNDPNKLVFFYQGSGMQLGAEGFAVGFLYTVVGLLLAFVTNVLVRVKNITAQRLIMLLALFISFWAVKKVVYLDNWKTGYGIHPYWPSSWR

SEQ ID NO: 36489 - DNA, 676 bp, Arabidopsis thaliana
  misc_feature (1)..(676): Ceres Seq. ID no. 13496974
  misc_feature (1)..(676): Ortholog of  Ceres SEQ ID NO 12610253 as cited in SEQ ID NO 56230
cctctcctcctcgtcctcaatcatcatcatctgagaattcgcagcttttgcttcttcgatagaaaatctaattatcatcaatcatgtctaagttcacgggattctcatctctcgctatctcttattttctcttggtttcaacgattgttgcagccaccgatgttcactactgcgataataacgaagagtatgaagtaaaagtacaaggagttgatataactccttatcctatagctagaggcgagccagctactttcagaatttctgctaacacagacactgagatctcgagcggcaagttggtgatcgaagtttcctactttggatggcatattcattctgagacacatgatctttgtgatgagacaagttgtcctgtggccattggagatttcttggtagcgcactcgcaagttcttcccggatatacccctcctggttcatactcactaaaaatgaagatgcttgatggacgcaagaaggagttaacttgcatcaagttctcatttgatattggatttggatcctccgtggccgacatgtagagctgatttgctcgacgggatacaccatcttgttctataccatggaaccactctcatttattttgtataaaatacactctcctgctatacataattgttgatcaaaaaccctttgaaaattctcattctgg

SEQ ID NO: 36490 - protein, 153 aa, Arabidopsis thaliana
  peptide (1)..(153): Ceres Seq. ID no. 13496975
MSKFTGFSSLAISYFLLVSTIVAATDVHYCDNNEEYEVKVQGVDITPYPIARGEPATFRISANTDTEISSGKLVIEVSYFGWHIHSETHDLCDETSCPVAIGDFLVAHSQVLPGYTPPGSYSLKMKMLDGRKKELTCIKFSFDIGFGSSVADM

SEQ ID NO: 36491 - DNA, 1135 bp, Arabidopsis thaliana
  misc_feature (1)..(1135): Ceres Seq. ID no. 13491495
  misc_feature (1)..(1135): Ortholog of  Ceres SEQ ID NO 14303612 as cited in SEQ ID NO 63208
agaaccaaggaaaaggaaagagtcggcgaaaaagatataaaaaagccagcgagagagacaaagggtttttgagtatctcgcgaggttttacatagatttctccattatggattcgatgatgaatcagaagactgttttggctgtgacggatgatgtggtgttacctgttagctctgttttagctataatgaaagagcttggaaaggaagtgattgagagttttgatcctctgattattactcaagcatccacaataaatcagtttcctttggatgcttcctctgtggaggcggtattagccatttccaaaacatctgatttcccaagtgataaaatatgtggtgagttctcaagaatcttgaagcctggcggcacggtttctgtgtgcaaagttttggagggtgaaacgggagaaattcaacagaccattcaaaggagagtgacattggctggttttcttgagccacagtgtcttgatttgaaatcaattaaattgtctacgttcagtttatcctttgggattaaggcaaagaaaccttcttggaagattggttcatcatttgctctcaaaaagcctgtaacaaatctctttaagattgatctagatgacgacgtggatcttattgatgaagattctcttttaacagaggaggacttgatgaagccacagcttcctgttgccagcggttgtgagaccactaaaaaagcttgcaagaactgcgtctgtggtagagctgaaattgaggagaaagctgtgaagctgggcctcacagaggatcaaatcgagaatccacaatcatcatgcggcagctgtgggctcggtgatgccttccgctgcggtacatgcccttacaagggtctgccacccttcaaattaggcgagaaggtaaccctatctcaaaacttccttgaagctgacatataagcatgtgaaaggcatcttcatacatgggtgtttctcgccgaggccaaaaccttttgctaatcgcagagtagtttcatcatttactttgtgccttttcgtataatttgtttgttggtacttcttttattttgtggctctaaaagcttgtagaatattgtttgggttgcccacaaagcacacaccttagtatcaatgaagaacggttttgcc

SEQ ID NO: 36492 - protein, 272 aa, Arabidopsis thaliana; identical to SEQ ID NO: 27277
  peptide (1)..(272): Ceres Seq. ID no. 13491496

SEQ ID NO: 36493 - protein, 269 aa, Arabidopsis thaliana; identical to SEQ ID NO: 27278
  peptide (1)..(269): Ceres Seq. ID no. 13491497

SEQ ID NO: 36494 - protein, 268 aa, Arabidopsis thaliana
  peptide (1)..(268): Ceres Seq. ID no. 13491498
MNQKTVLAVTDDVVLPVSSVLAIMKELGKEVIESFDPLIITQASTINQFPLDASSVEAVLAISKTSDFPSDKICGEFSRILKPGGTVSVCKVLEGETGEIQQTIQRRVTLAGFLEPQCLDLKSIKLSTFSLSFGIKAKKPSWKIGSSFALKKPVTNLFKIDLDDDVDLIDEDSLLTEEDLMKPQLPVASGCETTKKACKNCVCGRAEIEEKAVKLGLTEDQIENPQSSCGSCGLGDAFRCGTCPYKGLPPFKLGEKVTLSQNFLEADI

SEQ ID NO: 36495 - DNA, 1071 bp, Arabidopsis thaliana
  misc_feature (1)..(1071): Ceres Seq. ID no. 12337110
  misc_feature (1)..(1071): Ortholog of  Ceres SEQ ID NO 12611159 as cited in SEQ ID NO 59821
  misc_feature (1)..(1071): Ortholog of  Ceres SEQ ID NO 15180029 as cited in SEQ ID NO 0
gttcttttccacagcattgcaacatgaagagacattcttgttgttacaaacaaaagctgagaaaaggtctttggtctcctgaagaagatgagaaacttctcaattacattaccaaacatggccatggttgctggagttctgtccctaaactcgggtctcgagagatgtggaaagagctgtagactcagatggatcaattacttaagacctgatttaaagagaggagctttctcttcagaggaacagaatctcattgtcgagcttcatgctgttcttggaaacagatggtcgcaaattgctgcgaggcttcccgggagaaccgacaacgagataaagaacttgtggaattcgtgcattaagaagaagctgatgaagaaaggcattgaccctattacacataaacccctctccgaggttggtaaagaaacaaacagaagcgacaataacaattccacaagtttttcctcagaaactaatcaagacttgtttgtcaagaaaacgtctgattttgccgagtattctgcgtttcagaaagaagaatccaactctgtttcactcagaaattcgctctcttccatgatcccaacgcaattcaacatcgacgatggttctgtctcaaatgcgggttttgatacacaagtatgcgtgaaaccctcgattattcttcttcctcctccaaacaacacttcaagcactgtctctggacaggatcatgtaaacgtgtcagagcctaattgtgaatcaaacagtggaaccacaagccacctcaacaatcccggtatggaagaaatgaaatggtccgaggagtacctaaacgaatcgttattctctacccaagtttacgtgaaatcagagacggatttcaactccaacattgcctttccttggagccaaagccaagcttgtgacgtattccccaaggatcttcagagaatggccttctcttttggtggtcagaccctttagtttctttttcttatcagatttagacatattgatacgtgtaatgaatggatcaaatgttctatttggccatacgttaaaaaaataaaaaagcacaatcctttcctg

SEQ ID NO: 36496 - protein, 292 aa, Arabidopsis thaliana
  peptide (1)..(292): Ceres Seq. ID no. 12337111
MRNFSITLPNMAMVAGVLSLNSGLERCGKSCRLRWINYLRPDLKRGAFSSEEQNLIVELHAVLGNRWSQIAARLPGRTDNEIKNLWNSCIKKKLMKKGIDPITHKPLSEVGKETNRSDNNNSTSFSSETNQDLFVKKTSDFAEYSAFQKEESNSVSLRNSLSSMIPTQFNIDDGSVSNAGFDTQVCVKPSIILLPPPNNTSSTVSGQDHVNVSEPNCESNSGTTSHLNNPGMEEMKWSEEYLNESLFSTQVYVKSETDFNSNIAFPWSQSQACDVFPKDLQRMAFSFGGQTL

SEQ ID NO: 36497 - protein, 282 aa, Arabidopsis thaliana
  peptide (1)..(282): Ceres Seq. ID no. 12337112
MAMVAGVLSLNSGLERCGKSCRLRWINYLRPDLKRGAFSSEEQNLIVELHAVLGNRWSQIAARLPGRTDNEIKNLWNSCIKKKLMKKGIDPITHKPLSEVGKETNRSDNNNSTSFSSETNQDLFVKKTSDFAEYSAFQKEESNSVSLRNSLSSMIPTQFNIDDGSVSNAGFDTQVCVKPSIILLPPPNNTSSTVSGQDHVNVSEPNCESNSGTTSHLNNPGMEEMKWSEEYLNESLFSTQVYVKSETDFNSNIAFPWSQSQACDVFPKDLQRMAFSFGGQTL

SEQ ID NO: 36498 - protein, 280 aa, Arabidopsis thaliana
  peptide (1)..(280): Ceres Seq. ID no. 12337113
MVAGVLSLNSGLERCGKSCRLRWINYLRPDLKRGAFSSEEQNLIVELHAVLGNRWSQIAARLPGRTDNEIKNLWNSCIKKKLMKKGIDPITHKPLSEVGKETNRSDNNNSTSFSSETNQDLFVKKTSDFAEYSAFQKEESNSVSLRNSLSSMIPTQFNIDDGSVSNAGFDTQVCVKPSIILLPPPNNTSSTVSGQDHVNVSEPNCESNSGTTSHLNNPGMEEMKWSEEYLNESLFSTQVYVKSETDFNSNIAFPWSQSQACDVFPKDLQRMAFSFGGQTL

SEQ ID NO: 36499 - DNA, 1432 bp, Arabidopsis thaliana
  misc_feature (1)..(1432): Ceres Seq. ID no. 12560406
  misc_feature (1)..(1432): Ortholog of  Ceres SEQ ID NO 14305042 as cited in SEQ ID NO 52957
  misc_feature (1)..(1432): Ortholog of  Ceres SEQ ID NO 12614610 as cited in SEQ ID NO 68142
atatgtatgtgtgtgttatacaaaccctactctggaaaagtcctaattcctaaagctactttcaacaaagacgcctgaagcatctgcctatagtgaaagatcagaagactcttcaaccaaaatcttattctcatccaccatggaagctctcttcacttcaacacacacacccaatttacagactaagcctctcctcaaatctccgctgcccacttcttcccagtcttcgtgttggttttgtaattcgctacccaaaacgcaattcccgaagctgagactcagtaatggatcaagtcacgggcttcgtatacaagctctcttacgtaacgagacgccaagtgaaggtgaagataataatgggtttggtttttttcctggggatatcttctctttatcacaggaaaagctcgggagtaatagcaatggtgaaacttctcatagtgtaatcgatgtggaggcatctcttgcacatcctcaaggtggtggaggaaatcgagctgggctttttagaactccaatatctggtggtgttcaaaatgctacatcagctcatgctttacctcggcctgctttagctgtacggaacttgttggaacaggctaggtttgctcatctgtgcacagtgatgtccaaaatgcaccaccgcagggaagggtacccatttggctcattggtagattttgcacctgatcggatggggcatccaatatttttgttttcaccgctggccatccacacacgaaatctcttgaatgaacctagatgcagcctcgttgttcagatacccggatggagtggcttatcgaatgcaagagtgacattatttggtgatgtgtacccattgtcagaggatgaacaggagtgggcccataagcaatatattgcaaagcacccgcacgggccttcagagcaatggggaaactttcattattttagaatgcagaacataagtgatatatatttcattggaggctttggcacggtcgcttgggttgatgtcaaagagtatgaaggtttacaaccagataagatagctgttgatggtggtgagcggaacctcaaggaactaaatgccatcttctcgaaaccgctgagagagctactgtctactgaatcagaggtagacgatgctgctctcatttcaatagatagcaaaggaatagatgtacgggttcgtcaaggtgctcagtttaacatacaaaggctagcatttgaggaaggtcatggtgttgagacactagaagaagctaagtctgcattatggaaagtgttggagaaggtcaagctgaatttgcagaaatgacaagccccttttgctactttatacgggtccttttaaaatagtaggaccaataaaatgttgtttggttcctcttttcttcttcttgactagctgaaattttgtagtttctttcttttatcttttgacctc

SEQ ID NO: 36500 - protein, 387 aa, Arabidopsis thaliana
  peptide (1)..(387): Ceres Seq. ID no. 12560407
MEALFTSTHTPNLQTKPLLKSPLPTSSQSSCWFCNSLPKTQFPKLRLSNGSSHGLRIQALLRNETPSEGEDNNGFGFFPGDIFSLSQEKLGSNSNGETSHSVIDVEASLAHPQGGGGNRAGLFRTPISGGVQNATSAHALPRPALAVRNLLEQARFAHLCTVMSKMHHRREGYPFGSLVDFAPDRMGHPIFLFSPLAIHTRNLLNEPRCSLVVQIPGWSGLSNARVTLFGDVYPLSEDEQEWAHKQYIAKHPHGPSEQWGNFHYFRMQNISDIYFIGGFGTVAWVDVKEYEGLQPDKIAVDGGERNLKELNAIFSKPLRELLSTESEVDDAALISIDSKGIDVRVRQGAQFNIQRLAFEEGHGVETLEEAKSALWKVLEKVKLNLQK

SEQ ID NO: 36501 - protein, 225 aa, Arabidopsis thaliana
  peptide (1)..(225): Ceres Seq. ID no. 12560408
MSKMHHRREGYPFGSLVDFAPDRMGHPIFLFSPLAIHTRNLLNEPRCSLVVQIPGWSGLSNARVTLFGDVYPLSEDEQEWAHKQYIAKHPHGPSEQWGNFHYFRMQNISDIYFIGGFGTVAWVDVKEYEGLQPDKIAVDGGERNLKELNAIFSKPLRELLSTESEVDDAALISIDSKGIDVRVRQGAQFNIQRLAFEEGHGVETLEEAKSALWKVLEKVKLNLQK

SEQ ID NO: 36502 - protein, 222 aa, Arabidopsis thaliana
  peptide (1)..(222): Ceres Seq. ID no. 12560409
MHHRREGYPFGSLVDFAPDRMGHPIFLFSPLAIHTRNLLNEPRCSLVVQIPGWSGLSNARVTLFGDVYPLSEDEQEWAHKQYIAKHPHGPSEQWGNFHYFRMQNISDIYFIGGFGTVAWVDVKEYEGLQPDKIAVDGGERNLKELNAIFSKPLRELLSTESEVDDAALISIDSKGIDVRVRQGAQFNIQRLAFEEGHGVETLEEAKSALWKVLEKVKLNLQK

SEQ ID NO: 36503 - DNA, 1063 bp, Arabidopsis thaliana
  misc_feature (1)..(1063): Ceres Seq. ID no. 13592884
  misc_feature (1)..(1063): Ortholog of  Ceres SEQ ID NO 14301765 as cited in SEQ ID NO 61955
  misc_feature (1)..(1063): Ortholog of  Ceres SEQ ID NO 12618205 as cited in SEQ ID NO 65153
cctaatcgaaaagttttgttctttcatagtcttctagatctgtagtttttttccgcgaccgcccaaaaaattctctgatcagacggtcgattggatcggagatttaaggtaaagaaaaaatggcgcaacaatcgttgatctacagtttcgtagctcgccacggtgatcctcgttgagttcactgatttcaaaggtaatttcacctcaatcgctgctcagtgcctccagaagcttccgtcttcgaacaacaagttcacctacaactgcgacggtcataccttcaattaccttgtcgaagatggattcacctattgtgttgttgcggttgattctgctgggaggcaaattcccatgtcctttttggaaagagtaaaagaagattttaacaagcgatatggtggtggaaaagctgcaactgctcaagcaaacagcttgaataaggagtttggctctaaactgaaagagcatatgcagtattgcatggatcatcctgatgagattagcaagcttgctaaggtgaaggcgcaagtgtcagaagttaagggtgtaatgatgaaaacattgagaaggttcttgaccgtggtgagaaaattgagcttttggtggacaaaaccgaaaatcttcgctcacaggcacaagatttcagaacaacaggaacgcagatgagaagaaagatgtggcttcagaacatgaagataaaactcatagtgctcgccatcattatcgcactgattctcatcatcgtgctctcagtttgccatgggtttaagtgttaagcccagaaaattcaaaacttctgagatctttctcactcggtacatcgtagtgccttctcttttattgttcgatcttcaatctaatgtttctgcttgaattggttttgtatagatagacatatatgtatgctactcatttgctatattgcttgcatctgatgacattgatcccttgcgaaccagtcagtacttgacaagagatccgaaactattaaatgattttgttgactgaagattgcattgtggtggtgatgataaaaatttgagattgtattgacgattaaaat

SEQ ID NO: 36504 - protein, 104 aa, Arabidopsis thaliana
  peptide (1)..(104): Ceres Seq. ID no. 13592885
MSFLERVKEDFNKRYGGGKAATAQANSLNKEFGSKLKEHMQYCMDHPDEISKLAKVKAQVSEVKGVMMKTLRRFLTVVRKLSFWWTKPKIFAHRHKISEQQERR

SEQ ID NO: 36505 - protein, 65 aa, Arabidopsis thaliana
  peptide (1)..(65): Ceres Seq. ID no. 13592886
MQYCMDHPDEISKLAKVKAQVSEVKGVMMKTLRRFLTVVRKLSFWWTKPKIFAHRHKISEQQERR

SEQ ID NO: 36506 - protein, 61 aa, Arabidopsis thaliana
  peptide (1)..(61): Ceres Seq. ID no. 13592887
MDHPDEISKLAKVKAQVSEVKGVMMKTLRRFLTVVRKLSFWWTKPKIFAHRHKISEQQERR

SEQ ID NO: 36507 - DNA, 783 bp, Arabidopsis thaliana
  misc_feature (1)..(783): Ceres Seq. ID no. 12330563
  misc_feature (1)..(783): Ortholog of  Ceres SEQ ID NO 12624653 as cited in SEQ ID NO 61262
  misc_feature (1)..(783): Ortholog of  Ceres SEQ ID NO 12579223 as cited in SEQ ID NO 0
  misc_feature (1)..(783): Ortholog of  Ceres SEQ ID NO 12635708 as cited in SEQ ID NO 0
aaaagacaaaagcagaggaaccgaagtttaagctaacaccgagaaaggatccgtctctccgacgacaaatcagaccacctgcgacctagaacgacacaaggagacatagagaaaatgggtttcttctcttttcttggaagagttctcttcgcttctttattcatcctctccgcttggcaaatgttcaatgactttggaactgacggtggtccagcagctaaagagttagctccaaagcttgatctgaccaaagcacatctctcttccatattgggagtatcattgcccaacttagaggtgaaacaagtcgtgtgggctattgttgctctgaaaggcctaggaggcttactctttgttatcggcaacatctttggtgcctatcttctggctgtctacttggtggttgtcagtcccattttatatgatttctacaactatggacccgaggaccgccaattctctcttctattgactgaattcttgcagagtgttgcgcttctcggggcattgctatttttcatcggaatgaagaattcaacaacgagctccaagaggattctgaagaagaggactcccaagcctaaagctgcttagagttcttctcttctcctccacacacaaaggcaggtaggcttcagaagagcttctgatgtctccaagcattacctttgtcattcttccttacaacttttggttccttatctattgtaggattctagaattagccacattttgtattttatcaattagtttttatatgattttgggatttaagccgttttc

SEQ ID NO: 36508 - protein, 159 aa, Arabidopsis thaliana
  peptide (1)..(159): Ceres Seq. ID no. 12330564
MGFFSFLGRVLFASLFILSAWQMFNDFGTDGGPAAKELAPKLDLTKAHLSSILGVSLPNLEVKQVVWAIVALKGLGGLLFVIGNIFGAYLLAVYLVVVSPILYDFYNYGPEDRQFSLLLTEFLQSVALLGALLFFIGMKNSTTSSKRILKKRTPKPKAA

SEQ ID NO: 36509 - protein, 137 aa, Arabidopsis thaliana
  peptide (1)..(137): Ceres Seq. ID no. 12330565
MFNDFGTDGGPAAKELAPKLDLTKAHLSSILGVSLPNLEVKQVVWAIVALKGLGGLLFVIGNIFGAYLLAVYLVVVSPILYDFYNYGPEDRQFSLLLTEFLQSVALLGALLFFIGMKNSTTSSKRILKKRTPKPKAA

SEQ ID NO: 36510 - DNA, 728 bp, Arabidopsis thaliana
  misc_feature (1)..(728): Ceres Seq. ID no. 13504775
  misc_feature (1)..(728): Ortholog of  Ceres SEQ ID NO 14304536 as cited in SEQ ID NO 53436
  misc_feature (1)..(728): Ortholog of  Ceres SEQ ID NO 14315438 as cited in SEQ ID NO 57205
ggctgcaatttattctcaaaccttatgagtgagatctctcttaatcattctctctttcttctctcctctgtgatgtgaggtttcgaagatccttctctgattcctcatcaaactcagatcagtagcggacccaagtcattcctttagagagatatatggcagaggtgaaggatcaattagagattaagttccggcttaacgatggttctgatatcggtcctaaattgtttcctgatgctactaccgttgctacattgaaagaaaccgttgttgctcagtggccaagagataaggagaacgggccaaagacagtgaaagatgttaaactgataagcgcgggtagaatattggagaacaacaaaacggttggagattgcaggagtcccgtcggcaatttctcaggtgctgtcaccacaatgcatgttataattcaacatcaagttactgaaaaagaaaagaagaagaagaagcctaaaggtgatctgaaacagaacaaatgtgtctgtttatgttttggagctcgttgttaacaattgtgcaagacaagtagagagagttaaaaaagcttgggagattcacattctgttcttgagccttcttcaataccttttgctcttgttccttgtaattcttttttctgacatgacatgacatgattggctttttgatcgcttgaggtttggtttctattgtatttcggattcgcaacaccgtggaaattattaggt

SEQ ID NO: 36511 - protein, 124 aa, Arabidopsis thaliana; identical to SEQ ID NO: 36281
  peptide (1)..(124): Ceres Seq. ID no. 13504776

SEQ ID NO: 36512 - DNA, 799 bp, Arabidopsis thaliana
  misc_feature (1)..(799): Ceres Seq. ID no. 12462083
  misc_feature (1)..(799): Ortholog of  Ceres SEQ ID NO 13582184 as cited in SEQ ID NO 56002
  misc_feature (1)..(799): Ortholog of  Ceres SEQ ID NO 15227042 as cited in SEQ ID NO 0
aggtcggcggttccatcaccacaacgccggacgacaatgggtattgatctgatcgccggaggtaagagtaagaagaccaaaaggacagctccaaagtctgatgatgtctacctcaagcttactgtcaagctttaccggtttctggtaaggagaactaatagcaagttcaatggtgtgatattgaagaggcttttcatgagcaaagtcaacaaagctcctctttctctatctaggcttgtggagttcatgactggcaaggaagataagattgccgtcttggttggaactataactgatgatttgagggtacacgagattccagccatgaaagtgactgccttgaggttcacagagagagcaagggctcgcattgagaaagctggaggtgaatgcttaacctttgaccagctcgctctcagagctccattgggccagaacacggttcttcttagaggacctaagaattcacgtgaagcagtgaagcatttcggacctgctcctggtgtgccacacagtcactccaagccatatgttcgggccaagggaaggaagttcgagaaggccagaggaaagaggaagagtcgtggattcaaggtttaagaaagttgttgccgccattggacttgattctggagtactgttgcttcttggttgcttttgtaatcggatttttgttagggaactctgttttttctttcctctttcagacatgctactaagtttgcttctactggattcatcgtgtggttattacacttgcagctttactatgttaaacttaattcattatctttctacc

SEQ ID NO: 36513 - protein, 199 aa, Arabidopsis thaliana
  peptide (1)..(199): Ceres Seq. ID no. 12462084
RSAVPSPQRRTTMGIDLIAGGKSKKTKRTAPKSDDVYLKLTVKLYRFLVRRTNSKFNGVILKRLFMSKVNKAPLSLSRLVEFMTGKEDKIAVLVGTITDDLRVHEIPAMKVTALRFTERARARIEKAGGECLTFDQLALRAPLGQNTVLLRGPKNSREAVKHFGPAPGVPHSHSKPYVRAKGRKFEKARGKRKSRGFKV

SEQ ID NO: 36514 - protein, 187 aa, Arabidopsis thaliana
  peptide (1)..(187): Ceres Seq. ID no. 12462085
MGIDLIAGGKSKKTKRTAPKSDDVYLKLTVKLYRFLVRRTNSKFNGVILKRLFMSKVNKAPLSLSRLVEFMTGKEDKIAVLVGTITDDLRVHEIPAMKVTALRFTERARARIEKAGGECLTFDQLALRAPLGQNTVLLRGPKNSREAVKHFGPAPGVPHSHSKPYVRAKGRKFEKARGKRKSRGFKV

SEQ ID NO: 36515 - protein, 134 aa, Arabidopsis thaliana
  peptide (1)..(134): Ceres Seq. ID no. 12462086
MSKVNKAPLSLSRLVEFMTGKEDKIAVLVGTITDDLRVHEIPAMKVTALRFTERARARIEKAGGECLTFDQLALRAPLGQNTVLLRGPKNSREAVKHFGPAPGVPHSHSKPYVRAKGRKFEKARGKRKSRGFKV

SEQ ID NO: 36516 - DNA, 2010 bp, Arabidopsis thaliana
  misc_feature (1)..(2010): Ceres Seq. ID no. 12600087
  misc_feature (1)..(2010): Ortholog of  Ceres SEQ ID NO 14311103 as cited in SEQ ID NO 52897
gagacggagaacaagagcaatcaaatcacacaaatcctcgaaaaagtaaaattcttgattaaaaaaaaacggacattttgtgctcagacactcagctttccttattagtcttttgccacctctctgcaaagttctcgaacccactctgtaaccaaaatcaatcataaagatttgatctttttttttcctttttcggtgagatttaatcctctaaggttcttgatactctctagatctattcttacttgggtttgttcgaaatatggaggacaagaacaatgataaggagaaaaaaaccgacgttacgttcgaagatgacgaagataacgaagatctagaagacaacagcagtaagtacgagaacgacagtgaaactgatcaaagcgatctcggagatcttcctggtgatgctgttgatcgtgacgacgacatcgatgaacctttcatttcccaggttcaatggcctcaaagcttcagggaaacgactgattcttatacgattgcggcatcaccaatcttcgggtcgctcaggagtaatcctccgagtttctatagagccagcagaagtaatttagatgttgagtcaaaagcacctttgcttcctgagaggcatgatgattcagacaaagcctcagctacacaatctgcttggtctcataaaggctcatttgctgaggaattgcccattggtggctatggatgcagcgtcattcaaaccattttcaatgctattaatgtaatggctggagttggacttctctcaacaccttatacagtgaaagaagctggttgggcaagtatggtaattcttctcttatttgctgttatttgttgttacactgctactttaatgaaagactgtttcgagaacaagaccggcattatcacttatcctgatattggagaagcagcttttggcaaatatggtcgtattcttatctgtatgctattgtacacagaactatattcatattgtgttgaattcatcattttggaaggagataaccttaccgggcttttccctggtacatccttggatttgctcgggttccgacttgactctaagcatttatttggaatcttaactgctctcattgttcttccaactgtttggttgaaagatctacgcatcatttcctacctctcagccggtggagttatcgcaaccgctttgatagcagtaagcgtgtttttcctcggtacaacgggcgggattgggtttcatcacaccgggcaggctgtgaaatggaacgggataccgtttgcaattggtatatacgggttttgctattcaggacattcagtgttcccaaatatataccaatccatggctgataaaaccaaattcaacaaagcagtgatcacttgtttcattatatgtgttttgttatacggaggagttgcaatcatgggttatctcatgtttggagaagctaccttgtctcagattacactaaacatgccacaggaccaatttttctcaaaagtggcacagtggacaacggttgtgagtccgtttacaaaatacgctctcctgatgaatccacttgcaaggagtatagaagaactattaccggaaagaatgtcagagaacatatggtgctttcttcttctaagaacagcactcgtcgcttcttctgtttgttctgctttccttattccattttttggtcttatgatggctcttataggatctcttctcagtatactagtggcaataataatgccagctttatgcttcataaagataatggggaacaaagcaacaagaacacagatgattctgagttcgatcattgtggccatcggggtggtaagcgggaccttggggacatattcttcggtggcaaagatcattaggaactatcagtgaaggaactccatgacaaagagacccatagtttatcccctgtactttgagttgaatgtttttgttgaagctaataaactcttgattatgaaagattattttggacttgaaagttaataaaactagtgaaaggtttactt

SEQ ID NO: 36517 - protein, 536 aa, Arabidopsis thaliana
  peptide (1)..(536): Ceres Seq. ID no. 12600088
MEDKNNDKEKKTDVTFEDDEDNEDLEDNSSKYENDSETDQSDLGDLPGDAVDRDDDIDEPFISQVQWPQSFRETTDSYTIAASPIFGSLRSNPPSFYRASRSNLDVESKAPLLPERHDDSDKASATQSAWSHKGSFAEELPIGGYGCSVIQTIFNAINVMAGVGLLSTPYTVKEAGWASMVILLLFAVICCYTATLMKDCFENKTGIITYPDIGEAAFGKYGRILICMLLYTELYSYCVEFIILEGDNLTGLFPGTSLDLLGFRLDSKHLFGILTALIVLPTVWLKDLRIISYLSAGGVIATALIAVSVFFLGTTGGIGFHHTGQAVKWNGIPFAIGIYGFCYSGHSVFPNIYQSMADKTKFNKAVITCFIICVLLYGGVAIMGYLMFGEATLSQITLNMPQDQFFSKVAQWTTVVSPFTKYALLMNPLARSIEELLPERMSENIWCFLLLRTALVASSVCSAFLIPFFGLMMALIGSLLSILVAIIMPALCFIKIMGNKATRTQMILSSIIVAIGVVSGTLGTYSSVAKIIRNYQ

SEQ ID NO: 36518 - protein, 377 aa, Arabidopsis thaliana
  peptide (1)..(377): Ceres Seq. ID no. 12600089
MAGVGLLSTPYTVKEAGWASMVILLLFAVICCYTATLMKDCFENKTGIITYPDIGEAAFGKYGRILICMLLYTELYSYCVEFIILEGDNLTGLFPGTSLDLLGFRLDSKHLFGILTALIVLPTVWLKDLRIISYLSAGGVIATALIAVSVFFLGTTGGIGFHHTGQAVKWNGIPFAIGIYGFCYSGHSVFPNIYQSMADKTKFNKAVITCFIICVLLYGGVAIMGYLMFGEATLSQITLNMPQDQFFSKVAQWTTVVSPFTKYALLMNPLARSIEELLPERMSENIWCFLLLRTALVASSVCSAFLIPFFGLMMALIGSLLSILVAIIMPALCFIKIMGNKATRTQMILSSIIVAIGVVSGTLGTYSSVAKIIRNYQ

SEQ ID NO: 36519 - protein, 357 aa, Arabidopsis thaliana
  peptide (1)..(357): Ceres Seq. ID no. 12600090
MVILLLFAVICCYTATLMKDCFENKTGIITYPDIGEAAFGKYGRILICMLLYTELYSYCVEFIILEGDNLTGLFPGTSLDLLGFRLDSKHLFGILTALIVLPTVWLKDLRIISYLSAGGVIATALIAVSVFFLGTTGGIGFHHTGQAVKWNGIPFAIGIYGFCYSGHSVFPNIYQSMADKTKFNKAVITCFIICVLLYGGVAIMGYLMFGEATLSQITLNMPQDQFFSKVAQWTTVVSPFTKYALLMNPLARSIEELLPERMSENIWCFLLLRTALVASSVCSAFLIPFFGLMMALIGSLLSILVAIIMPALCFIKIMGNKATRTQMILSSIIVAIGVVSGTLGTYSSVAKIIRNYQ

SEQ ID NO: 36520 - DNA, 1114 bp, Arabidopsis thaliana
  misc_feature (1)..(1114): Ceres Seq. ID no. 12395025
  misc_feature (1)..(1114): Ortholog of  Ceres SEQ ID NO 13594560 as cited in SEQ ID NO 51329
  misc_feature (1)..(1114): Ortholog of  Ceres SEQ ID NO 12613701 as cited in SEQ ID NO 67983
atactccatggagtagaaaaaggaaaaattcaaggctctttggcttcttctttcttctctgcacttgaatcagaagcttttctcagaatgggttggtcgttgagaatgtggattgtgagtatactcgtgcttacacagctcgttaatggagctctctgttggggagacgctggtcattacgctgtctgcaaaatagctcagagttattttgaggaagatactgtagttgctgtgaagaaacttctgcctgaatctgcaaatggtgagctagcagctgtttgctcatggcctgatgaaatcaaaaagctcccgcaatggcgatggactagtgctttgcattttgctgatacgcctgattacaaatgcaactatgagtactctcgggactgtcctaaagactggtgtgtgacaggggcaatcttcaattacactaaccaactaatgtctacttctgaaaactcacagagtatagtccactataacttaacagaggctctcatgttcttatcacattatatgggagatatccatcagcctttacatgaaggttttattggagatctaggtggtaacaagataaaagttcactggtacaatcaggaaactaatttgcaccgtgtgtgggatgatatgataattgagtctgctctagaaacatactacaattcaagccttccacgcatgattcatgaacttcaagccaaactcaagaacggctggtcaaacgatgtaccttcatgggagtcatgtcaacttaaccaaacggcctgcccaaatccgtatgcttctgaaagcattgatcttgcctgcaagtatgcttacaggaacgccaccgcagggactactttaggagattactatttcgtctctcggttaccggtggtagagaagagacttgcacaaggcggaattcgcttggcagggactcttaaccgaatattttctgcaaaacggaagcttgctagagcatgaaaaaagatccaggagaatcacttgaacatccatgaacactcttatgtattaataatgtgtaatggtagtagttaaggttatggtttggtattgttcctgcgtttaaactataataagtatgaaacgaaaactgtacgtctac

SEQ ID NO: 36521 - protein, 323 aa, Arabidopsis thaliana
  peptide (1)..(323): Ceres Seq. ID no. 12395026
ILHGVEKGKIQGSLASSFFSALESEAFLRMGWSLRMWIVSILVLTQLVNGALCWGDAGHYAVCKIAQSYFEEDTVVAVKKLLPESANGELAAVCSWPDEIKKLPQWRWTSALHFADTPDYKCNYEYSRDCPKDWCVTGAIFNYTNQLMSTSENSQSIVHYNLTEALMFLSHYMGDIHQPLHEGFIGDLGGNKIKVHWYNQETNLHRVWDDMIIESALETYYNSSLPRMIHELQAKLKNGWSNDVPSWESCQLNQTACPNPYASESIDLACKYAYRNATAGTTLGDYYFVSRLPVVEKRLAQGGIRLAGTLNRIFSAKRKLARA

SEQ ID NO: 36522 - protein, 294 aa, Arabidopsis thaliana; identical to SEQ ID NO: 30425
  peptide (1)..(294): Ceres Seq. ID no. 12395027

SEQ ID NO: 36523 - protein, 288 aa, Arabidopsis thaliana; identical to SEQ ID NO: 30426
  peptide (1)..(288): Ceres Seq. ID no. 12395028

SEQ ID NO: 36524 - DNA, 2716 bp, Arabidopsis thaliana
  misc_feature (1)..(2716): Ceres Seq. ID no. 13592888
  misc_feature (1)..(2716): Ortholog of  Ceres SEQ ID NO 14313863 as cited in SEQ ID NO 54791
atggagaagacacagatgcctgtagcccgagaagagaagatactggttctcgtgagattgaggcctctaaaccagaaagagattgccgctaatgaagctgcggattgggaatgtatcaatgataccaccatattgtacagaaacacattgcgcgaaggctcgaactttccttctgcatattcatttgataaagtctaccgaggtgaatgtcccaccagacaagtttacgaggatggaaccaaggaaatcgctctgtctgttgtcaaaggaatcaattgtagtattttcgcatatggccagacgagtagtggaaagacatacaccatgactggtattactgagtttgctgtggctgatatatttgactatatatttcagcatgaagaaagggcgttttccgtgaagttttcagctatagagatctacaatgaggccatacgagatctgcttagctcggatggtacatcactgaggctacgagacgatcctgagaaagggacagttgttgaaaaagccacagaggaaactctgcgagactggaaccatctgaaggaacttctatctatttgtgaaggtaaaactcaaaaaacatgttttctgaaaagtaaacttacatgcttctacattttcgcagcacagcgtaagataggtgaaacctcattgaatgagagaagttccagatctcatcaaatgatcagactgaatttcatcgatctagcaggaagcgagcgtgcttcacaagctatgtcagctggtacaagactcaaggaaggctgccatatcaatagaagtttgctgactcttggaacagtgatccgtaaacttagtaagggaagacaagggcacatcaactttagagactcgaagctcacacgaattctacagccatgcttggggggtaatgcaagaacagctatcatctgcactctgagcccagcaaggagtcatgtagagctaacgaagaacactctcttgtttgcgtgttgtgcaaaggaagtcaccacaaaggcgcggatcaatgttgttatgtcagacaaggctctgctaaagcaactacagcgtgagcttgcgaggctcgagactgagctgagaaaccctgcctcctcacctgcctcaaactgtgattgtgcaatgacggtgaggaagaaagatcttcagatacaaaagatggaaaaggagatcgcagagttgagaaaacagagggatcttgctcaatcccggcttgaagatttcatgagaatgattgaacacaatgtggcgtcaaagcctggaactccacatttcggcaaccacacagacaagtgggaggatggttcagtatcggagacatcaggcgtggtcgattcagacagaaggagttttatatcagatggaatgtctacaccgctgtcaatatcaagagcttatgttcattctcactctgacgatgatgatctggatgaagacttgcctaggcgttcggaagatctatcagaagaatattgcagagaagttcaatgcattgagactgaggaatcagtcacagtctataataacaagaaagacaagagagcagaacctgaaaacgttttaggctgtggtgaggatgctaatggtgaaacgagtgtaagccagaacgtcagggtgagaagttggaaccgcagagagactgtgtcaggcccgagcactccgcctgaaaacatagggacaggtttcctcggaagaccagagagtcacaagattgcgtttcctgatttagagttcggttctactgtatcgaggaatgattctatgtcttcttgcgggagcgattccacagggactcagagcatcagaacgccgttgggagaagagggtggtattactagtatccggactttcgttgaagggcttaaagagatggctaagcgtcaaggcgaggtctcaaatgctgaggattctggtaaaatgaggagggacattggtctggactccatggacagagaatttgagagacagcggcaagagattctggagctatggcaaacttgtaacatctctttggtgcatagaacatacttttacttgctcttcaaaggagatgaggcggattcaatctacatcggagtagagctaagaagacttttgtttatgaaagatagcttctctcagggaaaccaagcattggaaggaggagaaaccttaacattggcctcaagccggaaagagcttcacagggagagaaagatgctgagcaagcttgtggggaaaaggttttcaggagaagagaggaaaagaatctaccacaagtttgggattgcgattaactccaaacgcaggcggttacaacttgtgaatgagctctggagcaatcccaaggacatgactcaggttatggaaagcgcagatgttgtagcgaagcttgtgaggttcgctgagcaaggcagagccatgaaggagatgtttggtctgaccttcacacctccttcgttcttgacaactcggagatcgcatagttggagaaaaagcatgcctgcacttttctaacttctgtttggtccaatgacattttacttttgggtttcttgtagcagaagccatgtcttgtatatcttcttggtgtcatttcatttcctctgtcttttgatttttcaaaacagacaatgttgtaattgaatttttcttttccatcaaattcttttctttttacccgtaaaaattgttattaatgttatgaaaactcataatattttgaccc

SEQ ID NO: 36525 - protein, 834 aa, Arabidopsis thaliana
  peptide (1)..(834): Ceres Seq. ID no. 13592889
MEKTQMPVAREEKILVLVRLRPLNQKEIAANEAADWECINDTTILYRNTLREGSNFPSAYSFDKVYRGECPTRQVYEDGTKEIALSVVKGINCSIFAYGQTSSGKTYTMTGITEFAVADIFDYIFQHEERAFSVKFSAIEIYNEAIRDLLSSDGTSLRLRDDPEKGTVVEKATEETLRDWNHLKELLSICEGKTQKTCFLKSKLTCFYIFAAQRKIGETSLNERSSRSHQMIRLNFIDLAGSERASQAMSAGTRLKEGCHINRSLLTLGTVIRKLSKGRQGHINFRDSKLTRILQPCLGGNARTAIICTLSPARSHVELTKNTLLFACCAKEVTTKARINVVMSDKALLKQLQRELARLETELRNPASSPASNCDCAMTVRKKDLQIQKMEKEIAELRKQRDLAQSRLEDFMRMIEHNVASKPGTPHFGNHTDKWEDGSVSETSGVVDSDRRSFISDGMSTPLSISRAYVHSHSDDDDLDEDLPRRSEDLSEEYCREVQCIETEESVTVYNNKKDKRAEPENVLGCGEDANGETSVSQNVRVRSWNRRETVSGPSTPPENIGTGFLGRPESHKIAFPDLEFGSTVSRNDSMSSCGSDSTGTQSIRTPLGEEGGITSIRTFVEGLKEMAKRQGEVSNAEDSGKMRRDIGLDSMDREFERQRQEILELWQTCNISLVHRTYFYLLFKGDEADSIYIGVELRRLLFMKDSFSQGNQALEGGETLTLASSRKELHRERKMLSKLVGKRFSGEERKRIYHKFGIAINSKRRRLQLVNELWSNPKDMTQVMESADVVAKLVRFAEQGRAMKEMFGLTFTPPSFLTTRRSHSWRKSMPALF

SEQ ID NO: 36526 - protein, 829 aa, Arabidopsis thaliana
  peptide (1)..(829): Ceres Seq. ID no. 13592890
MPVAREEKILVLVRLRPLNQKEIAANEAADWECINDTTILYRNTLREGSNFPSAYSFDKVYRGECPTRQVYEDGTKEIALSVVKGINCSIFAYGQTSSGKTYTMTGITEFAVADIFDYIFQHEERAFSVKFSAIEIYNEAIRDLLSSDGTSLRLRDDPEKGTVVEKATEETLRDWNHLKELLSICEGKTQKTCFLKSKLTCFYIFAAQRKIGETSLNERSSRSHQMIRLNFIDLAGSERASQAMSAGTRLKEGCHINRSLLTLGTVIRKLSKGRQGHINFRDSKLTRILQPCLGGNARTAIICTLSPARSHVELTKNTLLFACCAKEVTTKARINVVMSDKALLKQLQRELARLETELRNPASSPASNCDCAMTVRKKDLQIQKMEKEIAELRKQRDLAQSRLEDFMRMIEHNVASKPGTPHFGNHTDKWEDGSVSETSGVVDSDRRSFISDGMSTPLSISRAYVHSHSDDDDLDEDLPRRSEDLSEEYCREVQCIETEESVTVYNNKKDKRAEPENVLGCGEDANGETSVSQNVRVRSWNRRETVSGPSTPPENIGTGFLGRPESHKIAFPDLEFGSTVSRNDSMSSCGSDSTGTQSIRTPLGEEGGITSIRTFVEGLKEMAKRQGEVSNAEDSGKMRRDIGLDSMDREFERQRQEILELWQTCNISLVHRTYFYLLFKGDEADSIYIGVELRRLLFMKDSFSQGNQALEGGETLTLASSRKELHRERKMLSKLVGKRFSGEERKRIYHKFGIAINSKRRRLQLVNELWSNPKDMTQVMESADVVAKLVRFAEQGRAMKEMFGLTFTPPSFLTTRRSHSWRKSMPALF

SEQ ID NO: 36527 - protein, 726 aa, Arabidopsis thaliana
  peptide (1)..(726): Ceres Seq. ID no. 13592891
MTGITEFAVADIFDYIFQHEERAFSVKFSAIEIYNEAIRDLLSSDGTSLRLRDDPEKGTVVEKATEETLRDWNHLKELLSICEGKTQKTCFLKSKLTCFYIFAAQRKIGETSLNERSSRSHQMIRLNFIDLAGSERASQAMSAGTRLKEGCHINRSLLTLGTVIRKLSKGRQGHINFRDSKLTRILQPCLGGNARTAIICTLSPARSHVELTKNTLLFACCAKEVTTKARINVVMSDKALLKQLQRELARLETELRNPASSPASNCDCAMTVRKKDLQIQKMEKEIAELRKQRDLAQSRLEDFMRMIEHNVASKPGTPHFGNHTDKWEDGSVSETSGVVDSDRRSFISDGMSTPLSISRAYVHSHSDDDDLDEDLPRRSEDLSEEYCREVQCIETEESVTVYNNKKDKRAEPENVLGCGEDANGETSVSQNVRVRSWNRRETVSGPSTPPENIGTGFLGRPESHKIAFPDLEFGSTVSRNDSMSSCGSDSTGTQSIRTPLGEEGGITSIRTFVEGLKEMAKRQGEVSNAEDSGKMRRDIGLDSMDREFERQRQEILELWQTCNISLVHRTYFYLLFKGDEADSIYIGVELRRLLFMKDSFSQGNQALEGGETLTLASSRKELHRERKMLSKLVGKRFSGEERKRIYHKFGIAINSKRRRLQLVNELWSNPKDMTQVMESADVVAKLVRFAEQGRAMKEMFGLTFTPPSFLTTRRSHSWRKSMPALF

SEQ ID NO: 36528 - DNA, 1097 bp, Arabidopsis thaliana
  misc_feature (1)..(1097): Ceres Seq. ID no. 13646094
  misc_feature (1)..(1097): Ortholog of  Ceres SEQ ID NO 14310616 as cited in SEQ ID NO 55699
  misc_feature (1)..(1097): Ortholog of  Ceres SEQ ID NO 13596519 as cited in SEQ ID NO 62572
  misc_feature (1)..(1097): Ortholog of  Ceres SEQ ID NO 12625108 as cited in SEQ ID NO 68102
gtccctatccaatacacatctctctctctcttattaactcaatgacggcgactgcgtttagggtcggcttgtggttggccgttacggcttcctttctcttaaccgcaacaaacgccaaaatccccggcgtttacagtggcggaccgtggcagaatgcacacgccactttctacggtggcagtgacgcccggcacaatgggcggcgcgtgtgggtacgggaacttgtacagccaaggatacggtgtgaacacggcggcgttgagcactgctttgttcaacaacggattcagctgtggtgcttgttttgagattaagtgtactgatgatccaagatggtgtgttccgggaaatccatctattcttgtgacggcgacgaacttttgtccgccgaattttgctcagccgagtgacgacggagggtggtgcaatccgccgcgcgagcattttgatctcgccatgcctatgttcctcaagatcggtctataccgtgcaggcattgtccccgtctcctatcgcagggtaccttgtcggaagataggagggataagattcacagtaaacggattcagatacttcaatcttgttctggtaactaacgttgccggcgccggagatattaacggagttagcgtaaagggatcaaagacagattgggtgaggatgagtcggaactggggacagaactggcaatccaacgccgttctcatcggccaatcactctctttccgagtcaccgcctctgaccgacgttcttctacctcatggaacgttgctcctgccacgtggcagtttggtcagactttctccggcaaaaactttcgagtctgaaatctgaaaaaccacccaaaagatgttttttaattttattttttacaatggaagaagacacaaacaagaagagagatgagacattttccagccctgggttttccctttaattttcttgggaatattccggtggcttgtggaaaatatttccgtttttagtattattatcagcaaaatttcttttaatctttgcgatttacgagtgatttgtttttctcttggttattttgttcctttaattatttcgttggtggcatcttcgttctgcg

SEQ ID NO: 36529 - protein, 224 aa, Arabidopsis thaliana
  peptide (1)..(224): Ceres Seq. ID no. 13646095
MHTPLSTVAVTPGTMGGACGYGNLYSQGYGVNTAALSTALFNNGFSCGACFEIKCTDDPRWCVPGNPSILVTATNFCPPNFAQPSDDGGWCNPPREHFDLAMPMFLKIGLYRAGIVPVSYRRVPCRKIGGIRFTVNGFRYFNLVLVTNVAGAGDINGVSVKGSKTDWVRMSRNWGQNWQSNAVLIGQSLSFRVTASDRRSSTSWNVAPATWQFGQTFSGKNFRV

SEQ ID NO: 36530 - protein, 210 aa, Arabidopsis thaliana
  peptide (1)..(210): Ceres Seq. ID no. 13646096
MGGACGYGNLYSQGYGVNTAALSTALFNNGFSCGACFEIKCTDDPRWCVPGNPSILVTATNFCPPNFAQPSDDGGWCNPPREHFDLAMPMFLKIGLYRAGIVPVSYRRVPCRKIGGIRFTVNGFRYFNLVLVTNVAGAGDINGVSVKGSKTDWVRMSRNWGQNWQSNAVLIGQSLSFRVTASDRRSSTSWNVAPATWQFGQTFSGKNFRV

SEQ ID NO: 36531 - protein, 123 aa, Arabidopsis thaliana
  peptide (1)..(123): Ceres Seq. ID no. 13646097
MPMFLKIGLYRAGIVPVSYRRVPCRKIGGIRFTVNGFRYFNLVLVTNVAGAGDINGVSVKGSKTDWVRMSRNWGQNWQSNAVLIGQSLSFRVTASDRRSSTSWNVAPATWQFGQTFSGKNFRV

SEQ ID NO: 36532 - DNA, 1233 bp, Arabidopsis thaliana
  misc_feature (1)..(1233): Ceres Seq. ID no. 13509427
  misc_feature (1)..(1233): Ortholog of  Ceres SEQ ID NO 14316365 as cited in SEQ ID NO 60135
ctcttttctctcttagttcagggaggaggctcgagaacagtgccccatatctgaaagctgaagctaagaatctggacgttcgtgtttaaaccgacgacgtatttgaaattggctttgaaggaaaggtgaaattaatggcggaatcgtcgtcgccgtcgcctactgaagagatcgttcggttgattaagcgtttaagcgcttacgttgctttcaaaatgtcaagccttttctccactacatcgattcgaaatctggattcaagatcaattggtgcgattgcggggcttgcgattgcggtgatatttacgtggagggcgataagaacgcccggagagcaacgtcagagaaggcagccgaagcgtaggattcacaatgctgaaacgtctagtgctgctgctgctgcttctcagtcgaatctagcttcttcggttgctccggaagtttcttcgcctcgtgaggataatgcggtgcaagatgttgttgatcagttctttcaacctgttaaacctactttggggcaaatagttagacagaagcttagtgaaggaaggaaggtaacatgccgtcttcttggagtaattcttgaggaaacaagtccagaagaactccaaaaacaagccacagtgaggtcatctgttttggaagttctactagagattacaaagtatagtgatttgtatcttatggaaagagttcttgacgatgaaagcgaggccaaagttttacaggctttagagaatgcaggagtttttacatctggtggtttagtcaaagataaggtgctcttttgtagtacagagataggaagaacttcctttgtcagacagctagaacctgactggcatattgatacaaacccggaaatcagcacacaactagctaggttcatcaaatatcagcttcatgtcgctacggtgaaacccgagcgaacagctccaaatgtgttcacctcgcagtcaatagaacagttctttggaagtgtttaatatcaacaaaaaaagagaggtgaaagatattacgttgtcctgacttaagcatcgttgatcgagtgtctcttaggctgaaacttgaaacttgtttttcatttttctttgattgtgtctaaattaaagtttgatatacatttggagttagatattactgcgagtgcctctgtgaaagtatccaagtttgtaatttttgtattagcaacttagcaaaattctttaagaaataaacaaatgtccgttgtct

SEQ ID NO: 36533 - protein, 283 aa, Arabidopsis thaliana
  peptide (1)..(283): Ceres Seq. ID no. 13509428
MAESSSPSPTEEIVRLIKRLSAYVAFKMSSLFSTTSIRNLDSRSIGAIAGLAIAVIFTWRAIRTPGEQRQRRQPKRRIHNAETSSAAAAASQSNLASSVAPEVSSPREDNAVQDVVDQFFQPVKPTLGQIVRQKLSEGRKVTCRLLGVILEETSPEELQKQATVRSSVLEVLLEITKYSDLYLMERVLDDESEAKVLQALENAGVFTSGGLVKDKVLFCSTEIGRTSFVRQLEPDWHIDTNPEISTQLARFIKYQLHVATVKPERTAPNVFTSQSIEQFFGSV

SEQ ID NO: 36534 - protein, 256 aa, Arabidopsis thaliana
  peptide (1)..(256): Ceres Seq. ID no. 13509429
MSSLFSTTSIRNLDSRSIGAIAGLAIAVIFTWRAIRTPGEQRQRRQPKRRIHNAETSSAAAAASQSNLASSVAPEVSSPREDNAVQDVVDQFFQPVKPTLGQIVRQKLSEGRKVTCRLLGVILEETSPEELQKQATVRSSVLEVLLEITKYSDLYLMERVLDDESEAKVLQALENAGVFTSGGLVKDKVLFCSTEIGRTSFVRQLEPDWHIDTNPEISTQLARFIKYQLHVATVKPERTAPNVFTSQSIEQFFGSV

SEQ ID NO: 36535 - DNA, 1129 bp, Arabidopsis thaliana
  misc_feature (1)..(1129): Ceres Seq. ID no. 13499586
  misc_feature (1)..(1129): Ortholog of  Ceres SEQ ID NO 14303047 as cited in SEQ ID NO 66871
gagcccaactcctctctcttcacgcatttctcgttgtcaaagacaaagttctctccttttataaacacccatctccacctcctctctcttattcaaacttctttgagaaaattcgagctaagtgtttttataatatatacattctctgatatgggtttctctagagcaaaacgtgtcactgatccacttgcagaagaggttagggctcgtctcgttggatgcagctttagcagcggcagcgaacataccggcgacggaattgaagactacgaagacgacgactcgccttgtctctctgatctagtacaagggttcttggaagatgaagttgatacagttgatgatgagtcatgctggtgtgatcaagattctggttccgactcggattctgactcggaacttggcgagctccctgactttgccgacgatatcgccaagcttctgaggaactctctcagggaagattcatacggacgaacggtgctggtacatgtggcgagagcgatggaaatgttgtcgtctctcggatctcagcccgaacagcgtgccgttttccagcgtaaggtcatgtctcttcttagagaactcggccacaatgcggccatctgcaaaactaaatggaaatcctccggcggactcaccgccggtaaccatgagttcatcgacgtcgtgtatacaccttccgcctcgtctcagtccgtccgtttcatcgtcgatttagatttctcgtcgcggtttcaaatcgcgaggccaacttcacagtacgcgcgtgtgcttcaatcgcttccggcggttttcgtcggaaagggggatgatctgaagcggatcttgcgtctcgtgtgtgacgccgcgaggatttctcttaggaaccgcgggctgacgcttccgccgtggaggaagaatcgttatatgcagacgcggtggcttggtccttacaaacgcaccaccaacttaacgccgtcaacttccggtgtagacaccgtcatgtgtcgtgccatcggtttcgataatgccgtcggaggccgtctatttgtgcgaacacgataaaaactagaccaaaaagaccacgtgtcatttttaacttgattttttccatatacgttctagagaataataattcattatttgc

SEQ ID NO: 36536 - protein, 348 aa, Arabidopsis thaliana
  peptide (1)..(348): Ceres Seq. ID no. 13499587
EPNSSLFTHFSLSKTKFSPFINTHLHLLSLIQTSLRKFELSVFIIYTFSDMGFSRAKRVTDPLAEEVRARLVGCSFSSGSEHTGDGIEDYEDDDSPCLSDLVQGFLEDEVDTVDDESCWCDQDSGSDSDSDSELGELPDFADDIAKLLRNSLREDSYGRTVLVHVARAMEMLSSLGSQPEQRAVFQRKVMSLLRELGHNAAICKTKWKSSGGLTAGNHEFIDVVYTPSASSQSVRFIVDLDFSSRFQIARPTSQYARVLQSLPAVFVGKGDDLKRILRLVCDAARISLRNRGLTLPPWRKNRYMQTRWLGPYKRTTNLTPSTSGVDTVMCRAIGFDNAVGGRLFVRTR

SEQ ID NO: 36537 - protein, 298 aa, Arabidopsis thaliana
  peptide (1)..(298): Ceres Seq. ID no. 13499588
MGFSRAKRVTDPLAEEVRARLVGCSFSSGSEHTGDGIEDYEDDDSPCLSDLVQGFLEDEVDTVDDESCWCDQDSGSDSDSDSELGELPDFADDIAKLLRNSLREDSYGRTVLVHVARAMEMLSSLGSQPEQRAVFQRKVMSLLRELGHNAAICKTKWKSSGGLTAGNHEFIDVVYTPSASSQSVRFIVDLDFSSRFQIARPTSQYARVLQSLPAVFVGKGDDLKRILRLVCDAARISLRNRGLTLPPWRKNRYMQTRWLGPYKRTTNLTPSTSGVDTVMCRAIGFDNAVGGRLFVRTR

SEQ ID NO: 36538 - protein, 180 aa, Arabidopsis thaliana
  peptide (1)..(180): Ceres Seq. ID no. 13499589
MEMLSSLGSQPEQRAVFQRKVMSLLRELGHNAAICKTKWKSSGGLTAGNHEFIDVVYTPSASSQSVRFIVDLDFSSRFQIARPTSQYARVLQSLPAVFVGKGDDLKRILRLVCDAARISLRNRGLTLPPWRKNRYMQTRWLGPYKRTTNLTPSTSGVDTVMCRAIGFDNAVGGRLFVRTR

SEQ ID NO: 36539 - DNA, 696 bp, Arabidopsis thaliana
  misc_feature (1)..(696): Ceres Seq. ID no. 12336350
  misc_feature (1)..(696): Ortholog of  Ceres SEQ ID NO 12598353 as cited in SEQ ID NO 62205
aattaacagtgctttaaatctaagaaccctaattcaatactccacaaagggggtttcttcttcccaaggtttcagattctctccgtatccaaagttttgttttgttttttgtttgaaagcgaggatgaaagaatcgaaatcagccaagctgaatcagctacaacaacaagagaatcaccagaatgctcacttgtctccatcgaaattagcgaaattgttcgatcccgatgcttcttgggacaaggatcaattaggagatgtgttacattggattcgacaagtggtgggattgatctctggattgttatggggctctattccacttgttggaggcatttggatcattctgtttttggcgatatcctctgggatagtttatggttactacgcaatgattctcaaggttgatgaagaagatttcggaggccacgcagctttactccaagagggtctctttgcgtcacttactctctttttgctcgcatggattcttgtctatagcttggcacacttctgaaaaaaaagctgagcaacattcttttcactcagcagcaaaggcattggaacgaatctttttgttcttttgttttgtttttgtaaactgtctgaagataaggctacaagagacaaaacgttatagtaacaatttttatgaatcttttgaatgttacaaaagctttctatagtatcattttt

SEQ ID NO: 36540 - protein, 171 aa, Arabidopsis thaliana
  peptide (1)..(171): Ceres Seq. ID no. 12336351
INSALNLRTLIQYSTKGVSSSQGFRFSPYPKFCFVFCLKARMKESKSAKLNQLQQQENHQNAHLSPSKLAKLFDPDASWDKDQLGDVLHWIRQVVGLISGLLWGSIPLVGGIWIILFLAISSGIVYGYYAMILKVDEEDFGGHAALLQEGLFASLTLFLLAWILVYSLAHF

SEQ ID NO: 36541 - protein, 130 aa, Arabidopsis thaliana
  peptide (1)..(130): Ceres Seq. ID no. 12336352
MKESKSAKLNQLQQQENHQNAHLSPSKLAKLFDPDASWDKDQLGDVLHWIRQVVGLISGLLWGSIPLVGGIWIILFLAISSGIVYGYYAMILKVDEEDFGGHAALLQEGLFASLTLFLLAWILVYSLAHF

SEQ ID NO: 36542 - protein, 92 aa, Arabidopsis thaliana
  peptide (1)..(92): Ceres Seq. ID no. 12336353
MKKISEATQLYSKRVSLRHLLSFCSHGFLSIAWHTSEKKAEQHSFHSAAKALERIFLFFCFVFVNCLKIRLQETKRYSNNFYESFECYKSFL

SEQ ID NO: 36543 - DNA, 2464 bp, Arabidopsis thaliana
  misc_feature (1)..(2464): Ceres Seq. ID no. 12377492
  misc_feature (1)..(2464): Ortholog of  Ceres SEQ ID NO 13600595 as cited in SEQ ID NO 629
  misc_feature (1)..(2464): Ortholog of  Ceres SEQ ID NO 13593379 as cited in SEQ ID NO 20573
atatcagagaatcagagaccaacgtcacttatttacacactctgttttcttttttttggttgcttcttctctgatctttctttctttttttttttttgaaagaatcaatttccctctcaaatcagaaatctaaaaatgggaacaacgatcttggttctctccaagatcctaactttcttactaacaacaatgctgattggatccagtgtgatccagtgtagtagtgtaacctacgataagaaagctatcgtcatcaatggccaccgtagaatcctcctctctggttctattcactacccaagaagcactcctgagatgtgggaagatcttataaagaaagctaaagacggtggcttggatgttattgatacttatgttttctggaatggtcatgaaccttctcctggaacttacaatttcgaaggaagatatgatttggtaagattcattaagacgattcaggaagtgggtctttatgttcatctcagaattggtccttatgtttgtgcagaatggaattttggagggtttcctgtgtggttgaagtatgtagatgggattagtttcagaactgacaatggacccttcaagtctgcaatgcaaggattcacagagaagattgttcagatgatgaaagaacatagattctttgcgtcacaaggtggacctatcattctttctcagattgagaatgagtttgaaccagatcttaaagggcttggaccggctggtcactcgtatgtcaattgggctgcgaaaatggcggtcggtttaaacacgggagtaccgtgggtgatgtgcaaggaagatgatgcacctgacccaattataaacacttgcaacggattctactgtgattattttactccaaataaaccgtataagccaactatgtggacagaggcatggagtggctggttcacagagtttggtggaactgttcctaaacgacctgtagaggatctagcatttggagtagctcgtttcattcaaaagggcggttcgtatataaactactacatgtaccatggaggaacaaactttggacgcaccgcaggaggtccatttatcaccactagttatgactatgatgctcctatcgatgaatacgggttggtccaagagcccaagtacagtcatcttaagcagcttcatcaggcaatcaagcaatgtgaagctgccttagtttcttctgatccacatgttactaaactaggaaactacgaggaggctcatgtgttcactgctggcaaaggaagttgtgtagctttcttaacgaactatcacatgaatgcacctgcaaaagtagtgttcaataaccgacactatactctacctgcttggtccatcagcattcttccagattgtagaaacgttgttttcaacactgcgacggttgctgcaaagacatcacatgtgcaaatggtgccatctggttccatattgtactcggttgctagatacgatgaagatattgctacttatggaaaccgtgggacaatcacagctcgtggattgttggagcaggttaatgttacacgagatacaactgattacctgtggtacacaaccagtgtggatattaaggcatcagaatcattcttgcgtggaggaaaatggccaactcttacagtggattctgcagggcatgctgttcatgtgtttgtcaatggacatttttacggatctgcctttggaacaagagaaaacagaaagttttcatttagctcccaagtcaatctacgaggtggagctaacaaaatcgcactactgagtgtagcagttgggttgccgaatgttggaccacattttgagacgtgggccacaggaatcgtcgggtctgtggtgcttcatggccttgacgagggtaacaaagacttgagttggcagaaatggacttatcaggctggtctgcgaggggaatcaatgaacttggtctctcctactgaggactcctctgttgattggatcaaaggctcattggctaagcaaaacaaacaacctttgacatggtacaaggcctattttgacgcgcctagagggaacgagccgctggctttggatctaaagagtatggggaaagggcaagcttggataaacgggcaaagcatagggagatactggatggcatttgccaaaggagactgcggaagttgtaactacgctggaacatacaggcagaacaaatgccagtctggttgtggcgagccgacacaaagatggtatcatgttccgcgttcgtggttgaagccaaaagggaacttgttagtactttttgaagaacttggtggagatatatccaaagtctctgttgtgaagagatcagtaaactaacttaaaaaataaaaccaatattgtgtgtgcattacactaaaagcattactcgtgctgtgtttaatttatccctctttgtgaacagaaaccatatttgaaactcgagatagttataatacaaaatgtgtag

SEQ ID NO: 36544 - protein, 732 aa, Arabidopsis thaliana
  peptide (1)..(732): Ceres Seq. ID no. 12377493
MGTTILVLSKILTFLLTTMLIGSSVIQCSSVTYDKKAIVINGHRRILLSGSIHYPRSTPEMWEDLIKKAKDGGLDVIDTYVFWNGHEPSPGTYNFEGRYDLVRFIKTIQEVGLYVHLRIGPYVCAEWNFGGFPVWLKYVDGISFRTDNGPFKSAMQGFTEKIVQMMKEHRFFASQGGPIILSQIENEFEPDLKGLGPAGHSYVNWAAKMAVGLNTGVPWVMCKEDDAPDPIINTCNGFYCDYFTPNKPYKPTMWTEAWSGWFTEFGGTVPKRPVEDLAFGVARFIQKGGSYINYYMYHGGTNFGRTAGGPFITTSYDYDAPIDEYGLVQEPKYSHLKQLHQAIKQCEAALVSSDPHVTKLGNYEEAHVFTAGKGSCVAFLTNYHMNAPAKVVFNNRHYTLPAWSISILPDCRNVVFNTATVAAKTSHVQMVPSGSILYSVARYDEDIATYGNRGTITARGLLEQVNVTRDTTDYLWYTTSVDIKASESFLRGGKWPTLTVDSAGHAVHVFVNGHFYGSAFGTRENRKFSFSSQVNLRGGANKIALLSVAVGLPNVGPHFETWATGIVGSVVLHGLDEGNKDLSWQKWTYQAGLRGESMNLVSPTEDSSVDWIKGSLAKQNKQPLTWYKAYFDAPRGNEPLALDLKSMGKGQAWINGQSIGRYWMAFAKGDCGSCNYAGTYRQNKCQSGCGEPTQRWYHVPRSWLKPKGNLLVLFEELGGDISKVSVVKRSVN

SEQ ID NO: 36545 - protein, 714 aa, Arabidopsis thaliana
  peptide (1)..(714): Ceres Seq. ID no. 12377494
MLIGSSVIQCSSVTYDKKAIVINGHRRILLSGSIHYPRSTPEMWEDLIKKAKDGGLDVIDTYVFWNGHEPSPGTYNFEGRYDLVRFIKTIQEVGLYVHLRIGPYVCAEWNFGGFPVWLKYVDGISFRTDNGPFKSAMQGFTEKIVQMMKEHRFFASQGGPIILSQIENEFEPDLKGLGPAGHSYVNWAAKMAVGLNTGVPWVMCKEDDAPDPIINTCNGFYCDYFTPNKPYKPTMWTEAWSGWFTEFGGTVPKRPVEDLAFGVARFIQKGGSYINYYMYHGGTNFGRTAGGPFITTSYDYDAPIDEYGLVQEPKYSHLKQLHQAIKQCEAALVSSDPHVTKLGNYEEAHVFTAGKGSCVAFLTNYHMNAPAKVVFNNRHYTLPAWSISILPDCRNVVFNTATVAAKTSHVQMVPSGSILYSVARYDEDIATYGNRGTITARGLLEQVNVTRDTTDYLWYTTSVDIKASESFLRGGKWPTLTVDSAGHAVHVFVNGHFYGSAFGTRENRKFSFSSQVNLRGGANKIALLSVAVGLPNVGPHFETWATGIVGSVVLHGLDEGNKDLSWQKWTYQAGLRGESMNLVSPTEDSSVDWIKGSLAKQNKQPLTWYKAYFDAPRGNEPLALDLKSMGKGQAWINGQSIGRYWMAFAKGDCGSCNYAGTYRQNKCQSGCGEPTQRWYHVPRSWLKPKGNLLVLFEELGGDISKVSVVKRSVN

SEQ ID NO: 36546 - protein, 672 aa, Arabidopsis thaliana
  peptide (1)..(672): Ceres Seq. ID no. 12377495
MWEDLIKKAKDGGLDVIDTYVFWNGHEPSPGTYNFEGRYDLVRFIKTIQEVGLYVHLRIGPYVCAEWNFGGFPVWLKYVDGISFRTDNGPFKSAMQGFTEKIVQMMKEHRFFASQGGPIILSQIENEFEPDLKGLGPAGHSYVNWAAKMAVGLNTGVPWVMCKEDDAPDPIINTCNGFYCDYFTPNKPYKPTMWTEAWSGWFTEFGGTVPKRPVEDLAFGVARFIQKGGSYINYYMYHGGTNFGRTAGGPFITTSYDYDAPIDEYGLVQEPKYSHLKQLHQAIKQCEAALVSSDPHVTKLGNYEEAHVFTAGKGSCVAFLTNYHMNAPAKVVFNNRHYTLPAWSISILPDCRNVVFNTATVAAKTSHVQMVPSGSILYSVARYDEDIATYGNRGTITARGLLEQVNVTRDTTDYLWYTTSVDIKASESFLRGGKWPTLTVDSAGHAVHVFVNGHFYGSAFGTRENRKFSFSSQVNLRGGANKIALLSVAVGLPNVGPHFETWATGIVGSVVLHGLDEGNKDLSWQKWTYQAGLRGESMNLVSPTEDSSVDWIKGSLAKQNKQPLTWYKAYFDAPRGNEPLALDLKSMGKGQAWINGQSIGRYWMAFAKGDCGSCNYAGTYRQNKCQSGCGEPTQRWYHVPRSWLKPKGNLLVLFEELGGDISKVSVVKRSVN

SEQ ID NO: 36547 - DNA, 1100 bp, Arabidopsis thaliana; identical to SEQ ID NO: 35717
  misc_feature (1)..(1100): Ceres Seq. ID no. 12394844
  misc_feature (1)..(1100): Ortholog of  Ceres SEQ ID NO 12562983 as cited in SEQ ID NO 53309
  misc_feature (1)..(1100): Ortholog of  Ceres SEQ ID NO 14309224 as cited in SEQ ID NO 0

SEQ ID NO: 36548 - protein, 341 aa, Arabidopsis thaliana; identical to SEQ ID NO: 35718
  peptide (1)..(341): Ceres Seq. ID no. 12394845

SEQ ID NO: 36549 - protein, 314 aa, Arabidopsis thaliana; identical to SEQ ID NO: 35719
  peptide (1)..(314): Ceres Seq. ID no. 12394846

SEQ ID NO: 36550 - protein, 206 aa, Arabidopsis thaliana; identical to SEQ ID NO: 35720
  peptide (1)..(206): Ceres Seq. ID no. 12394847

SEQ ID NO: 36551 - DNA, 981 bp, Arabidopsis thaliana
  misc_feature (1)..(981): Ceres Seq. ID no. 12420512
  misc_feature (1)..(981): Ortholog of  Ceres SEQ ID NO 14306809 as cited in SEQ ID NO 57963
agaacacaaacaaaaacacattgtaacattagtttaagcattaagcttctttatgtcgaataataataattctccgaccaccgtgaatcaagaaacgacgacgtctcgtgaagtctcaatcacattgcctactgatcaatctcctcaaacctcaccaggatcatcttcttctccttcaccgagaccttccggtggatcaccggcgagaagaacggcgactggattatccggcaagcactctattttcagggggattcgactacgtaacggaaaatgggtatcggagattagagagccacgtaaaacgacaagaatttggctcgggacttatccggtaccggagatggctgccgccgcttacgacgtggctgcgttagctttaaaaggaccaggccgttttgaattttcctggtttagctttgacttacgtggctccggtttcaaactctgctgcggatataagagcggctgctagtagagcagcggagatgaagcaaccggatcagggtggggatgagaaggtattggaaccggttcaacccggcaaagaggaagaattagaagaagtgtcgtgtaactcgtgttcgttggagtttatggatgaggaagcgatgttgaatatgccgactttgttgacggagatggctgaagggatgttgatgagtccaccgagaatgatgatacatccgacgatggaagatgattcgccggagaatcatgaaggagataatctttggagttataaatgaatccattgaagctgctctcttttttattgttttccggtcgaatgagattttccccctttttttttctttttgggtcgctgttatggaaagtcaaataggttattaatatgatctattaatatttttgaaacataatgagtttgaatttgaatttttccatttttatataaatatggtttatatgagggaaaaatagatacatatcgaagatataagaattgtttttctgctt

SEQ ID NO: 36552 - protein, 140 aa, Arabidopsis thaliana
  peptide (1)..(140): Ceres Seq. ID no. 12420513
MSNNNNSPTTVNQETTTSREVSITLPTDQSPQTSPGSSSSPSPRPSGGSPARRTATGLSGKHSIFRGIRLRNGKWVSEIREPRKTTRIWLGTYPVPEMAAAAYDVAALALKGPGRFEFSWFSFDLRGSGFKLCCGYKSGC

SEQ ID NO: 36553 - protein, 86 aa, Arabidopsis thaliana
  peptide (1)..(86): Ceres Seq. ID no. 12420514
MKQPDQGGDEKVLEPVQPGKEEELEEVSCNSCSLEFMDEEAMLNMPTLLTEMAEGMLMSPPRMMIHPTMEDDSPENHEGDNLWSYK

SEQ ID NO: 36554 - DNA, 931 bp, Arabidopsis thaliana
  misc_feature (1)..(931): Ceres Seq. ID no. 12738907
  misc_feature (1)..(931): Ortholog of  Ceres SEQ ID NO 15177067 as cited in SEQ ID NO 52085
  misc_feature (1)..(931): Ortholog of  Ceres SEQ ID NO 14309480 as cited in SEQ ID NO 0
  misc_feature (1)..(931): Ortholog of  Ceres SEQ ID NO 14312472 as cited in SEQ ID NO 0
aactgtttgatttctgaggagaatccattgtttccattcgaagaaaactctaactttctcgttgaagctttgagctctctacctctttatctccggagatgtataataacatgggacctcaaccggggatgccaagacctccaggaaaccctgagcctggtccatttggtaatcctttcactggagctggctcgggttttatccgtggtggtttgggagcgtatggggagagaattttaggatcgagctctgagtatgttcagagcaatataagccggtacttctctgatccgcaatactatttccaagtgaatgatcaatatgtgaggaataaactgaaggttgttctgtttcctttcctacaccggggacactggaccagaatatctgaaccagttggtggtaggctctcatacaagcctccaatatatgatatcaatgctccagacttgtacattccctttatggcatttggtacctacgttgttcttgctggtctttcattgggacttaatggaaagtttacaccggaagctttgaattggctgtttgtgaaaggattggttggttggtttttgcaagtaatgctcctgaaagtaacacttctatcacttggtagtggagaggcaccattactagatattgtggcatacggagggtatgcttttgctggtctgtgtcttgcgggctttgccaaaataatgtggggatactcgtactacgcgttgatgccatggacttgtctatgcactgggattttcttggtgaagacgatgaaacgtgttctgtttgctgaagtaagaagttacgattcgagcaaacatcactaccttcttctgtttttagccttggtccagttcccacttttgatatggcttggtaacattagtgttaattggcttctttgaaatgaaaaaagacgtttttgtgt

SEQ ID NO: 36555 - protein, 269 aa, Arabidopsis thaliana
  peptide (1)..(269): Ceres Seq. ID no. 12738908
MYNNMGPQPGMPRPPGNPEPGPFGNPFTGAGSGFIRGGLGAYGERILGSSSEYVQSNISRYFSDPQYYFQVNDQYVRNKLKVVLFPFLHRGHWTRISEPVGGRLSYKPPIYDINAPDLYIPFMAFGTYVVLAGLSLGLNGKFTPEALNWLFVKGLVGWFLQVMLLKVTLLSLGSGEAPLLDIVAYGGYAFAGLCLAGFAKIMWGYSYYALMPWTCLCTGIFLVKTMKRVLFAEVRSYDSSKHHYLLLFLALVQFPLLIWLGNISVNWLL

SEQ ID NO: 36556 - protein, 265 aa, Arabidopsis thaliana
  peptide (1)..(265): Ceres Seq. ID no. 12738909
MGPQPGMPRPPGNPEPGPFGNPFTGAGSGFIRGGLGAYGERILGSSSEYVQSNISRYFSDPQYYFQVNDQYVRNKLKVVLFPFLHRGHWTRISEPVGGRLSYKPPIYDINAPDLYIPFMAFGTYVVLAGLSLGLNGKFTPEALNWLFVKGLVGWFLQVMLLKVTLLSLGSGEAPLLDIVAYGGYAFAGLCLAGFAKIMWGYSYYALMPWTCLCTGIFLVKTMKRVLFAEVRSYDSSKHHYLLLFLALVQFPLLIWLGNISVNWLL

SEQ ID NO: 36557 - protein, 259 aa, Arabidopsis thaliana
  peptide (1)..(259): Ceres Seq. ID no. 12738910
MPRPPGNPEPGPFGNPFTGAGSGFIRGGLGAYGERILGSSSEYVQSNISRYFSDPQYYFQVNDQYVRNKLKVVLFPFLHRGHWTRISEPVGGRLSYKPPIYDINAPDLYIPFMAFGTYVVLAGLSLGLNGKFTPEALNWLFVKGLVGWFLQVMLLKVTLLSLGSGEAPLLDIVAYGGYAFAGLCLAGFAKIMWGYSYYALMPWTCLCTGIFLVKTMKRVLFAEVRSYDSSKHHYLLLFLALVQFPLLIWLGNISVNWLL

SEQ ID NO: 36558 - DNA, 709 bp, Arabidopsis thaliana
  misc_feature (1)..(709): Ceres Seq. ID no. 12560056
  misc_feature (1)..(709): Ortholog of  Ceres SEQ ID NO 15174048 as cited in SEQ ID NO 61892
tatcgaaaatctaatttcgtcctgcgtcgaccttgtgagctacttcagtttccggccatcacgcagctccagttgtatgttttgtgggttatacaaagatgacaacaatcgaaaccggtcagaaaactcaaaagtcttctccttccggttctgctactaccgctactggtacactcaagcagtcatcagcatcgtttaaaaggtggggaaggagacacccgtttgtaagatatggacttccgatgatatctctcactgtatttggagccctaggactcggccaactacttcaaggcagtaaggatattgcaaaggtaaaagatgaccaagaatgggagattatagaaacaagaaaggcactttcgagaacaggacctgtcgatgcctataaacctaaaaacacatccattgaagatgagctcaaggctatgcaagagaaggtggacataaacacgtacgagtacaagaaaattccaaagctaaacgaaagcaagtcgagttaagaagagtctttgtataagattagtctttctagatgtgtttcaagttttaaatgactcttcagttcacataatcgcccaagtacaaattccagtaagttctggctgggcttcctaaaaccaagaacaacgagggacttgccaattgttgataatacatgttgtcgtgttgatttacgacgtccaaatagatctgaaagaggctttat

SEQ ID NO: 36559 - protein, 134 aa, Arabidopsis thaliana
  peptide (1)..(134): Ceres Seq. ID no. 12560057
MTTIETGQKTQKSSPSGSATTATGTLKQSSASFKRWGRRHPFVRYGLPMISLTVFGALGLGQLLQGSKDIAKVKDDQEWEIIETRKALSRTGPVDAYKPKNTSIEDELKAMQEKVDINTYEYKKIPKLNESKSS

SEQ ID NO: 36560 - protein, 86 aa, Arabidopsis thaliana; identical to SEQ ID NO: 29125
  peptide (1)..(86): Ceres Seq. ID no. 12560058

SEQ ID NO: 36561 - DNA, 1248 bp, Arabidopsis thaliana
  misc_feature (1)..(1248): Ceres Seq. ID no. 12558635
  misc_feature (1)..(1248): Ortholog of  Ceres SEQ ID NO 13596643 as cited in SEQ ID NO 62565
  misc_feature (1)..(1248): Ortholog of  Ceres SEQ ID NO 13597550 as cited in SEQ ID NO 65037
atcgttgatttgtcaactcaacaacgcccaaaccctaaaacaatccccaatcatcgtttcaataatcaaatttccccaattgaagaataaagatcaaaactttggaagttttcctgtgaaaataatctatcctttttgcatcatttgcgttttggttgatgaagaggatctgaagaagctgagatttaggaatgatgatgggttttgctgtatcggatgaattgttgggtactgttgctccgattgtggtgtactggttgtattctgggatttatgtagcgctctcctctttagagagttatagattgcattcaaaggttgaagaagaagagaagaatcttgtatcgaaatcttctgttgtgaaaggtgttcttgttcaacaggttgttcaagctgttgtcgctatccttttgttcacggtgacgggaagtgatgccgaagcagacaaagcgcaacagttttccttcttggtcctagcaagacagtttgtgactgccatgatagtcctcgacacatggcaatacttcatgcatcgatatatgcatcagaacaagttcttatacaaacatatccactctcaacaccaccgtcttatcgtcccttatgcatatggagctttatacaaccatccagtggaaggtcttctcttggatacaattggaggcgccttatctttcctagtctctggtatgtctccaagaacttccatcttcttcttctctttcgccacgatcaaaaccgtggacgaccattgcggtctctggctacctggaaacttattccatatggtcttcaagaacaactcggcttaccacgatatccatcatcagctctatggaaccaaatacaatttctctcagcctttctttgtcatgtgggatcggattcttggaacttacatgccttactcgcttgagaaaagagaagatggaggattcgaagctcgcccgactaaagaattcaaagacgattaagattttggagtttggatatatgttatgtatctgccctgaggttggagaaatggatgatactttgtgttattggaggtgtagttttaaaatcagaaacagaactggtttttttgcgttttgcgtttcttctcaagagcgaatttagcttggagtttgagatttgtatataaacattattgagttgttgttctactttcggtttttgttttgcatgtaatattactacaacaaacatgttttttttataatctatccatctacgaggccattcttg

SEQ ID NO: 36562 - protein, 260 aa, Arabidopsis thaliana
  peptide (1)..(260): Ceres Seq. ID no. 12558636
MMMGFAVSDELLGTVAPIVVYWLYSGIYVALSSLESYRLHSKVEEEEKNLVSKSSVVKGVLVQQVVQAVVAILLFTVTGSDAEADKAQQFSFLVLARQFVTAMIVLDTWQYFMHRYMHQNKFLYKHIHSQHHRLIVPYAYGALYNHPVEGLLLDTIGGALSFLVSGMSPRTSIFFFSFATIKTVDDHCGLWLPGNLFHMVFKNNSAYHDIHHQLYGTKYNFSQPFFVMWDRILGTYMPYSLEKREDGGFEARPTKEFKDD

SEQ ID NO: 36563 - protein, 259 aa, Arabidopsis thaliana
  peptide (1)..(259): Ceres Seq. ID no. 12558637
MMGFAVSDELLGTVAPIVVYWLYSGIYVALSSLESYRLHSKVEEEEKNLVSKSSVVKGVLVQQVVQAVVAILLFTVTGSDAEADKAQQFSFLVLARQFVTAMIVLDTWQYFMHRYMHQNKFLYKHIHSQHHRLIVPYAYGALYNHPVEGLLLDTIGGALSFLVSGMSPRTSIFFFSFATIKTVDDHCGLWLPGNLFHMVFKNNSAYHDIHHQLYGTKYNFSQPFFVMWDRILGTYMPYSLEKREDGGFEARPTKEFKDD

SEQ ID NO: 36564 - protein, 258 aa, Arabidopsis thaliana
  peptide (1)..(258): Ceres Seq. ID no. 12558638
MGFAVSDELLGTVAPIVVYWLYSGIYVALSSLESYRLHSKVEEEEKNLVSKSSVVKGVLVQQVVQAVVAILLFTVTGSDAEADKAQQFSFLVLARQFVTAMIVLDTWQYFMHRYMHQNKFLYKHIHSQHHRLIVPYAYGALYNHPVEGLLLDTIGGALSFLVSGMSPRTSIFFFSFATIKTVDDHCGLWLPGNLFHMVFKNNSAYHDIHHQLYGTKYNFSQPFFVMWDRILGTYMPYSLEKREDGGFEARPTKEFKDD

SEQ ID NO: 36565 - DNA, 1725 bp, Arabidopsis thaliana
  misc_feature (1)..(1725): Ceres Seq. ID no. 12385100
  misc_feature (1)..(1725): Ortholog of  Ceres SEQ ID NO 14315028 as cited in SEQ ID NO 57989
aattttctctcactaaatcagaaatgccgccgtcgttaccgtctctgcaactccgacggcttctcctccgtagcttcatttcctcctcctccgtcaatactcttcaatctcagccccgtatcatttcttccaagccgttgttttctcctcttcccccttcccgttcctctatattctcaacatttccttctagattcttctcatctgaaacgaatgcggaatcggaatctttggattcgaatgagatcgctctctctttctcgaaggagctcaccgggaatccagacgccgagtctcaaaccatttcgcagagattcaatctcagcttctcccacatcacgcctaatcccgatttgattctccaaactcttaatctctcaccggaagctggtcgcgcggctctaggttttaacgagtggttagattcgaactctaacttctctcacaccgatgaaacagtttcgtttttcgtcgattactttggccgcacggaaagatttcaaaggaatgctagggatcatctcgaaatacaaaggtatcgccggaggtaaaacactagaatcggcgattgataggcttgttagagctggtagacctaagcaggtcactgatttcttcgagaaaatggagaatgattatggtttgaaacgtgataaagaatcacttaccttggttgtgaagaagctttgtgagaaaggacacgcgagtatcgcagagaagatggtgaagaacactgctaatgaaatatttcctgatgagaatatatgtgatttgttgattagtggatggtgtatttgctgagaaactcgatgaagcaacctaggttagctggtgaaatgtctagaggaggatttgagataggaaccaaagcgtataacatgatgcttgattgtgtttgtaagctttgtaggaagaaagatccttttaagcttcaacctgaagtagagaaggttttgctggagatggagtttcgtggtgtacctagaaacacagagactttcaatgtgttgattaacaatctttgtaaaatcaggagaactgaagaagcaatgacattgtttggtaggatgggtgaatggggttgtcaaccagatgctgagacttatcttgttctgattaggagtttgtatcaagcagcgaggatcggtgaaggggacgaaatgatcgataagatgaaatcagcgggatatggtgagcttttgaataagaaagagtattacgggtttctcaagatattgtgtgggattgagaggcttgagcatgcgatgagtgtgtttaagagcatgaaagctaatggatgcaaacctgggatcaagacttatgatttgttgatggggaaaatgtgtgcgaataaccagctgactagagctaatggtttgtataaagaagcggctaagaaaggaatcgctgttagccctaaggaatacagagtagatccacggtttatgaaaaagaagaccaaggaagtggatagcaatgttaagaagagggagactttgcctgagaaaaccgcgaggaagaagaaacggctcaagcagatcaatatgagttttgttaagaaaccgcacaataagatgagacggagaatgtgatgctgatgaatcttcaacatctgatagaattttctaaagattattgtctttgttctttcctttttaagatattgtcaagagtactcatcattttgcttgatcatgagcaaattgtcccaataatcttttgttc

SEQ ID NO: 36566 - protein, 268 aa, Arabidopsis thaliana
  peptide (1)..(268): Ceres Seq. ID no. 12385101
MVYLLRNSMKQPRLAGEMSRGGFEIGTKAYNMMLDCVCKLCRKKDPFKLQPEVEKVLLEMEFRGVPRNTETFNVLINNLCKIRRTEEAMTLFGRMGEWGCQPDAETYLVLIRSLYQAARIGEGDEMIDKMKSAGYGELLNKKEYYGFLKILCGIERLEHAMSVFKSMKANGCKPGIKTYDLLMGKMCANNQLTRANGLYKEAAKKGIAVSPKEYRVDPRFMKKKTKEVDSNVKKRETLPEKTARKKKRLKQINMSFVKKPHNKMRRRM

SEQ ID NO: 36567 - protein, 260 aa, Arabidopsis thaliana
  peptide (1)..(260): Ceres Seq. ID no. 12385102
MKQPRLAGEMSRGGFEIGTKAYNMMLDCVCKLCRKKDPFKLQPEVEKVLLEMEFRGVPRNTETFNVLINNLCKIRRTEEAMTLFGRMGEWGCQPDAETYLVLIRSLYQAARIGEGDEMIDKMKSAGYGELLNKKEYYGFLKILCGIERLEHAMSVFKSMKANGCKPGIKTYDLLMGKMCANNQLTRANGLYKEAAKKGIAVSPKEYRVDPRFMKKKTKEVDSNVKKRETLPEKTARKKKRLKQINMSFVKKPHNKMRRRM

SEQ ID NO: 36568 - protein, 251 aa, Arabidopsis thaliana
  peptide (1)..(251): Ceres Seq. ID no. 12385103
MSRGGFEIGTKAYNMMLDCVCKLCRKKDPFKLQPEVEKVLLEMEFRGVPRNTETFNVLINNLCKIRRTEEAMTLFGRMGEWGCQPDAETYLVLIRSLYQAARIGEGDEMIDKMKSAGYGELLNKKEYYGFLKILCGIERLEHAMSVFKSMKANGCKPGIKTYDLLMGKMCANNQLTRANGLYKEAAKKGIAVSPKEYRVDPRFMKKKTKEVDSNVKKRETLPEKTARKKKRLKQINMSFVKKPHNKMRRRM

SEQ ID NO: 36569 - DNA, 689 bp, Arabidopsis thaliana
  misc_feature (1)..(689): Ceres Seq. ID no. 12603376
  misc_feature (1)..(689): Ortholog of  Ceres SEQ ID NO 13575779 as cited in SEQ ID NO 20515
atatataaaccctaatcacatttcgcaaccaccaaagcggaggaaaaatgccggctggacatggagttcgagcgagaacgagggatctgttcgcgaggcctttcaggaagaagggttacattcctctatcgacttacctgaggaccttcaaggtcggcgattacgtcgatgtgaaggtgaatggtgcgatccacaagggtatgcctcacaagttctaccatggtcgtactggtcgtatctggaacgtcaccaagcgcgccgtcggtgttgaagtcaacaaacagattgggaacaggatcataaggaagaggattcatgttcgtgtggagcatgtgcagcagtcaagatgtgccgaggagttcaagctgaggaagaagaaaaacgatgagctcaaggctgcagccaaagccaatggtgagaccatcagcaccaagagacagcctaaaggacccaaaccaggattcatggtcgaaggaatgaccttggagactgtcactccaatcccctacgatgtcgtcaacgatctcaaaggaggctattagttctatcttcttgtgctttagaactctttttcatatgttttgtagcagacttaaaactaagaattatgatttactatataacaggagtttgcaatccagattttgtaaggatggtttatttttattattggtatttttgatcttcct

SEQ ID NO: 36570 - protein, 164 aa, Arabidopsis thaliana
  peptide (1)..(164): Ceres Seq. ID no. 12603377
MPAGHGVRARTRDLFARPFRKKGYIPLSTYLRTFKVGDYVDVKVNGAIHKGMPHKFYHGRTGRIWNVTKRAVGVEVNKQIGNRIIRKRIHVRVEHVQQSRCAEEFKLRKKKNDELKAAAKANGETISTKRQPKGPKPGFMVEGMTLETVTPIPYDVVNDLKGGY

SEQ ID NO: 36571 - protein, 113 aa, Arabidopsis thaliana
  peptide (1)..(113): Ceres Seq. ID no. 12603378
MPHKFYHGRTGRIWNVTKRAVGVEVNKQIGNRIIRKRIHVRVEHVQQSRCAEEFKLRKKKNDELKAAAKANGETISTKRQPKGPKPGFMVEGMTLETVTPIPYDVVNDLKGGY

SEQ ID NO: 36572 - protein, 89 aa, Arabidopsis thaliana
  peptide (1)..(89): Ceres Seq. ID no. 12603379
YINPNHISQPPKRRKNAGWTWSSSENEGSVREAFQEEGLHSSIDLPEDLQGRRLRRCEGEWCDPQGYASQVLPWSYWSYLERHQARRRC

SEQ ID NO: 36573 - DNA, 477 bp, Arabidopsis thaliana
  misc_feature (1)..(477): Ceres Seq. ID no. 13593342
  misc_feature (1)..(477): Ortholog of  Ceres SEQ ID NO 13596039 as cited in SEQ ID NO 62117
aaaaacaattcagattccaattttctcaaactctaaaatcaatctctcaaatctctcaaccgtgatcaagatgcagatcttcgttaagactctcaccggaaagactatcaccctcgaggtggaaagctctgacaccatcgacaacgttaaggccaagatccaggataaggaaggcattcctccggaccagcagcgtctcatcttcgctggaaagcagcttgaggatggacgtactttggccgactacaacatccagaaggagtctactcttcacttggtcctccgtctccgtggtggtttctaaaccttgtctctctctcttatggttactgaaccaagttcatgtatcgtttcatctagtactttggtggtttatgttttggggccatgtacagcctctgataaataattgatcgactatgtttccgtttctttcatctctcttttctttcaaacaacaaatcgaacttattctcc

SEQ ID NO: 36574 - protein, 100 aa, Arabidopsis thaliana
  peptide (1)..(100): Ceres Seq. ID no. 13593343
KTIQIPIFSNSKINLSNLSTVIKMQIFVKTLTGKTITLEVESSDTIDNVKAKIQDKEGIPPDQQRLIFAGKQLEDGRTLADYNIQKESTLHLVLRLRGGF

SEQ ID NO: 36575 - protein, 77 aa, Arabidopsis thaliana
  peptide (1)..(77): Ceres Seq. ID no. 13593344
MQIFVKTLTGKTITLEVESSDTIDNVKAKIQDKEGIPPDQQRLIFAGKQLEDGRTLADYNIQKESTLHLVLRLRGGF

SEQ ID NO: 36576 - protein, 62 aa, Arabidopsis thaliana
  peptide (1)..(62): Ceres Seq. ID no. 13593345
MDVLWPTTTSRRSLLFTWSSVSVVVSKPCLSLLWLLNQVHVSFHLVLWWFMFWGHVQPLINN

SEQ ID NO: 36577 - DNA, 672 bp, Arabidopsis thaliana
  misc_feature (1)..(672): Ceres Seq. ID no. 12330428
  misc_feature (1)..(672): Ortholog of  Ceres SEQ ID NO 15180555 as cited in SEQ ID NO 1214
  misc_feature (1)..(672): Ortholog of  Ceres SEQ ID NO 13594498 as cited in SEQ ID NO 51322
  misc_feature (1)..(672): Ortholog of  Ceres SEQ ID NO 15179033 as cited in SEQ ID NO 0
ctgaacgaagctctctctctgattggccggatctgccggagagaaaaatgacgacgagtattcacatcacagctctcgacggaatcgtcaacgtgaactcactcttcacactcgccgtattcatcggattagcttggaaccctaccgatccagacaacagcctcgtaaccgaccctaattgcgtccccacagctcgtatggctgagaatctcgtcgccttccatgtgtactctttcgcatcattcctattctcaagtctcatcgctctaggtctcaaacaagcaatgaggctcaacatagcttcttcgtttcacatctctactcgaatcgatcctgtggtttactatgtgaacaagacggctcttagatttgggatggttacatccggtttgggatcggtttgtggatgtgggtttctcatgttggctttgattaatgttgttcagatcaagcttgggactttgggctgtggtgctagtggtcatacttatgcagctgttgtgccgcttgtgattctggttccttctgcacttttcatctatgtttctcttatgttatatgcttttactcgttagagacatggtttttgattccatggttgatgcaattagggttatgtttgtatgatgatgatatgatggaaatgagaatgattctatgtttgatatggtt

SEQ ID NO: 36578 - protein, 190 aa, Arabidopsis thaliana
  peptide (1)..(190): Ceres Seq. ID no. 12330429
ERSSLSDWPDLPERKMTTSIHITALDGIVNVNSLFTLAVFIGLAWNPTDPDNSLVTDPNCVPTARMAENLVAFHVYSFASFLFSSLIALGLKQAMRLNIASSFHISTRIDPVVYYVNKTALRFGMVTSGLGSVCGCGFLMLALINVVQIKLGTLGCGASGHTYAAVVPLVILVPSALFIYVSLMLYAFTR

SEQ ID NO: 36579 - protein, 175 aa, Arabidopsis thaliana
  peptide (1)..(175): Ceres Seq. ID no. 12330430
MTTSIHITALDGIVNVNSLFTLAVFIGLAWNPTDPDNSLVTDPNCVPTARMAENLVAFHVYSFASFLFSSLIALGLKQAMRLNIASSFHISTRIDPVVYYVNKTALRFGMVTSGLGSVCGCGFLMLALINVVQIKLGTLGCGASGHTYAAVVPLVILVPSALFIYVSLMLYAFTR

SEQ ID NO: 36580 - protein, 125 aa, Arabidopsis thaliana
  peptide (1)..(125): Ceres Seq. ID no. 12330431
MAENLVAFHVYSFASFLFSSLIALGLKQAMRLNIASSFHISTRIDPVVYYVNKTALRFGMVTSGLGSVCGCGFLMLALINVVQIKLGTLGCGASGHTYAAVVPLVILVPSALFIYVSLMLYAFTR

SEQ ID NO: 36581 - DNA, 2772 bp, Arabidopsis thaliana
  misc_feature (1)..(2772): Ceres Seq. ID no. 12558639
  misc_feature (1)..(2772): Ortholog of  Ceres SEQ ID NO 12612470 as cited in SEQ ID NO 55136
  misc_feature (1)..(2772): Ortholog of  Ceres SEQ ID NO 12612425 as cited in SEQ ID NO 56789
  misc_feature (1)..(2772): Ortholog of  Ceres SEQ ID NO 13503512 as cited in SEQ ID NO 65121
ctgttgctgctgataaaaatatggctccttctacttctggtactccgatccacagatcaggctctagacctcagcttgatctaagcaaagccgaaattcaggggaacctcgaggagagagatcccaccattttattgcctaatcagtctgatgatatctctcatttggctcttgatatcggaggttctttgataaagttgttgtatttttcacgacatgaggactactctaatgatgatgataagcggaagaggacgatcaaggagagattgggtattaccaatggcaacttgagaagttatcctgttcttggtggtagacttcattttgtcaagtttgagactcacaaaattaatgagtgcttggattttattcattccaagcagcttcatcgccgagatccttatccttggagttcaaagaccttgcctttggggactggtgttatcaaggtcacaggtggcggggcatttaaatttgcagacttgttcaaggaacggctgggcgttagtattgagaaagaagatgaaatgcattgtcttgtttctggagcaaattttttgctcaaggctattcgacatgaagcctttacgcacatggagggtgagaaagaatttgtacagatagatcccaatgacttgtatccttatcttcttgtgaacgttggatctggtgttagcataatcaaggttgatggtgaaggaaagtttgaacgtgtgagtggaactaatgttggcggtggtacctattggggcttaggaagacttctaacgaagtgcaagagttttgatgaattgctagaactcagccaaaagggagataatagtgccattgacatgctcgttggtgatatttatggtggcatggattactccaagattggtctctctgcttcaacaatagcttctagttttggcaaggcgatatctgaaaataaggaactggacgattacagacctgaagatatttccttgtctctgttgcggatgatttcatacaatattgggcagatatcgtacttgaatgcccttcgctttgggttgaagcgaatattttttggaggatttttcataaggggtcatgcatataccatggatacaatttcatttgctgtacatttctggtctaagggagagatgcaagctatgttcttgagacatgaaggttttctgggtgctctaggtgcgttcatgagctatgagaagcacggattggatgatttaatgtcccatcagttggttgagaggttcccaatgggtgcaccatatactggaggaaatattcacggaccaccactcggtgatttggacgagaagatttcgtggatggagaagtttgtgcgtagaggaactgaaataactgctcctgtaccaatgactccatcaaaaacgactgggcttggagggtttgaagttccatcatccagaggtagtgctttaagatctgacgccagtgctttaaatgttggtgttctccatcttgtgcccacattggaggtgttcccattactagctgatccgaaaacgtatgagcctaacacgattgatctatcagatcaaggcgaacgagagtactggctcaaagttttgtccgagcatttgccagacctcgttgatacggctgtagcaagtgaaggaggaaccgaggatgcgaaaaggcggggtgatgcttttgctcgtgctttttctgctcatttggcaagattaatggaggagccagctgcatatggaaagctggggctggcaaatctcttggaacttagggaagaatgcttaagagaattccagtttgttgatgcctatagaagcatcaagcaaagggagaacgaggcatcacttgctgttttacctgatttacttgaggagcttgattcgatgagcgaggaggcaaggttgcttacacttatagaaggtgttcttgctgcaaacatatttgactggggatctcgagcatgtgtggatctatatcacaaaggaaccattattgaaatatacagaatgagtcgcaacaagatgcagagaccgtggagggtagacgattttgatgctttcaaagaaaggatgcttggatctggaggtaagcagcctcatcgacataaaagagcattactttttgttgataactcgggagcagatgtcattcttgggatgcttcctcttgctcgagagtttctccgtcgagggactgaagttgttctagtggcaaactctcttcctgctcttaacgacgtgaccgctatggaactgcctgatatagtcgctggggctgctaagcactgtgacatcttgaggagagcggcagaaatgggaggcttacttgtggatgcgatggtaaatccaggggatggatcaaagaaggattcaacgtcagcaccattgatggttgttgaaaatggatgtggaagtccttgtatcgacctcagacaagtcagctctgagcttgcagccgctgccaaagacgctgatcttgttgtcttggaaggtatgggaagagcacttcacaccaacttcaacgctcaattccaatgcgaggctctcaagctagcaatggttaaaaatcagagattggctgagaagttgataaaaggaaacatatatgattgtgtatgcagatacgagcctccctcgctttaacaatgttatgtatcatttcttcaacctttagactactgttgtatacagattaagcattcgtcatgtggcatatgtatttttatttagactacacttttactgtataaaattgtatttgaatgaatcaaaatcacttgct

SEQ ID NO: 36582 - protein, 876 aa, Arabidopsis thaliana
  peptide (1)..(876): Ceres Seq. ID no. 12558640
VAADKNMAPSTSGTPIHRSGSRPQLDLSKAEIQGNLEERDPTILLPNQSDDISHLALDIGGSLIKLLYFSRHEDYSNDDDKRKRTIKERLGITNGNLRSYPVLGGRLHFVKFETHKINECLDFIHSKQLHRRDPYPWSSKTLPLGTGVIKVTGGGAFKFADLFKERLGVSIEKEDEMHCLVSGANFLLKAIRHEAFTHMEGEKEFVQIDPNDLYPYLLVNVGSGVSIIKVDGEGKFERVSGTNVGGGTYWGLGRLLTKCKSFDELLELSQKGDNSAIDMLVGDIYGGMDYSKIGLSASTIASSFGKAISENKELDDYRPEDISLSLLRMISYNIGQISYLNALRFGLKRIFFGGFFIRGHAYTMDTISFAVHFWSKGEMQAMFLRHEGFLGALGAFMSYEKHGLDDLMSHQLVERFPMGAPYTGGNIHGPPLGDLDEKISWMEKFVRRGTEITAPVPMTPSKTTGLGGFEVPSSRGSALRSDASALNVGVLHLVPTLEVFPLLADPKTYEPNTIDLSDQGEREYWLKVLSEHLPDLVDTAVASEGGTEDAKRRGDAFARAFSAHLARLMEEPAAYGKLGLANLLELREECLREFQFVDAYRSIKQRENEASLAVLPDLLEELDSMSEEARLLTLIEGVLAANIFDWGSRACVDLYHKGTIIEIYRMSRNKMQRPWRVDDFDAFKERMLGSGGKQPHRHKRALLFVDNSGADVILGMLPLAREFLRRGTEVVLVANSLPALNDVTAMELPDIVAGAAKHCDILRRAAEMGGLLVDAMVNPGDGSKKDSTSAPLMVVENGCGSPCIDLRQVSSELAAAAKDADLVVLEGMGRALHTNFNAQFQCEALKLAMVKNQRLAEKLIKGNIYDCVCRYEPPSL

SEQ ID NO: 36583 - protein, 870 aa, Arabidopsis thaliana
  peptide (1)..(870): Ceres Seq. ID no. 12558641
MAPSTSGTPIHRSGSRPQLDLSKAEIQGNLEERDPTILLPNQSDDISHLALDIGGSLIKLLYFSRHEDYSNDDDKRKRTIKERLGITNGNLRSYPVLGGRLHFVKFETHKINECLDFIHSKQLHRRDPYPWSSKTLPLGTGVIKVTGGGAFKFADLFKERLGVSIEKEDEMHCLVSGANFLLKAIRHEAFTHMEGEKEFVQIDPNDLYPYLLVNVGSGVSIIKVDGEGKFERVSGTNVGGGTYWGLGRLLTKCKSFDELLELSQKGDNSAIDMLVGDIYGGMDYSKIGLSASTIASSFGKAISENKELDDYRPEDISLSLLRMISYNIGQISYLNALRFGLKRIFFGGFFIRGHAYTMDTISFAVHFWSKGEMQAMFLRHEGFLGALGAFMSYEKHGLDDLMSHQLVERFPMGAPYTGGNIHGPPLGDLDEKISWMEKFVRRGTEITAPVPMTPSKTTGLGGFEVPSSRGSALRSDASALNVGVLHLVPTLEVFPLLADPKTYEPNTIDLSDQGEREYWLKVLSEHLPDLVDTAVASEGGTEDAKRRGDAFARAFSAHLARLMEEPAAYGKLGLANLLELREECLREFQFVDAYRSIKQRENEASLAVLPDLLEELDSMSEEARLLTLIEGVLAANIFDWGSRACVDLYHKGTIIEIYRMSRNKMQRPWRVDDFDAFKERMLGSGGKQPHRHKRALLFVDNSGADVILGMLPLAREFLRRGTEVVLVANSLPALNDVTAMELPDIVAGAAKHCDILRRAAEMGGLLVDAMVNPGDGSKKDSTSAPLMVVENGCGSPCIDLRQVSSELAAAAKDADLVVLEGMGRALHTNFNAQFQCEALKLAMVKNQRLAEKLIKGNIYDCVCRYEPPSL

SEQ ID NO: 36584 - protein, 700 aa, Arabidopsis thaliana
  peptide (1)..(700): Ceres Seq. ID no. 12558642
MHCLVSGANFLLKAIRHEAFTHMEGEKEFVQIDPNDLYPYLLVNVGSGVSIIKVDGEGKFERVSGTNVGGGTYWGLGRLLTKCKSFDELLELSQKGDNSAIDMLVGDIYGGMDYSKIGLSASTIASSFGKAISENKELDDYRPEDISLSLLRMISYNIGQISYLNALRFGLKRIFFGGFFIRGHAYTMDTISFAVHFWSKGEMQAMFLRHEGFLGALGAFMSYEKHGLDDLMSHQLVERFPMGAPYTGGNIHGPPLGDLDEKISWMEKFVRRGTEITAPVPMTPSKTTGLGGFEVPSSRGSALRSDASALNVGVLHLVPTLEVFPLLADPKTYEPNTIDLSDQGEREYWLKVLSEHLPDLVDTAVASEGGTEDAKRRGDAFARAFSAHLARLMEEPAAYGKLGLANLLELREECLREFQFVDAYRSIKQRENEASLAVLPDLLEELDSMSEEARLLTLIEGVLAANIFDWGSRACVDLYHKGTIIEIYRMSRNKMQRPWRVDDFDAFKERMLGSGGKQPHRHKRALLFVDNSGADVILGMLPLAREFLRRGTEVVLVANSLPALNDVTAMELPDIVAGAAKHCDILRRAAEMGGLLVDAMVNPGDGSKKDSTSAPLMVVENGCGSPCIDLRQVSSELAAAAKDADLVVLEGMGRALHTNFNAQFQCEALKLAMVKNQRLAEKLIKGNIYDCVCRYEPPSL

SEQ ID NO: 36585 - DNA, 796 bp, Arabidopsis thaliana
  misc_feature (1)..(796): Ceres Seq. ID no. 13499549
  misc_feature (1)..(796): Ortholog of  Ceres SEQ ID NO 12610341 as cited in SEQ ID NO 56073
aatgattaatgtctgaaaaatttgatatttgaagcgaatcaacaacaacagtcgggttcgtgaaaaaaaaagatttgatcggctaaacttggtcggacttgtcaatggcagacgtacctggatacctgcgcacttgtttggatatggggaagatagctttcttagcaatccttgtatctacagggattgtgttgcagattctggcttgtgctctgttcaataactggtggccaatgctaagtgttataatgtatgtgctcctcccaatgcctttgctcttctttggtggatcagacagtacatctctattcaacgagtcagataatagttggatcaatgcagccaagttcttgactggtgcgtcagcagttggaagcgtcgcgataccatcgattctaaaacacgccggactcatcggttggggcgcattagcccttgatctctcatcctaccttgtcttcctcgtggctattttgggttacatttgcataggagatgccagtgagaactattacagctacatttaaaaagacacacacaaattcatcatcatttgtttaaacctcaacaaagtctcagccttttatcacttccccgttcgattgatgcttcgaaacgaaaacatcttgtttctatggaatgactcgctgattggattttcacaagtttaagagtttgtgtgtcaagtgtatgtatgaatgattttttttttgggtggttttgttacgttttgatgtatagaacatatttattatttggtggaatatatataaattttctttacaaaagcatattg

SEQ ID NO: 36586 - protein, 140 aa, Arabidopsis thaliana
  peptide (1)..(140): Ceres Seq. ID no. 13499550
MADVPGYLRTCLDMGKIAFLAILVSTGIVLQILACALFNNWWPMLSVIMYVLLPMPLLFFGGSDSTSLFNESDNSWINAAKFLTGASAVGSVAIPSILKHAGLIGWGALALDLSSYLVFLVAILGYICIGDASENYYSYI

SEQ ID NO: 36587 - protein, 127 aa, Arabidopsis thaliana
  peptide (1)..(127): Ceres Seq. ID no. 13499551
MGKIAFLAILVSTGIVLQILACALFNNWWPMLSVIMYVLLPMPLLFFGGSDSTSLFNESDNSWINAAKFLTGASAVGSVAIPSILKHAGLIGWGALALDLSSYLVFLVAILGYICIGDASENYYSYI

SEQ ID NO: 36588 - protein, 97 aa, Arabidopsis thaliana
  peptide (1)..(97): Ceres Seq. ID no. 13499552
MLSVIMYVLLPMPLLFFGGSDSTSLFNESDNSWINAAKFLTGASAVGSVAIPSILKHAGLIGWGALALDLSSYLVFLVAILGYICIGDASENYYSYI

SEQ ID NO: 36589 - DNA, 853 bp, Arabidopsis thaliana
  misc_feature (1)..(853): Ceres Seq. ID no. 12393853
  misc_feature (1)..(853): Ortholog of  Ceres SEQ ID NO 12616314 as cited in SEQ ID NO 64355
atgaaagttgttgtttttaggtacaattcattctattcaaaacaattttgacgtctctcaatcccattttagatacaattgattctatttcaggttttggggttatttctcaaatcgattcctgtcaccaaaatcaaaatctgaaagcaaatggttgatgaggatcacttggaagattttgtctgtgtttgactatggagttgcacataaatggttagggatcagaggaataagttgactcaggaagtttcttctgctttcagcggcaagctcaacatccttgctatatattctgcttcaaaacatgctcttcatggctacttccacagcttgcgttctgagttctgtcagaagggaatcaaggttaccgtcgtttgtcctggtccaatagaaacctggaatggtacaggaacatcaacttcggaagacagcaagtctcctgagaaacgtgtgtcatctgaacgatgtgcagagctgactataatcgctgcatctcataacttgaaggaagcttggatttcatatcagccagtactactcgtgatgtatctagtgcagtacatgccttcccttggcttctggctcatggacaaggttggaggaaagcgtgtggaggtcgcggaaaagaaaggcaacacatactcgtgggatttactgttcgggaagaagactaaaacaaactgaagctgattctctagaagatacacatagatgtggttggttgagccttagtccgtagatgtggttggtgtttgtttgctagtttgattgttaaataactaccaaagcgtcgaaaaatgttttgttgccttgtgaggtgctcaataagtaagaaaagatgtgatcttctgtg

SEQ ID NO: 36590 - protein, 157 aa, Arabidopsis thaliana
  peptide (1)..(157): Ceres Seq. ID no. 12393854
MVRDQRNKLTQEVSSAFSGKLNILAIYSASKHALHGYFHSLRSEFCQKGIKVTVVCPGPIETWNGTGTSTSEDSKSPEKRVSSERCAELTIIAASHNLKEAWISYQPVLLVMYLVQYMPSLGFWLMDKVGGKRVEVAEKKGNTYSWDLLFGKKTKTN

SEQ ID NO: 36591 - DNA, 619 bp, Arabidopsis thaliana
  misc_feature (1)..(619): Ceres Seq. ID no. 12394008
  misc_feature (1)..(619): Ortholog of  Ceres SEQ ID NO 15176511 as cited in SEQ ID NO 1054
  misc_feature (1)..(619): Ortholog of  Ceres SEQ ID NO 14305178 as cited in SEQ ID NO 0
ccgcgcaggaaatgttcagccctatcagtttgttctaccgccgaattggaaacagttgcgaatagccaatattttgtcaggtaattactgtcaaccgaaatgtgcagagccatggatcgaagtgaagtttgagaacgagaagcaaggcaaggttcaagtagttgcatctcctttaatccgcttaaccaacaaaccaaatgcaactattgaagatctcggtgagcctgagaaagtgattgcttctcttggtccttttgtcaccggaaactcttatgactctgatgaacttttgaagacttcaatcgaaaaaattggagatcaaacgtactataagtatgtgttggagacgccatttgcgctcacgggaagtcacaatcttgcaaaagcgacagcaaagggaagcacggttgttttgtttgttgtaagtgctactgaaaagcaatggcagagctcacagaagactcttgaagccattcttgattcttttcaactgtaaatcagagtttttgttatgactctggacttgagaaactaaagagcaaacagtttatgctaaggggtgtctgtgcgtagtaacattaactcattcttttctactgtaaattcgagctatgactcg

SEQ ID NO: 36592 - protein, 164 aa, Arabidopsis thaliana
  peptide (1)..(164): Ceres Seq. ID no. 12394009
RAGNVQPYQFVLPPNWKQLRIANILSGNYCQPKCAEPWIEVKFENEKQGKVQVVASPLIRLTNKPNATIEDLGEPEKVIASLGPFVTGNSYDSDELLKTSIEKIGDQTYYKYVLETPFALTGSHNLAKATAKGSTVVLFVVSATEKQWQSSQKTLEAILDSFQL

SEQ ID NO: 36593 - DNA, 1023 bp, Arabidopsis thaliana
  misc_feature (1)..(1023): Ceres Seq. ID no. 12394000
  misc_feature (1)..(1023): Ortholog of  Ceres SEQ ID NO 13600601 as cited in SEQ ID NO 497
  misc_feature (1)..(1023): Ortholog of  Ceres SEQ ID NO 13664283 as cited in SEQ ID NO 61283
  misc_feature (1)..(1023): Ortholog of  Ceres SEQ ID NO 12635513 as cited in SEQ ID NO 0
acaatcaaagatgacactagctagacattttcgttttcatctccccacgaatcaaagatggcttttgccattgcttctgctctcacttccacactcacattatccacgagcagagtccaaaatcctacccagagaagaccacatgtagcgtccacatcatccaccggtggaagattaatgagagagcgcttggtggtggttcgtgccggcaaagaagtttctagcgtctgtgaaccacttcctccggaccgtcctttatggttccctggtagctctccacctgaatggctcgatggcagcttacctggtgatttcggtttcgatcctctcggtttagggtctgatccggacaccctcaaatggtttgcacaagctgagcttatacatagccggtgggcaatgctggccgtgaccggtatcataataccagaatgtctcgagcggttaggtttcattgaaaatttctcatggtatgacgcagggtctcgtgagtacttcgcggattccactacgctgtttgtggctcaaatggttttaatgggctgggcagaaggtagaagatgggctgatttgattaaaccggggtctgttgacatagaaccaaagtacccgcataaagtaaatcctaaaccggatgttggttaccctggaggtttgtggttcgattttatgatgtgggggagaggttctcctgaaccggtaatggttttgaggactaaagagattaagaacggacggctcgcgatgcttgctttccttgggttctgtttccaagctacctacactagccaagatccaattgagaatctcatggctcatctggctgatcctggtcattgcaacgtcttttcggcatttacatcacattaatgaggattagcttggggcgaatataatattttttatatatttatggatgttgaacttttgtatagtgtcactcgccgttgttacaacttctgcttacttaattaacatgtaaaatatattttatatatatgtagaagaaagaaacaagaagag

SEQ ID NO: 36594 - protein, 270 aa, Arabidopsis thaliana
  peptide (1)..(270): Ceres Seq. ID no. 12394001
MAFAIASALTSTLTLSTSRVQNPTQRRPHVASTSSTGGRLMRERLVVVRAGKEVSSVCEPLPPDRPLWFPGSSPPEWLDGSLPGDFGFDPLGLGSDPDTLKWFAQAELIHSRWAMLAVTGIIIPECLERLGFIENFSWYDAGSREYFADSTTLFVAQMVLMGWAEGRRWADLIKPGSVDIEPKYPHKVNPKPDVGYPGGLWFDFMMWGRGSPEPVMVLRTKEIKNGRLAMLAFLGFCFQATYTSQDPIENLMAHLADPGHCNVFSAFTSH

SEQ ID NO: 36595 - protein, 230 aa, Arabidopsis thaliana
  peptide (1)..(230): Ceres Seq. ID no. 12394002
MRERLVVVRAGKEVSSVCEPLPPDRPLWFPGSSPPEWLDGSLPGDFGFDPLGLGSDPDTLKWFAQAELIHSRWAMLAVTGIIIPECLERLGFIENFSWYDAGSREYFADSTTLFVAQMVLMGWAEGRRWADLIKPGSVDIEPKYPHKVNPKPDVGYPGGLWFDFMMWGRGSPEPVMVLRTKEIKNGRLAMLAFLGFCFQATYTSQDPIENLMAHLADPGHCNVFSAFTSH

SEQ ID NO: 36596 - protein, 156 aa, Arabidopsis thaliana
  peptide (1)..(156): Ceres Seq. ID no. 12394003
MLAVTGIIIPECLERLGFIENFSWYDAGSREYFADSTTLFVAQMVLMGWAEGRRWADLIKPGSVDIEPKYPHKVNPKPDVGYPGGLWFDFMMWGRGSPEPVMVLRTKEIKNGRLAMLAFLGFCFQATYTSQDPIENLMAHLADPGHCNVFSAFTSH

SEQ ID NO: 36597 - DNA, 1499 bp, Arabidopsis thaliana
  misc_feature (1)..(1499): Ceres Seq. ID no. 12560653
  misc_feature (1)..(1499): Ortholog of  Ceres SEQ ID NO 15169350 as cited in SEQ ID NO 53271
tctctctcacttttctgaaaaagttgtacgtccaaaatctccaaacccttttttaagaacaaatctcaatccatggcaatcatcgatcaaaattgagaatcacacaagcttcacaatgtcatcatcatcatcaacgacgacgaacacaacaacagaatcagattcatcatctctacctactcacatcggtagatcaaattccgacggaatcatcgacactacaccatttcttcctcccaccgttacaagaaccataagcgtagatgaagaatccaatccaattcatcgatccgctagacgacaaggtctaagagaagcagcgaggttcctccgtcacgctggtagccggagaatgatgcgtgaaccatcgatgctcgttagagaaaccgctgctgagcaattagaagagagacaaagtgattgggcgtattctaaacctgtggtgtttcttgacattttgtggaatcttgcttttgttgccatcggtgttgctgttctgatacttagccgtgacgagaagcctaatatgccgttgagagtttgggttgttggttatgggattcaatgttggttacatatggcttgtgtttgtgttgagtataggcggaggagacgacgacgtcacccggaggatggtggtggttctgggttgacgaattcttcgtcgcagcaatatgtttcgttagcgcaattggaggatagaggagagactagtaatcctgcgaagcatcttgaatcagccaatacgatgttctcattcatctggtggataattggattctactgggtttctgcaggaggccaaacactatctagtgactctcctcagctctattggctgtgtatcatttttctcggtttcgatgttttctttgttgtgttctgtgttgcattggcttgtgttatcggccttgctgtttgctgttgtcttccatgtataattgcaattctatatgctgttgccgaccaggagggagcatcgaagaacgacatagatcaaatgccgaaattcagatttacaaaaactggcaatgttgaaaagctctcaggcaaagcacggggaataatgacggaatgtggaacagattcacctattgaacgctcgctctctccagaagacgcggaatgctgcatctgtctctgtgaatatgaagatggagttgaacttagagaactcccttgtaaccatcactttcattgcacttgcatcgataaatggcttcatataaactcacgttgcccgctctgcaagtttaacatcttgaagaacgcaaacaacgaagtctagtaaaatctgttctggttctaggatcaatccgaacgaaccatcccagaccagaacgtttcagatatatgtaaactctggttcgtgttttagtgttgtgcagttagaaaatctagtccatatctctttctcctgatcttctattacaatgcgtcaatgcgcctattgatagtatgtaggaataaatcgttggattagtcctactttatttttt

SEQ ID NO: 36598 - protein, 428 aa, Arabidopsis thaliana
  peptide (1)..(428): Ceres Seq. ID no. 12560654
LSHFSEKVVRPKSPNPFLRTNLNPWQSSIKIENHTSFTMSSSSSTTTNTTTESDSSSLPTHIGRSNSDGIIDTTPFLPPTVTRTISVDEESNPIHRSARRQGLREAARFLRHAGSRRMMREPSMLVRETAAEQLEERQSDWAYSKPVVFLDILWNLAFVAIGVAVLILSRDEKPNMPLRVWVVGYGIQCWLHMACVCVEYRRRRRRRHPEDGGGSGLTNSSSQQYVSLAQLEDRGETSNPAKHLESANTMFSFIWWIIGFYWVSAGGQTLSSDSPQLYWLCIIFLGFDVFFVVFCVALACVIGLAVCCCLPCIIAILYAVADQEGASKNDIDQMPKFRFTKTGNVEKLSGKARGIMTECGTDSPIERSLSPEDAECCICLCEYEDGVELRELPCNHHFHCTCIDKWLHINSRCPLCKFNILKNANNEV

SEQ ID NO: 36599 - protein, 390 aa, Arabidopsis thaliana
  peptide (1)..(390): Ceres Seq. ID no. 12560655
MSSSSSTTTNTTTESDSSSLPTHIGRSNSDGIIDTTPFLPPTVTRTISVDEESNPIHRSARRQGLREAARFLRHAGSRRMMREPSMLVRETAAEQLEERQSDWAYSKPVVFLDILWNLAFVAIGVAVLILSRDEKPNMPLRVWVVGYGIQCWLHMACVCVEYRRRRRRRHPEDGGGSGLTNSSSQQYVSLAQLEDRGETSNPAKHLESANTMFSFIWWIIGFYWVSAGGQTLSSDSPQLYWLCIIFLGFDVFFVVFCVALACVIGLAVCCCLPCIIAILYAVADQEGASKNDIDQMPKFRFTKTGNVEKLSGKARGIMTECGTDSPIERSLSPEDAECCICLCEYEDGVELRELPCNHHFHCTCIDKWLHINSRCPLCKFNILKNANNEV

SEQ ID NO: 36600 - protein, 311 aa, Arabidopsis thaliana
  peptide (1)..(311): Ceres Seq. ID no. 12560656
MMREPSMLVRETAAEQLEERQSDWAYSKPVVFLDILWNLAFVAIGVAVLILSRDEKPNMPLRVWVVGYGIQCWLHMACVCVEYRRRRRRRHPEDGGGSGLTNSSSQQYVSLAQLEDRGETSNPAKHLESANTMFSFIWWIIGFYWVSAGGQTLSSDSPQLYWLCIIFLGFDVFFVVFCVALACVIGLAVCCCLPCIIAILYAVADQEGASKNDIDQMPKFRFTKTGNVEKLSGKARGIMTECGTDSPIERSLSPEDAECCICLCEYEDGVELRELPCNHHFHCTCIDKWLHINSRCPLCKFNILKNANNEV

SEQ ID NO: 36601 - DNA, 2263 bp, Arabidopsis thaliana
  misc_feature (1)..(2263): Ceres Seq. ID no. 13591438
  misc_feature (1)..(2263): Ortholog of  Ceres SEQ ID NO 13584744 as cited in SEQ ID NO 69137
accatcttcttcttcaatggaaactccggattaaatgacacttctgtaacttcctatatttactaaaatgccatctcgcctctctccgccagatattccgccgctgcaaccgacgcctacggttagtgacggccatcatcgtttccagactcttccacttatcatagccggttctctgactttaaccggagttttactcatcctcgtcactttacttatttaccgaagactctaccgaaaccgtacggctccttcagatcttatctccaactccaagtctcctcaacactaccaatgtcgacgcttctcttactctcagctccgccgcgctacaaactctttctccgagtcgactcacctcggtcacggcggattcggctctgtttacaaagctgatttcccgagtggcggcgattcactcgccgtcaaagtcatggatacctccgctggttctttacaaggcgaacgtgagtttcacaacgagctttctctctcttctcacttaattggctctcctcatgtcgtctctctccttggattctcctccgatcgtcgtggtcggaagcttatcctcgtctacgaacttatggctaatcgtagtttacaagacgcgcttttggatcgcaaatgtgtggagcttatggattggaacaaaaggtttgagattgccacggatatagcaaaaggcatcgagtttcttcaccattgttgtgatccaattataatccatggagatattaaacctagtaacatccttctcgattctgatttcaaagccaaaatcggagatttcggtctcgcgagagtaaagtcggaggatttcgatactaggattctgattgaggaagaagataagagcaaggatgttgttgaagataatgggtcgattcttgaggagactgaaagcgtgattactgtgtttgaagaaggtaataatgttgtcaatctctcgccggagacttgtgggattagtgtcttgacagagacggtggcctctccgggtgaaaaatctggactttcgccagagaattgtgcagtgagcattttgacggtggaggtgggagcagcatctccggcgatggcatcgataccgtcaccggagacttgtgcgattagcgttttgacggatactggattgtcaccggaaagtagcaagcttaaagtgggatcgaagagagattggtggtggaaacaggacaacaatggtggaagcagaggagggattgaatcagggagtgtgaaggattacgtgatggaatggattgggagtgagattaagaaagagagacctagcaacaataaggaatggatcaacaatggtgatgggtcatcatcagtctctaagaagaagaagaaagagaagaagagaaagcctagagagtggtggaaggaagagttttgtgaagagctgactagaaagaagaggaaaaagaagaagaagaagaaaagagggttaagctcaatctcaagcattgactcttggtttcatagagacgatggtgcttcctctgttcatgaccacaatcttaatcctaccaagaggaagaagaggaatagtatagattggtgggtagatgggttaagtggggagctgaagtcagtcatgggtaaaaaaaacagtcaagattctggtttgtggtgtgatgtgaatgttcagaagagtggtggagtcagcagcacaccgagtatgagaggtacggtgtgttacattgcaccagaatgtggaggaggaggtgtgttgtctgagaaatgcgatgtttatagttttggggttctgcttttggttcttgtctcaggaagacggccattgcaggtgactgcttcgccgatgtcggagtttgagagggctaacttgatttcatgggctaagcaattagcttgcaatggtaaattgttggagttagttgataaatctatacactctttggagaaagagcaagcggttctttgtattactattgcattgctttgtctgcaaagatctccggttaagagaccaacgatgaaggagattgttgagatgctttcgggtgtgtctgagccaccgcatttgccgtttgagttctcaccctcgccgcctatgggttttccgtttaagtcaaggaagaaagcacggtgaaattcgggtttggttatgacttatgagctcagtcatcaagtgtaggatttttccggtccaaagctaaaccaattgcgagttgtaggaactatttgattccgtaagattagctttttgcaaatatttatgaatatttagttgctt

SEQ ID NO: 36602 - protein, 683 aa, Arabidopsis thaliana
  peptide (1)..(683): Ceres Seq. ID no. 13591439
MPSRLSPPDIPPLQPTPTVSDGHHRFQTLPLIIAGSLTLTGVLLILVTLLIYRRLYRNRTAPSDLISNSKSPQHYQCRRFSYSQLRRATNSFSESTHLGHGGFGSVYKADFPSGGDSLAVKVMDTSAGSLQGEREFHNELSLSSHLIGSPHVVSLLGFSSDRRGRKLILVYELMANRSLQDALLDRKCVELMDWNKRFEIATDIAKGIEFLHHCCDPIIIHGDIKPSNILLDSDFKAKIGDFGLARVKSEDFDTRILIEEEDKSKDVVEDNGSILEETESVITVFEEGNNVVNLSPETCGISVLTETVASPGEKSGLSPENCAVSILTVEVGAASPAMASIPSPETCAISVLTDTGLSPESSKLKVGSKRDWWWKQDNNGGSRGGIESGSVKDYVMEWIGSEIKKERPSNNKEWINNGDGSSSVSKKKKKEKKRKPREWWKEEFCEELTRKKRKKKKKKKRGLSSISSIDSWFHRDDGASSVHDHNLNPTKRKKRNSIDWWVDGLSGELKSVMGKKNSQDSGLWCDVNVQKSGGVSSTPSMRGTVCYIAPECGGGGVLSEKCDVYSFGVLLLVLVSGRRPLQVTASPMSEFERANLISWAKQLACNGKLLELVDKSIHSLEKEQAVLCITIALLCLQRSPVKRPTMKEIVEMLSGVSEPPHLPFEFSPSPPMGFPFKSRKKAR

SEQ ID NO: 36603 - protein, 561 aa, Arabidopsis thaliana
  peptide (1)..(561): Ceres Seq. ID no. 13591440
MDTSAGSLQGEREFHNELSLSSHLIGSPHVVSLLGFSSDRRGRKLILVYELMANRSLQDALLDRKCVELMDWNKRFEIATDIAKGIEFLHHCCDPIIIHGDIKPSNILLDSDFKAKIGDFGLARVKSEDFDTRILIEEEDKSKDVVEDNGSILEETESVITVFEEGNNVVNLSPETCGISVLTETVASPGEKSGLSPENCAVSILTVEVGAASPAMASIPSPETCAISVLTDTGLSPESSKLKVGSKRDWWWKQDNNGGSRGGIESGSVKDYVMEWIGSEIKKERPSNNKEWINNGDGSSSVSKKKKKEKKRKPREWWKEEFCEELTRKKRKKKKKKKRGLSSISSIDSWFHRDDGASSVHDHNLNPTKRKKRNSIDWWVDGLSGELKSVMGKKNSQDSGLWCDVNVQKSGGVSSTPSMRGTVCYIAPECGGGGVLSEKCDVYSFGVLLLVLVSGRRPLQVTASPMSEFERANLISWAKQLACNGKLLELVDKSIHSLEKEQAVLCITIALLCLQRSPVKRPTMKEIVEMLSGVSEPPHLPFEFSPSPPMGFPFKSRKKAR

SEQ ID NO: 36604 - protein, 510 aa, Arabidopsis thaliana
  peptide (1)..(510): Ceres Seq. ID no. 13591441
MANRSLQDALLDRKCVELMDWNKRFEIATDIAKGIEFLHHCCDPIIIHGDIKPSNILLDSDFKAKIGDFGLARVKSEDFDTRILIEEEDKSKDVVEDNGSILEETESVITVFEEGNNVVNLSPETCGISVLTETVASPGEKSGLSPENCAVSILTVEVGAASPAMASIPSPETCAISVLTDTGLSPESSKLKVGSKRDWWWKQDNNGGSRGGIESGSVKDYVMEWIGSEIKKERPSNNKEWINNGDGSSSVSKKKKKEKKRKPREWWKEEFCEELTRKKRKKKKKKKRGLSSISSIDSWFHRDDGASSVHDHNLNPTKRKKRNSIDWWVDGLSGELKSVMGKKNSQDSGLWCDVNVQKSGGVSSTPSMRGTVCYIAPECGGGGVLSEKCDVYSFGVLLLVLVSGRRPLQVTASPMSEFERANLISWAKQLACNGKLLELVDKSIHSLEKEQAVLCITIALLCLQRSPVKRPTMKEIVEMLSGVSEPPHLPFEFSPSPPMGFPFKSRKKAR

SEQ ID NO: 36605 - DNA, 875 bp, Arabidopsis thaliana
  misc_feature (1)..(875): Ceres Seq. ID no. 12439596
  misc_feature (1)..(875): Ortholog of  Ceres SEQ ID NO 14304209 as cited in SEQ ID NO 56460
  misc_feature (1)..(875): Ortholog of  Ceres SEQ ID NO 12586351 as cited in SEQ ID NO 64028
  misc_feature (1)..(875): Ortholog of  Ceres SEQ ID NO 13654441 as cited in SEQ ID NO 67814
  misc_feature (1)..(875): Ortholog of  Ceres SEQ ID NO 15177482 as cited in SEQ ID NO 0
atcagcgattggagtatagaaaaggtttaagcaaaatccatcaaagaagagttccttttcacaataatggcggatgaagtgatacttttggatttttggccgagtccattcggagtaagagcgagaatcgcgctgagagagaaaggagttgagtttgagtacagagaagagaatctgagagacaagagccctttgcttctccagatgaatccggttcacaagaagattccggttctcatccacaatggtaaaccggtttgtgaatccatgaacgttgttcagtacatcgacgaggtttggtccgacaaaaacccaatccttccttctgatccttaccagagagctcaagccagattttgggttgatttcgtggacaccaagctgtttgagccagcggataagatttggcaaacgaaaggagaggaacaagagacagccaagaaagagtatatagaagcactcaagattcttgaaactgagcttggagacaaaccttactttggtggagataccttcgggttcgtagacattgccatgactggatattacagctggttcgaagcatcagagaaactagctaacttcagcatcgaaccagagtgtcccacactgatggcttcggctaagaggtgtttgcagagagaaagcgtggttcagtcccttcatgattctgagaaaatccttgcgtttgcctataagattaggaagatatactgtgtctaaaagtcttattgattctttgaacgaaaaaaaaagtcttagaatttcatctcacgttacgtttctatgttcactgatttctatatgattttgttgtacctttctttctattttcaccaaataatatttgtttcttgtcactcaagaatatttgt

SEQ ID NO: 36606 - protein, 218 aa, Arabidopsis thaliana
  peptide (1)..(218): Ceres Seq. ID no. 12439597
MADEVILLDFWPSPFGVRARIALREKGVEFEYREENLRDKSPLLLQMNPVHKKIPVLIHNGKPVCESMNVVQYIDEVWSDKNPILPSDPYQRAQARFWVDFVDTKLFEPADKIWQTKGEEQETAKKEYIEALKILETELGDKPYFGGDTFGFVDIAMTGYYSWFEASEKLANFSIEPECPTLMASAKRCLQRESVVQSLHDSEKILAFAYKIRKIYCV

SEQ ID NO: 36607 - protein, 172 aa, Arabidopsis thaliana
  peptide (1)..(172): Ceres Seq. ID no. 12439598
MNPVHKKIPVLIHNGKPVCESMNVVQYIDEVWSDKNPILPSDPYQRAQARFWVDFVDTKLFEPADKIWQTKGEEQETAKKEYIEALKILETELGDKPYFGGDTFGFVDIAMTGYYSWFEASEKLANFSIEPECPTLMASAKRCLQRESVVQSLHDSEKILAFAYKIRKIYCV

SEQ ID NO: 36608 - protein, 151 aa, Arabidopsis thaliana
  peptide (1)..(151): Ceres Seq. ID no. 12439599
MNVVQYIDEVWSDKNPILPSDPYQRAQARFWVDFVDTKLFEPADKIWQTKGEEQETAKKEYIEALKILETELGDKPYFGGDTFGFVDIAMTGYYSWFEASEKLANFSIEPECPTLMASAKRCLQRESVVQSLHDSEKILAFAYKIRKIYCV

SEQ ID NO: 36609 - DNA, 769 bp, Arabidopsis thaliana
  misc_feature (1)..(769): Ceres Seq. ID no. 13489059
  misc_feature (1)..(769): Ortholog of  Ceres SEQ ID NO 12619999 as cited in SEQ ID NO 66123
  misc_feature (1)..(769): Ortholog of  Ceres SEQ ID NO 13656436 as cited in SEQ ID NO 69154
atggcggaggaatcgtacgacgaagagtgcgactacctattcaaggcggtgctgataggagactccgccgtcggaaaatcaaacctcctttcgaggttctcgagagatgagtttcggttagactctaaaccgaccatcggagtagactttgcttaccggaatgttcgcgtgggcgataagactataaaggctcagatatgggacaccgccggccaagaaagatttagagcaataacgagttcgtattaccgtggagccttgggagctttactaatctacgacatcacaagacgaatcactttcaaaaacattgagaaatggttgtcggagctcagaggcttctccagtcccgagactgtcgttgttctcgtcggtaacaaatccgatctcgggcagtctagagaagttgaagaagaagagggtaagactctagcagaatcagaaggtctctattttctcgaaacatcggctttagagaaccaaaacgttgaagaagcgtttctaagcatgatcggacggatacatgaggttttgactcagaaaatcgttttagacaatagactcaacggtgacggtaacaacgaaagtaacggtgctgtcgttccgcccggtaaagagattgtgaatattcatgaagttaccgccactcgaccgttgagtacttctttgtccaattgttgctacaagtaaataaactgatgatcatctatttttatattgttatatgatatattcgataatgtagagttttataattgttgctacaagt

SEQ ID NO: 36610 - protein, 229 aa, Arabidopsis thaliana
  peptide (1)..(229): Ceres Seq. ID no. 13489060
MAEESYDEECDYLFKAVLIGDSAVGKSNLLSRFSRDEFRLDSKPTIGVDFAYRNVRVGDKTIKAQIWDTAGQERFRAITSSYYRGALGALLIYDITRRITFKNIEKWLSELRGFSSPETVVVLVGNKSDLGQSREVEEEEGKTLAESEGLYFLETSALENQNVEEAFLSMIGRIHEVLTQKIVLDNRLNGDGNNESNGAVVPPGKEIVNIHEVTATRPLSTSLSNCCYK

SEQ ID NO: 36611 - DNA, 609 bp, Arabidopsis thaliana
  misc_feature (1)..(609): Ceres Seq. ID no. 13576687
  misc_feature (1)..(609): Ortholog of  Ceres SEQ ID NO 14309154 as cited in SEQ ID NO 0
acaaccaaaaacaagaacaacagacacatagagatgagccggtgcggctctcttgggctctatgccccaaatgctttgccatctctctccttgaagccacgcagtgtcaaatctcctttctgtattacatctcacaccaaacccaacgacactcttcttcataatgttaacaagatgagagcaaaggcctgtgatatacttggagcaaagaagacaatcttggcagctcaactcggggcagttcttgccacgattgaccatccagccttagcaataacaggagttaacaaccagcaggaattgagcagtgttgtgctcgatatcgggatcatatccgtttggtacttcctagtaatgccaccaatcatcatgaactggctaagagtaagatggtacagaaggaagttcttcgagatgtatttacagttcatgttcgtcttcatgttcttccccgggctactgttatgggcaccatttctcaacttcaggaagttcccaagagatcctaatatgaagaatccttgggacaaaccaacagacccagactctataaagaacgtttacctcaaatacccatatgcgacgccagaagattacgatctcgattaa

SEQ ID NO: 36612 - protein, 202 aa, Arabidopsis thaliana
  peptide (1)..(202): Ceres Seq. ID no. 13576688
TTKNKNNRHIEMSRCGSLGLYAPNALPSLSLKPRSVKSPFCITSHTKPNDTLLHNVNKMRAKACDILGAKKTILAAQLGAVLATIDHPALAITGVNNQQELSSVVLDIGIISVWYFLVMPPIIMNWLRVRWYRRKFFEMYLQFMFVFMFFPGLLLWAPFLNFRKFPRDPNMKNPWDKPTDPDSIKNVYLKYPYATPEDYDLD

SEQ ID NO: 36613 - protein, 191 aa, Arabidopsis thaliana
  peptide (1)..(191): Ceres Seq. ID no. 13576689
MSRCGSLGLYAPNALPSLSLKPRSVKSPFCITSHTKPNDTLLHNVNKMRAKACDILGAKKTILAAQLGAVLATIDHPALAITGVNNQQELSSVVLDIGIISVWYFLVMPPIIMNWLRVRWYRRKFFEMYLQFMFVFMFFPGLLLWAPFLNFRKFPRDPNMKNPWDKPTDPDSIKNVYLKYPYATPEDYDLD

SEQ ID NO: 36614 - protein, 144 aa, Arabidopsis thaliana
  peptide (1)..(144): Ceres Seq. ID no. 13576690
MRAKACDILGAKKTILAAQLGAVLATIDHPALAITGVNNQQELSSVVLDIGIISVWYFLVMPPIIMNWLRVRWYRRKFFEMYLQFMFVFMFFPGLLLWAPFLNFRKFPRDPNMKNPWDKPTDPDSIKNVYLKYPYATPEDYDLD

SEQ ID NO: 36615 - DNA, 1482 bp, Arabidopsis thaliana
  misc_feature (1)..(1482): Ceres Seq. ID no. 12348643
  misc_feature (1)..(1482): Ortholog of  Ceres SEQ ID NO 14303340 as cited in SEQ ID NO 54642
aaatggatagtgaaggagcttcaagcgagtcttcttcttctggagatcagctcgagaagtggacagagtagtttcacatttgatttcagtttcattccgcacaatcaaatcggttgatgatttgtttgacttctttcagagagcaggatgagctgaagaagaaactgatcgcgtacgatgacttcacatggaagttatcttcatcaacggaactgtctcagggatcggagatacttaagtatgttggaggtgtagacatgagcttttgcaaagaagattcttccgtcgcatgcgcttgtctcgtcgttcttgagcttccttctctccgtgtagtccaccatgacttctctcttctccgcctccatgttccttatgtccctggatttcttgcctttcgtgaggctccggttcttttgcagattctgcagaagatgagagatgagaagcatccattctatcctcaggtactgatggtggatggaaatggaatacttcatccacgaggtataaacacacaactttacctttgttttgtagttgcatttcaagctctgtaattatggtgttagatgtaattgtcttctataggatttggcttggcgtgtcatttaggtgttcttgctcacctaccaaccattggggtcggaaagaatctgcatcatgtggatggtctgaatcaatctgaggttaaacagtcgcttcagctccaaataaacgagcatgagcaaactatcactttggtaggaaactctggaattacatggggagtagtaagtgactttgactgaacatctactgtagttgttgtgtctctttggtaataccgcgttatattagtagtgaattatcagttttagcaacgaaacttctccatagttgtggttttgataatcttgtgtaagatagtgaatttaatgatcaagttttacatattacgttcaacagggatttaggccaactctgagttctctaaagcccatatatgtatcggttggccatcgcatatcactggactctgccgttgaagttgtcaagataacctgcaagtaccgtgttccagaacctattagacaggcagatattagatcaagagcatatctccagaagcatcaaactgagtcttttaaagaactggcagtgcgaccaccggatcagactgaaccttaatccctcaagcaaccaagaacactattccacattacatagaaactctccaaagtctttaccaaagattgttaaatggacagattcaggcactgaagatccgccccaattatctccttcatttatctcactgacttgaagattgcaagctaaccaaggtaatcatgttatatccgatacattggaatttcctttccatacataccttaaacaagtgtaaatagaaaggctaggcaactggtaatttggttgtttgggcactgtatattgggagattttggggttctcgacaaacaattctatagctttgggtttggt

SEQ ID NO: 36616 - protein, 146 aa, Arabidopsis thaliana
  peptide (1)..(146): Ceres Seq. ID no. 12348644
MICLTSFREQDELKKKLIAYDDFTWKLSSSTELSQGSEILKYVGGVDMSFCKEDSSVACACLVVLELPSLRVVHHDFSLLRLHVPYVPGFLAFREAPVLLQILQKMRDEKHPFYPQVLMVDGNGILHPRGINTQLYLCFVVAFQAL

SEQ ID NO: 36617 - protein, 99 aa, Arabidopsis thaliana
  peptide (1)..(99): Ceres Seq. ID no. 12348645
MSFCKEDSSVACACLVVLELPSLRVVHHDFSLLRLHVPYVPGFLAFREAPVLLQILQKMRDEKHPFYPQVLMVDGNGILHPRGINTQLYLCFVVAFQAL

SEQ ID NO: 36618 - DNA, 1205 bp, Arabidopsis thaliana
  misc_feature (1)..(1205): Ceres Seq. ID no. 13504812
  misc_feature (1)..(1205): Ortholog of  Ceres SEQ ID NO 13595983 as cited in SEQ ID NO 68329
aattgaaaaactttaactcttttttttttcgtttttgggatttgccaacttcgatttctttggttgggatttgtttatacgtttccttcgatttcgctcgagcttcgatctgaaaagcttcgagcttttagacaaatccatggattcttcgccagtttctgctcgattcgatatattcgagatttatcgtagattctgtgctattcgatcaggacaacaattgtgtaataagaaaccctgtgatggcgaagaatctcaaagatttaacttgtctaaagaagcaataactcagctcttatatctagtagagaataagtttcaagctaggaactcgatttttgatgaattgtttaagttgatgtcacggctagacttaatggtggactttacggagtttacttgcttttacgattttgttttctttatgtgccgcgagaatgggcaaaagaatataactataagtagagctattactgcatggaaacttgttttggctgggagatttaggttacttaaccgctggtgtgactttatcgagaaaaatcaacggcacaatatttcagaagatacttggcaacaagtcttggcgtttagtcgttgtgtacatgagaatctagaaggatatgactctgaaggtgcatggcctgtcctaatagatgactttgtcgagcatatgtacagtattttaggaccgaataaggacactagcttgttctgcaaatgtggtgacacagaatctgaatcatgcctctatcaagaagatgagcatcacaaagattatcgccgcccacacacgggtttaagaaacattccaggtttaaagagaaaaacatcgaagaagaatgacgaagaagaagaagatgaagatgaagaagtgttagaaacccaaaactcttcttctttgctaaacttcaaacgaatcaaaaccagcaacagtccaaggtgttcatcaaagtccccttgttcaatcgagcgaagtctttcacaaggttttgcgagtcttttatcgactggagataaaccatgaaacactggaacatcgtcgcacatatatatagattatacaaagcaaaagaattctcaaggtgttgtctcattttttcctacctaaatacctcacttctttaaatgacagttgagttcttctttgttgtaagctatagaataatttgttccttcaatcattcataatttgatcttattcc

SEQ ID NO: 36619 - protein, 295 aa, Arabidopsis thaliana
  peptide (1)..(295): Ceres Seq. ID no. 13504813
MDSSPVSARFDIFEIYRRFCAIRSGQQLCNKKPCDGEESQRFNLSKEAITQLLYLVENKFQARNSIFDELFKLMSRLDLMVDFTEFTCFYDFVFFMCRENGQKNITISRAITAWKLVLAGRFRLLNRWCDFIEKNQRHNISEDTWQQVLAFSRCVHENLEGYDSEGAWPVLIDDFVEHMYSILGPNKDTSLFCKCGDTESESCLYQEDEHHKDYRRPHTGLRNIPGLKRKTSKKNDEEEEDEDEEVLETQNSSSLLNFKRIKTSNSPRCSSKSPCSIERSLSQGFASLLSTGDKP

SEQ ID NO: 36620 - protein, 222 aa, Arabidopsis thaliana
  peptide (1)..(222): Ceres Seq. ID no. 13504814
MSRLDLMVDFTEFTCFYDFVFFMCRENGQKNITISRAITAWKLVLAGRFRLLNRWCDFIEKNQRHNISEDTWQQVLAFSRCVHENLEGYDSEGAWPVLIDDFVEHMYSILGPNKDTSLFCKCGDTESESCLYQEDEHHKDYRRPHTGLRNIPGLKRKTSKKNDEEEEDEDEEVLETQNSSSLLNFKRIKTSNSPRCSSKSPCSIERSLSQGFASLLSTGDKP

SEQ ID NO: 36621 - protein, 216 aa, Arabidopsis thaliana
  peptide (1)..(216): Ceres Seq. ID no. 13504815
MVDFTEFTCFYDFVFFMCRENGQKNITISRAITAWKLVLAGRFRLLNRWCDFIEKNQRHNISEDTWQQVLAFSRCVHENLEGYDSEGAWPVLIDDFVEHMYSILGPNKDTSLFCKCGDTESESCLYQEDEHHKDYRRPHTGLRNIPGLKRKTSKKNDEEEEDEDEEVLETQNSSSLLNFKRIKTSNSPRCSSKSPCSIERSLSQGFASLLSTGDKP

SEQ ID NO: 36622 - DNA, 1670 bp, Arabidopsis thaliana
  misc_feature (1)..(1670): Ceres Seq. ID no. 12562683
  misc_feature (1)..(1670): Ortholog of  Ceres SEQ ID NO 13597260 as cited in SEQ ID NO 63885
  misc_feature (1)..(1670): Ortholog of  Ceres SEQ ID NO 15180208 as cited in SEQ ID NO 0
tctctctctctctttagctcttttttttttgttttcattaaagtttttattttattttctaccaaccaaaagcttttctctttggtttctcttatttagcttctaaccttgaggagaatcataccagaggattgaagtttgaaccttcaaagatcaaaatcaagaaaccaaaaaaaaacaaaaaaaatgtgggatctaaacgacgcaccacaccaaacacaaagagaagaagaatctgaagagttttgttattcttcaccaagtaaacgggttggatctttctctaattcaagctcttcagctgttgttatcgaagatggatccgatgacgatgaacttaaccgggtcagacccaataacccacttgtcacccatcagttcttccctgagatggattctaacggcggtggtgttgcttctggctttcctcgggctcactggtttggtgttaagttttgtcagtcggatctagccaccggatcgtccgcgggtaaagctaccaacgttgccgctgccgtagtggagccggcacagccgttgaaaaagagtcggcgtggaccaagatcaagaagttctcagtatagaggtgttacgttttaccggcgtaccggaagatgggaatctcatatttgggactgtgggaaacaagtttacttaggtggatttgacactgctcatgcagcagctcgagcatatgatagagctgctattaaattccgtggagtagaagcggatatcaatttcaacatcgacgattatgatgatgacttgaaacagatgactaatttaaccaaggaagagttcgtacacgtacttcgccgacaaagcacaggcttccctcgaggaagttcgaagtatagaggtgtcactttgcataagtgtggtcgttgggaagctcgaatgggtcaattcttaggcaaaaagtatgtttatttgggtttgttcgacaccgaggtcgaagctgctagagcttacgataaagctgcaatcaaatgtaacggcaaagacgccgtgaccaactttgatccgagtatttacgatgaggaactcaatgccgagtcatcagggaatcctactactccacaagatcacaacctcgatttgagcttgggaaattcggctaattcgaagcataaaagtcaagatatgcggctcaggatgaaccaacaacaacaagattctctccactctaatgaagttcttggattaggtcaaaccggaatgcttaaccatactcccaattcaaaccaccaatttccgggcagcagcaacattggtagcggaggcggattctcactgtttccggcggctgagaaccaccggtttgatggtcgggcctcgacgaaccaagtgttgacaaatgctgcagcatcatcaggattctctcctcatcatcacaatcagatttttaattctacttctactcctcatcaaaattggctgcagacaaatggcttccaacctcctctcatgagaccttcttgaatcttttatatttttaaggtttattattatataagaaaaacaaaaatgaacctttgaaatccccacatgttcttggtcatttcattaatcatcggcttatattttgcttattttcccctaaatcctcttgttaacttaggcgaacaaaaaaaattaatggaaatctttttccctccatcggttac

SEQ ID NO: 36623 - protein, 432 aa, Arabidopsis thaliana
  peptide (1)..(432): Ceres Seq. ID no. 12562684
MWDLNDAPHQTQREEESEEFCYSSPSKRVGSFSNSSSSAVVIEDGSDDDELNRVRPNNPLVTHQFFPEMDSNGGGVASGFPRAHWFGVKFCQSDLATGSSAGKATNVAAAVVEPAQPLKKSRRGPRSRSSQYRGVTFYRRTGRWESHIWDCGKQVYLGGFDTAHAAARAYDRAAIKFRGVEADINFNIDDYDDDLKQMTNLTKEEFVHVLRRQSTGFPRGSSKYRGVTLHKCGRWEARMGQFLGKKYVYLGLFDTEVEAARAYDKAAIKCNGKDAVTNFDPSIYDEELNAESSGNPTTPQDHNLDLSLGNSANSKHKSQDMRLRMNQQQQDSLHSNEVLGLGQTGMLNHTPNSNHQFPGSSNIGSGGGFSLFPAAENHRFDGRASTNQVLTNAAASSGFSPHHHNQIFNSTSTPHQNWLQTNGFQPPLMRPS

SEQ ID NO: 36624 - protein, 364 aa, Arabidopsis thaliana
  peptide (1)..(364): Ceres Seq. ID no. 12562685
MDSNGGGVASGFPRAHWFGVKFCQSDLATGSSAGKATNVAAAVVEPAQPLKKSRRGPRSRSSQYRGVTFYRRTGRWESHIWDCGKQVYLGGFDTAHAAARAYDRAAIKFRGVEADINFNIDDYDDDLKQMTNLTKEEFVHVLRRQSTGFPRGSSKYRGVTLHKCGRWEARMGQFLGKKYVYLGLFDTEVEAARAYDKAAIKCNGKDAVTNFDPSIYDEELNAESSGNPTTPQDHNLDLSLGNSANSKHKSQDMRLRMNQQQQDSLHSNEVLGLGQTGMLNHTPNSNHQFPGSSNIGSGGGFSLFPAAENHRFDGRASTNQVLTNAAASSGFSPHHHNQIFNSTSTPHQNWLQTNGFQPPLMRPS

SEQ ID NO: 36625 - protein, 235 aa, Arabidopsis thaliana
  peptide (1)..(235): Ceres Seq. ID no. 12562686
MTNLTKEEFVHVLRRQSTGFPRGSSKYRGVTLHKCGRWEARMGQFLGKKYVYLGLFDTEVEAARAYDKAAIKCNGKDAVTNFDPSIYDEELNAESSGNPTTPQDHNLDLSLGNSANSKHKSQDMRLRMNQQQQDSLHSNEVLGLGQTGMLNHTPNSNHQFPGSSNIGSGGGFSLFPAAENHRFDGRASTNQVLTNAAASSGFSPHHHNQIFNSTSTPHQNWLQTNGFQPPLMRPS

SEQ ID NO: 36626 - DNA, 1394 bp, Arabidopsis thaliana
  misc_feature (1)..(1394): Ceres Seq. ID no. 13491017
  misc_feature (1)..(1394): Ortholog of  Ceres SEQ ID NO 14304148 as cited in SEQ ID NO 57313
  misc_feature (1)..(1394): Ortholog of  Ceres SEQ ID NO 13598513 as cited in SEQ ID NO 64102
atattttcatataaataaacctctcaacctccacactttctcacccatcacacaatcctcaaaacagagtaacccaaaaaacagagcaatctctaaaaaatctcaagaaacctcactaaaatgggttcaacggcagagacacaattaactccggtgcaagtcaccgacgacgaagctgccctcttcgccatgcaactagccagtgcttccgttcttccgatggctttaaaatccgccttagagcttgaccttcttgagattatggccaagaatggttctcccatgtctcctaccgagatcgcttctaaacttccgaccaaaaatcctgaagctccggtcatgctcgaccgtatcctccgtcttcttacgtcttactccgtcttaacctgctccaaccgtaaactttccggtgatggcgttgaacggatttacgggcttggtccggtttgcaagtatttgaccaagaacgaagatggtgtttccattgctgctctttgtcttatgaaccaagacaaggttctcatggaaagctggtaccatttgaaggatgcaattcttgatggtgggattccattcaacaaggcttatggaatgagcgcgttcgagtaccacgggactgaccctagattcaacaaggtctttaacaatggaatgtctaaccattccacaatcaccatgaagaagattcttgagacctataagggttttgaaggattgacttctttggttgatgttggtggtggcattggtgctacactcaaaatgattgtctccaagtaccctaatcttaaaggcatcaactttgatctcccacatgtcatcgaagatgctccttctcatcctggtattgagcatgttggaggagatatgtttgtaagtgtccctaaaggtgatgccatattcatgaagtggatatgtcatgactggagtgacgaacattgcgtgaaattcttgaagaactgctacgagtcacttccagaggatggaaaagtgatattagcagagtgtatacttccagagacaccagactcaagcctctcaaccaaacaagtagtccatgtcgattgcattatgttggctcacaatcccggaggcaaagaacgaaccgagaaagagtttgaggcattagccaaagcatcaggcttcaagggcatcaaagttgtctgcgacgcttttggtgttaaccttattgagttactcaagaagctctaaaaacaaacaatgttcctatgaagatgatttatatgtaaacattatctcatatctccttccacggttccaaaactatgctgtttaataatggtttttacaagaatttgattatgagtttgtatttttgtttgtttggaacaaaattatgtgattatagggaaaaataaaatgagctattattg

SEQ ID NO: 36627 - protein, 363 aa, Arabidopsis thaliana; identical to SEQ ID NO: 22560
  peptide (1)..(363): Ceres Seq. ID no. 13491018

SEQ ID NO: 36628 - protein, 340 aa, Arabidopsis thaliana; identical to SEQ ID NO: 22561
  peptide (1)..(340): Ceres Seq. ID no. 13491019

SEQ ID NO: 36629 - protein, 330 aa, Arabidopsis thaliana; identical to SEQ ID NO: 22562
  peptide (1)..(330): Ceres Seq. ID no. 13491020

SEQ ID NO: 36630 - DNA, 1853 bp, Arabidopsis thaliana
  misc_feature (1)..(1853): Ceres Seq. ID no. 13575178
  misc_feature (1)..(1853): Ortholog of  Ceres SEQ ID NO 14315204 as cited in SEQ ID NO 57630
  misc_feature (1)..(1853): Ortholog of  Ceres SEQ ID NO 12465371 as cited in SEQ ID NO 63848
gttttttctgttttggtcaacaatgcttctgtcttcagccacttagccgataaaaaaaaaaaaaaaaaaatgttacagattcagaaaaaatatcataagcctaactttcttatgatgatatttccggtttatgcttaagaaattctgcttgatactgaaatttcgtaattagccccattggtagcctttgctgctgcaacagttgcagtctcttcttcagtgttacggattcttattcttcagccctaaaaatcatcactttggaatcagaagcttgaatgatggaaggaagaagaatcatagcaaaccctagaccgtgtagcggtagtagaagagttattgctaagaagaggtctcgtcccgatggattcgtcaatagcgttaaaaagcttcaacgccgagaaatctcttctcgtatggatcgagctttctcaatcagcactgctcaagagagattccgcaatatgcgtctcgtggagcaatatgatacgcatgatcctaaaggatactgtttagtatcattacctaacttgttgaaacgaagcaaagttattgagattgttgctgctcgtgacattgtctttgctcttactctatctggtgtctgtgcatcttttagcagagagacgaataaaaaggtttgctttttaaatgttagtcctgatgaagtcattcggagtttgttctacaacaagaacaatgattctctcattactgtttctgtttacgcctctgacaattacagctctttgaaatgcagatccactagaatcgaatatattctgaggggtcaagcagacgcaggatttcctctttttgagtctgagtcactaaagtggccaggttttgttgagtttgatgatgttaatgggaaggtgctgacatattctgcacaggatagtgtttacaaggtgtttgatctgaaaaactatgccttgctatattcgatatcagacaaaaatgtacaagaaattaagatcagtccagggataatgctgttgattttcaagagagctgcgagtcatgttcctttgaagattctatcaatcgaagatggcactcttctgaagtccttccatcatttgcttcaccgaaataagaaagttgatttcattgaacaattcaatgaaaagcttctagttaagcaagagaacgagaatctacaaatacttgacgttcgaaatgctgagctgatagaagttagcagaactgacttcatgacaccatcagcattcatatttttgtatgagaatcagttgtttctaacattcaggaaccgaaatgtttctgtgtggaatttccgcggagagcttgtgacctcgtttgaggatcatcttctttggcatccagactgtaacacaaacaatatctacataacaagcgatcaagatctgatcatctcatattgcaaggcagatactgaagatcagtggatagaaggaaatgcggggtcgattaacataagcaatatcttgactggtaaatgcttagctaagataaaagcaaataatggtcctcctaaggaagaggactgcagcagtagtgatttggggaattcctctcgaaggagaagtgcggttgctgaggctttggaagacataaccgctctcttctacgacgaagaacggaatgaaatatacacaggaaacagacacggcctcctccatgtctggtctaattgaagctactcatcatttgttttgttttttttacattaatacaagagatctctgtatcttgttctgtttctcaattgtgtaatatcatgagatatgtaatttacttgtgtgtttgagtagcaattgtcgttgtaatgaaacagcaaatatttcaaattcgtctctcatttatgt

SEQ ID NO: 36631 - protein, 467 aa, Arabidopsis thaliana
  peptide (1)..(467): Ceres Seq. ID no. 13575179
MMEGRRIIANPRPCSGSRRVIAKKRSRPDGFVNSVKKLQRREISSRMDRAFSISTAQERFRNMRLVEQYDTHDPKGYCLVSLPNLLKRSKVIEIVAARDIVFALTLSGVCASFSRETNKKVCFLNVSPDEVIRSLFYNKNNDSLITVSVYASDNYSSLKCRSTRIEYILRGQADAGFPLFESESLKWPGFVEFDDVNGKVLTYSAQDSVYKVFDLKNYALLYSISDKNVQEIKISPGIMLLIFKRAASHVPLKILSIEDGTLLKSFHHLLHRNKKVDFIEQFNEKLLVKQENENLQILDVRNAELIEVSRTDFMTPSAFIFLYENQLFLTFRNRNVSVWNFRGELVTSFEDHLLWHPDCNTNNIYITSDQDLIISYCKADTEDQWIEGNAGSINISNILTGKCLAKIKANNGPPKEEDCSSSDLGNSSRRRSAVAEALEDITALFYDEERNEIYTGNRHGLLHVWSN

SEQ ID NO: 36632 - protein, 466 aa, Arabidopsis thaliana
  peptide (1)..(466): Ceres Seq. ID no. 13575180
MEGRRIIANPRPCSGSRRVIAKKRSRPDGFVNSVKKLQRREISSRMDRAFSISTAQERFRNMRLVEQYDTHDPKGYCLVSLPNLLKRSKVIEIVAARDIVFALTLSGVCASFSRETNKKVCFLNVSPDEVIRSLFYNKNNDSLITVSVYASDNYSSLKCRSTRIEYILRGQADAGFPLFESESLKWPGFVEFDDVNGKVLTYSAQDSVYKVFDLKNYALLYSISDKNVQEIKISPGIMLLIFKRAASHVPLKILSIEDGTLLKSFHHLLHRNKKVDFIEQFNEKLLVKQENENLQILDVRNAELIEVSRTDFMTPSAFIFLYENQLFLTFRNRNVSVWNFRGELVTSFEDHLLWHPDCNTNNIYITSDQDLIISYCKADTEDQWIEGNAGSINISNILTGKCLAKIKANNGPPKEEDCSSSDLGNSSRRRSAVAEALEDITALFYDEERNEIYTGNRHGLLHVWSN

SEQ ID NO: 36633 - protein, 421 aa, Arabidopsis thaliana
  peptide (1)..(421): Ceres Seq. ID no. 13575181
MDRAFSISTAQERFRNMRLVEQYDTHDPKGYCLVSLPNLLKRSKVIEIVAARDIVFALTLSGVCASFSRETNKKVCFLNVSPDEVIRSLFYNKNNDSLITVSVYASDNYSSLKCRSTRIEYILRGQADAGFPLFESESLKWPGFVEFDDVNGKVLTYSAQDSVYKVFDLKNYALLYSISDKNVQEIKISPGIMLLIFKRAASHVPLKILSIEDGTLLKSFHHLLHRNKKVDFIEQFNEKLLVKQENENLQILDVRNAELIEVSRTDFMTPSAFIFLYENQLFLTFRNRNVSVWNFRGELVTSFEDHLLWHPDCNTNNIYITSDQDLIISYCKADTEDQWIEGNAGSINISNILTGKCLAKIKANNGPPKEEDCSSSDLGNSSRRRSAVAEALEDITALFYDEERNEIYTGNRHGLLHVWSN

SEQ ID NO: 36634 - DNA, 915 bp, Arabidopsis thaliana
  misc_feature (1)..(915): Ceres Seq. ID no. 12422053
  misc_feature (1)..(915): Ortholog of  Ceres SEQ ID NO 13647991 as cited in SEQ ID NO 187
acgaaagaagagaacaaagaagaaattttgaaaatagtgaaaatggtaaccgtaagccaaagtcacacgacgacgtttctcttcttcaccacatttctcttgatattcggatcaatctcagccgtccgtttgcttccacgaccaaacactacaacaaccaacgatctagatttcatccgaacaagctgcaacgctactctatatccagacgtctgcttcacgtcactctccggctacgcctctgccgttcaagacagtccggcgaggctagccaagctcgcaatcggcgtttcactttaacaagccaaatccactgcggcttttctctccaaactctcacgctctgccgctaaatactccggtgatggccaccaaacagcttccgccgtaatccgagactgcgtttcgaacgtcgaagacgcggtggacgagatgagaggatctctccgtcaactacgcgacatgaacggcagaggaggcggcacggcagctcggaggtcggtagaaacgtttaggttccagatgagtaacgtgcagacgtggatgagtgcagcattgacggatgaggacacgtgtacgaatggatttgaagatatggacgaaggaggattgattaagacgaccgtttgtgatcggctcgaggaagtgaagaggctaacgagtaatgctcttgcccttgtcaacacttacgccaacaatggagctccatgaccatgagaccatgagaccatgaggagttttaactttgatttaagtgtctctttatataatttaatacattgtggggtttaagttagagttatgtgtcgatttcatcatgttttacatttgtttttgtatcatccgagtttcttatgtttaaagggttcagagagatgttgtatctttgatttactaatcaaactgcacgatgat

SEQ ID NO: 36635 - protein, 116 aa, Arabidopsis thaliana
  peptide (1)..(116): Ceres Seq. ID no. 12422054
ERREQRRNFENSENGNRKPKSHDDVSLLHHISLDIRINLSRPFASTTKHYNNQRSRFHPNKLQRYSISRRLLHVTLRLRLCRSRQSGEASQARNRRFTLTSQIHCGFSLQTLTLCR

SEQ ID NO: 36636 - protein, 99 aa, Arabidopsis thaliana
  peptide (1)..(99): Ceres Seq. ID no. 12422055
TKEENKEEILKIVKMVTVSQSHTTTFLFFTTFLLIFGSISAVRLLPRPNTTTTNDLDFIRTSCNATLYPDVCFTSLSGYASAVQDSPARLAKLAIGVSL

SEQ ID NO: 36637 - protein, 92 aa, Arabidopsis thaliana
  peptide (1)..(92): Ceres Seq. ID no. 12422056
MRGSLRQLRDMNGRGGGTAARRSVETFRFQMSNVQTWMSAALTDEDTCTNGFEDMDEGGLIKTTVCDRLEEVKRLTSNALALVNTYANNGAP

SEQ ID NO: 36638 - protein, 85 aa, Arabidopsis thaliana
  peptide (1)..(85): Ceres Seq. ID no. 12422057
MVTVSQSHTTTFLFFTTFLLIFGSISAVRLLPRPNTTTTNDLDFIRTSCNATLYPDVCFTSLSGYASAVQDSPARLAKLAIGVSL

SEQ ID NO: 36639 - DNA, 2159 bp, Arabidopsis thaliana; identical to SEQ ID NO: 20733
  misc_feature (1)..(2159): Ceres Seq. ID no. 12336358
  misc_feature (1)..(2159): Ortholog of  Ceres SEQ ID NO 12623467 as cited in SEQ ID NO 60951
  misc_feature (1)..(2159): Ortholog of  Ceres SEQ ID NO 14309133 as cited in SEQ ID NO 0

SEQ ID NO: 36640 - protein, 197 aa, Arabidopsis thaliana; identical to SEQ ID NO: 20734
  peptide (1)..(197): Ceres Seq. ID no. 12336359

SEQ ID NO: 36641 - protein, 195 aa, Arabidopsis thaliana; identical to SEQ ID NO: 20735
  peptide (1)..(195): Ceres Seq. ID no. 12336360

SEQ ID NO: 36642 - protein, 175 aa, Arabidopsis thaliana; identical to SEQ ID NO: 20736
  peptide (1)..(175): Ceres Seq. ID no. 12336361

SEQ ID NO: 36643 - DNA, 774 bp, Arabidopsis thaliana
  misc_feature (1)..(774): Ceres Seq. ID no. 12482158
  misc_feature (1)..(774): Ortholog of  Ceres SEQ ID NO 13637842 as cited in SEQ ID NO 54650
  misc_feature (1)..(774): Ortholog of  Ceres SEQ ID NO 12608127 as cited in SEQ ID NO 57579
  misc_feature (1)..(774): Ortholog of  Ceres SEQ ID NO 12634558 as cited in SEQ ID NO 0
  misc_feature (1)..(774): Ortholog of  Ceres SEQ ID NO 15180294 as cited in SEQ ID NO 0
atgaggatttatctgattttcctcgtggtggtttccttatttacctccgcgttttccgattcgattctcgagtacccgtcggaaatcgagagtcgacacaagaaagctgccgaagaagatgtcaatttgcattgtacgacctggagattcgcggcggagatgaacaatctcgcgccgtggaaaacaatcccggtggaatgtgccgattacgtgaaggactatgtgatgggtaaaggctacctcaccgatttggagagagtctctgaagaagctttgatcttcgcgagaagcatcgaattctccggcgatggcaaagatatttggattttcgatatcgatgagactctcttatccaatcttccttattacattgatcatggttttgggttggagctttttgatcattcggagtttgataagtgggtagagagaggagtggcaccagccatagcaccaagcttgaagctttaccaaagagtgttagatttgggatacaaagttttcttgcttacagggaggaaagagagtcacaggcttgtcactgttgaaaatctcatcaatgctggtttccagaactgggacaagcttattctcagatctccagaggaacagcacaaaatggcgacactatacaaatctgagaagagagatgagatggtgaaagagggatataggattagaggcaattcaggtgatcaatggagtgatttgttgggtacctccatgtctcaacgatctttcaaactcgcaaatccaatgtattatatcccctga

SEQ ID NO: 36644 - protein, 257 aa, Arabidopsis thaliana
  peptide (1)..(257): Ceres Seq. ID no. 12482159
MRIYLIFLVVVSLFTSAFSDSILEYPSEIESRHKKAAEEDVNLHCTTWRFAAEMNNLAPWKTIPVECADYVKDYVMGKGYLTDLERVSEEALIFARSIEFSGDGKDIWIFDIDETLLSNLPYYIDHGFGLELFDHSEFDKWVERGVAPAIAPSLKLYQRVLDLGYKVFLLTGRKESHRLVTVENLINAGFQNWDKLILRSPEEQHKMATLYKSEKRDEMVKEGYRIRGNSGDQWSDLLGTSMSQRSFKLANPMYYIP

SEQ ID NO: 36645 - protein, 204 aa, Arabidopsis thaliana
  peptide (1)..(204): Ceres Seq. ID no. 12482160
MNNLAPWKTIPVECADYVKDYVMGKGYLTDLERVSEEALIFARSIEFSGDGKDIWIFDIDETLLSNLPYYIDHGFGLELFDHSEFDKWVERGVAPAIAPSLKLYQRVLDLGYKVFLLTGRKESHRLVTVENLINAGFQNWDKLILRSPEEQHKMATLYKSEKRDEMVKEGYRIRGNSGDQWSDLLGTSMSQRSFKLANPMYYIP

SEQ ID NO: 36646 - protein, 182 aa, Arabidopsis thaliana
  peptide (1)..(182): Ceres Seq. ID no. 12482161
MGKGYLTDLERVSEEALIFARSIEFSGDGKDIWIFDIDETLLSNLPYYIDHGFGLELFDHSEFDKWVERGVAPAIAPSLKLYQRVLDLGYKVFLLTGRKESHRLVTVENLINAGFQNWDKLILRSPEEQHKMATLYKSEKRDEMVKEGYRIRGNSGDQWSDLLGTSMSQRSFKLANPMYYIP

SEQ ID NO: 36647 - DNA, 1181 bp, Arabidopsis thaliana
  misc_feature (1)..(1181): Ceres Seq. ID no. 12562314
  misc_feature (1)..(1181): Ortholog of  Ceres SEQ ID NO 14313302 as cited in SEQ ID NO 51621
atgctaaggagccctcccaaaaaagaacaacaaatcacatttttatataactgttaacataataatctcagcctcatcaacacacatatatagatagccaacatcacacaaacatagagattccaaaaaataaaaataaagaaaacataaatcctctgaggaaaaattccgatgagatgacagaaggtggagaatattctccggcgatgatgtcagcagagccattcttgaccatgaagaagatgaagaagagcaaccacaacaagaacaatcagagaaggtttagcgacgagcagatcaagtcactggagatgatgtttgagtctgagacaaggcttgagccaaggaagaaggttcaattagctagagagctagggttgcagccgaggcaagtggctatatggtttcagaacaagagggctcgttggaaatccaagcagctcgagactgagtacaacattctcagacaaaactacgacaacttggcttctcagttcgagtccttaaagaaagaaaaacaagctttagtctctgagttgcagaggctaaaagaggcgacgcaaaagaagacacaggaggaggaaaggcagtgtagtggagatcaagcggtggttgctctaagcagcacacatcatgaatcagaaaacgaagagaaccggaggcgtaaaccggaagaggttagaccggagatggagatgaaagatgataagggtcatcatggggttatgtgtgatcatcatgattatgaagatgatgataatggttatagtaacaacatcaagagagagtattttggtgggtttgaggaagaaccagatcacttaatgaacattgttgaaccagctgatagttgtttgacatcatctgatgattggagaggtttcaaatcagatactactactctcttggaccaatccagcaacaattacccttggcgggatttttggtcatgaaaacaataaactctaaacaagaagatgaaacagattgagactaaagattggatatatacatattcaaatcgaaatttaccggtctacatcgcatgaaccgagccacggatatagagatattcggtccagcaaatgactcgtttctcagcgagaattttgcaggattttgagctgaaattgtatggttttgtctgtataaatgatgtgtttagaaagacgtatattctc

SEQ ID NO: 36648 - protein, 258 aa, Arabidopsis thaliana
  peptide (1)..(258): Ceres Seq. ID no. 12562315
MTEGGEYSPAMMSAEPFLTMKKMKKSNHNKNNQRRFSDEQIKSLEMMFESETRLEPRKKVQLARELGLQPRQVAIWFQNKRARWKSKQLETEYNILRQNYDNLASQFESLKKEKQALVSELQRLKEATQKKTQEEERQCSGDQAVVALSSTHHESENEENRRRKPEEVRPEMEMKDDKGHHGVMCDHHDYEDDDNGYSNNIKREYFGGFEEEPDHLMNIVEPADSCLTSSDDWRGFKSDTTTLLDQSSNNYPWRDFWS

SEQ ID NO: 36649 - protein, 248 aa, Arabidopsis thaliana
  peptide (1)..(248): Ceres Seq. ID no. 12562316
MMSAEPFLTMKKMKKSNHNKNNQRRFSDEQIKSLEMMFESETRLEPRKKVQLARELGLQPRQVAIWFQNKRARWKSKQLETEYNILRQNYDNLASQFESLKKEKQALVSELQRLKEATQKKTQEEERQCSGDQAVVALSSTHHESENEENRRRKPEEVRPEMEMKDDKGHHGVMCDHHDYEDDDNGYSNNIKREYFGGFEEEPDHLMNIVEPADSCLTSSDDWRGFKSDTTTLLDQSSNNYPWRDFWS

SEQ ID NO: 36650 - protein, 247 aa, Arabidopsis thaliana
  peptide (1)..(247): Ceres Seq. ID no. 12562317
MSAEPFLTMKKMKKSNHNKNNQRRFSDEQIKSLEMMFESETRLEPRKKVQLARELGLQPRQVAIWFQNKRARWKSKQLETEYNILRQNYDNLASQFESLKKEKQALVSELQRLKEATQKKTQEEERQCSGDQAVVALSSTHHESENEENRRRKPEEVRPEMEMKDDKGHHGVMCDHHDYEDDDNGYSNNIKREYFGGFEEEPDHLMNIVEPADSCLTSSDDWRGFKSDTTTLLDQSSNNYPWRDFWS

SEQ ID NO: 36651 - DNA, 1127 bp, Arabidopsis thaliana
  misc_feature (1)..(1127): Ceres Seq. ID no. 13491200
  misc_feature (1)..(1127): Ortholog of  Ceres SEQ ID NO 14311579 as cited in SEQ ID NO 51717
atcaaccgtaaacttattgctttcttccttctggtagttccccaaaactcaaagtactctttttctgtgtaaacaaaaaaaaaatcaacggtactctttctcttctaagttgttgttccatggagaagagtttccagaaatcagctctccttgtgaccttgactctcttcttcttcattccagtttcaatctcggttccattcattctgtttcatgggattagagatcaatgctccaatggtggagtgagcagcttcgtacagctccttagcaacctctctagctcccatggatcttgcttagaaataggaaatggagagcaagattcggtgactatgccgcttacgcaacaagcgagtgtagcgtgtgagaaagttaaacagatgaaggatttgagtcaaggctacaacattgttgcacagtctcaaggaaacttggtagctagaggtctaatcgagttttgtgacaatgctcctccggtcttcaactatatatctttaggaggtcctcatgctggcatatccgacattcccaagtgtaattctacactttgcgagttgctgaaaacagcggtctacaccgacttcgtacaagatcatattgctccaagtggttatatcaagattcctacagatataaaagattacctggaacactccaagtatctgccaaagatcaacaacgagagacctaacgaaaggaacaccacttttaaagaccggttcactagcttgcacaacttggtccttgtcatgtttgagggtgatgcagtagtgattcctaaagaaagttcttggttcggatattacccggatggagcttccacacctcttttgtctcctcaacagacaaagctctatactgaggattggattggtctgaaaacattggatgctgccagaaaagttaagtttgtcagtgtccctggcgagcacctaagaatagcgcaagacgacgttgtaaaacacgtcgtgccttacctcaagaaccagcctgcgtctatgagtgaagatttggagatactgcatctatgattgagacttcattgttatgctctcttagaatcaaatttaaaagtgaagaactttagaggctcctttttcttaatcataaatccaaataatttc

SEQ ID NO: 36652 - protein, 304 aa, Arabidopsis thaliana
  peptide (1)..(304): Ceres Seq. ID no. 13491201
MEKSFQKSALLVTLTLFFFIPVSISVPFILFHGIRDQCSNGGVSSFVQLLSNLSSSHGSCLEIGNGEQDSVTMPLTQQASVACEKVKQMKDLSQGYNIVAQSQGNLVARGLIEFCDNAPPVFNYISLGGPHAGISDIPKCNSTLCELLKTAVYTDFVQDHIAPSGYIKIPTDIKDYLEHSKYLPKINNERPNERNTTFKDRFTSLHNLVLVMFEGDAVVIPKESSWFGYYPDGASTPLLSPQQTKLYTEDWIGLKTLDAARKVKFVSVPGEHLRIAQDDVVKHVVPYLKNQPASMSEDLEILHL

SEQ ID NO: 36653 - protein, 232 aa, Arabidopsis thaliana
  peptide (1)..(232): Ceres Seq. ID no. 13491202
MPLTQQASVACEKVKQMKDLSQGYNIVAQSQGNLVARGLIEFCDNAPPVFNYISLGGPHAGISDIPKCNSTLCELLKTAVYTDFVQDHIAPSGYIKIPTDIKDYLEHSKYLPKINNERPNERNTTFKDRFTSLHNLVLVMFEGDAVVIPKESSWFGYYPDGASTPLLSPQQTKLYTEDWIGLKTLDAARKVKFVSVPGEHLRIAQDDVVKHVVPYLKNQPASMSEDLEILHL

SEQ ID NO: 36654 - protein, 216 aa, Arabidopsis thaliana
  peptide (1)..(216): Ceres Seq. ID no. 13491203
MKDLSQGYNIVAQSQGNLVARGLIEFCDNAPPVFNYISLGGPHAGISDIPKCNSTLCELLKTAVYTDFVQDHIAPSGYIKIPTDIKDYLEHSKYLPKINNERPNERNTTFKDRFTSLHNLVLVMFEGDAVVIPKESSWFGYYPDGASTPLLSPQQTKLYTEDWIGLKTLDAARKVKFVSVPGEHLRIAQDDVVKHVVPYLKNQPASMSEDLEILHL

SEQ ID NO: 36655 - DNA, 1622 bp, Arabidopsis thaliana
  misc_feature (1)..(1622): Ceres Seq. ID no. 13611369
  misc_feature (1)..(1622): Ortholog of  Ceres SEQ ID NO 15169264 as cited in SEQ ID NO 55026
  misc_feature (1)..(1622): Ortholog of  Ceres SEQ ID NO 15224709 as cited in SEQ ID NO 68627
aatataggtgcatttaaaacataacgttccctctcttgtcttcttatttttgctctctgttctttagaactgccattaacgagagtgangagagagacacacacacacagcgagtgaaaatgtctccggagaagaagagtcaaaacttccctccaataacggaatgcagagacggagagtacgattcgatagccgccgatcttgacgggactctgcttctctcaagaagctccttcccttacttcatgctcgtcgctgttgaagctggaagccttttacgtggactaatcctccttctctcgttaccattcgtcattatctcttacctattcgtatccgaatctcttggtatccagatcctcatcttcatctcattcgctggtctcaaaatccgcgatatcgaacttgtctctcgcgcagttcttccacggttttacgcggcggatgtgaggaaagacagttttgaggtgtttgataagtgtaagagaaaagtggtagtgacggcgaatccgattgtgatggtggaggcgtttgtgaaggattatcttggaggtgataaagttttgggaacagagattgaagttaaccctaaaaccaatagagccactggatttgtgaagaagcctggtgttcttgttggtgatcttaagaggttagccattttaaaagagtttggtaacgaatcacctgatctcggcctcggtgatcgaacctctgatcatgatttcatgtctctctgcaagaaaggttacatggttcatgcgaccaagtcagccacaacgattccaaaagaacgcttaaagaaccgcatagtcttccatgatgggcgtttagcgcaacgtccaactccgttaaacgccattatcacatacctatggcttccttttggtttcatcctctccatcattcgcgtctacttcaacctccctttacctgaaagatttgtccgttacacttacgagatgctcgggatccacttaaccattcgtggtcatcgtcctccacctccttcccctggaactcttggcaacctctatgtccttaaccaccgtaccgcgcttgatcccatcatcgttgctattgctcttggacgtaagatctgttgcgtcacttacagtgtctctcgtctctcccttatgctttctcctattcctgctgttgccctcacccgtgaccgtgccaccgatgctgccaacatgagaaaacttctcgagaaaggcgacttggtgatatgtccggaaggcacgacgtgtagagaagagtatctactgagatttagcgctctattcgcagagctaagcgaccggattgtgccagtagcgatgaactgtaaacaaggaatgttcaacgggaccacagttaggggtgtgaagttttgggacccttacttcttcttcatgaacccaagaccaagctatgaagccactttcttggatcgtttgcctgaagaaatgactgtcaacggtggtggcaagactcctatagaggtggctaattacgtccagaaagttatcggcgcggttttgggcttcgaatgcaccgaacttactcgcaaggataaatatcttttgcttggaggtaatgacggcaaggtggagtctatcaacaacaccaagaagtga

SEQ ID NO: 36656 - protein, 500 aa, Arabidopsis thaliana
  peptide (1)..(500): Ceres Seq. ID no. 13611370
MSPEKKSQNFPPITECRDGEYDSIAADLDGTLLLSRSSFPYFMLVAVEAGSLLRGLILLLSLPFVIISYLFVSESLGIQILIFISFAGLKIRDIELVSRAVLPRFYAADVRKDSFEVFDKCKRKVVVTANPIVMVEAFVKDYLGGDKVLGTEIEVNPKTNRATGFVKKPGVLVGDLKRLAILKEFGNESPDLGLGDRTSDHDFMSLCKKGYMVHATKSATTIPKERLKNRIVFHDGRLAQRPTPLNAIITYLWLPFGFILSIIRVYFNLPLPERFVRYTYEMLGIHLTIRGHRPPPPSPGTLGNLYVLNHRTALDPIIVAIALGRKICCVTYSVSRLSLMLSPIPAVALTRDRATDAANMRKLLEKGDLVICPEGTTCREEYLLRFSALFAELSDRIVPVAMNCKQGMFNGTTVRGVKFWDPYFFFMNPRPSYEATFLDRLPEEMTVNGGGKTPIEVANYVQKVIGAVLGFECTELTRKDKYLLLGGNDGKVESINNTKK

SEQ ID NO: 36657 - protein, 458 aa, Arabidopsis thaliana
  peptide (1)..(458): Ceres Seq. ID no. 13611371
MLVAVEAGSLLRGLILLLSLPFVIISYLFVSESLGIQILIFISFAGLKIRDIELVSRAVLPRFYAADVRKDSFEVFDKCKRKVVVTANPIVMVEAFVKDYLGGDKVLGTEIEVNPKTNRATGFVKKPGVLVGDLKRLAILKEFGNESPDLGLGDRTSDHDFMSLCKKGYMVHATKSATTIPKERLKNRIVFHDGRLAQRPTPLNAIITYLWLPFGFILSIIRVYFNLPLPERFVRYTYEMLGIHLTIRGHRPPPPSPGTLGNLYVLNHRTALDPIIVAIALGRKICCVTYSVSRLSLMLSPIPAVALTRDRATDAANMRKLLEKGDLVICPEGTTCREEYLLRFSALFAELSDRIVPVAMNCKQGMFNGTTVRGVKFWDPYFFFMNPRPSYEATFLDRLPEEMTVNGGGKTPIEVANYVQKVIGAVLGFECTELTRKDKYLLLGGNDGKVESINNTKK

SEQ ID NO: 36658 - protein, 367 aa, Arabidopsis thaliana; identical to SEQ ID NO: 21110
  peptide (1)..(367): Ceres Seq. ID no. 13611372

SEQ ID NO: 36659 - DNA, 1983 bp, Arabidopsis thaliana
  misc_feature (1)..(1983): Ceres Seq. ID no. 13509881
  misc_feature (1)..(1983): Ortholog of  Ceres SEQ ID NO 15177316 as cited in SEQ ID NO 52739
aaaaactctcttataataatctctctcaccatttcttctcttctcttcagaagaaagaaagnaactcataaaggagaagaaagaagaacagaagagtttctctatctaaaactcattctttctttctctctctatnccagagttctgtctgtgaaaacacacaaatctaagagaagttatgaataaacaagatgttatgaaacttcagacttgtgttctgaaagtgaacgtacactgtgaagggtgtaagcataaagtgaagaaacaattgcagaaaatcgaaggtgtttactctgtaaaagcagatgtagaacaggggagagttactgttacagggaacattgacccagctcttctggttaagaaacttagcaaatcaggcaaacatgccgagatcttaggcggtggtggaggaggaggcggcggaggtggaaaggggtttcctaatctgaatgggcaatttgcaaatctcaacatgggtggaaacaataagcctaaaggtggaaaagagagtaaccaagtcaagggtaaagctggtggtggcggtggaggaggtcagaatcatggacatggtcagccaatgcaattgaatcctcaacagattcaacagatgatgatgatgaaggctgctcacggtggtggtggtggtggtcagatgaagatgccgcctatggcagctaaggatcagaagaagtcagttaagtttgctgatgatgaagacgatgagtttagtgaagatgattatgatgatgaggatttcagtgaagatgattatgatgatgatgagttcgatgatgatgaagatgatgatgatgagatgggtcatggtcatggacatggaggaggtgggggtaatcacatgcctcctaataagatgatgatgcctaacaagatgatgcctcagatgggtggtcatcatggtaatggtggtggacctaagggtcccaatgagataatgatgatgatgaatgggttcaaaggcggaggcggtggaggaaagaaaggcggtggtggcgggtttgagattccggtgcagatgaagggaatgggtgagggtaaaaatggaaaggatggtaaaaagggtaaaggaggagagaagggtaagaaagaagggaaagagaataaaggtgggggcaaaaccggaaaaacagatgccaaaagtggtggtggtggccttctagggtttttcaaaaagggtaaaagtgggaacggagatgagaagaagagcgctgggaagaaagatggccatgggggtaataaggtcaaatctcatggtgggggaggaggagttcagcattatgatagtgggcctaaaaaaggtggtggtgggaccaaaggaggaggccatgggggccttgacattgatgagctcatgaaacacagcaaaggaggaggaggaggaggtaacaagggcaatcataatcatagcgccaaagggattggtggtggcccaatgggtccaggcggtccgatgggtccaggcggtccgatgggtcaaggtggtccgatgggtatgatgggtccaggtggtccgatgagtatgatgggtccaggcggtcctatgggtccaatgggtggccaaggcggctcttacccagcggttcaaggcttgccaatgagtggaggtggaggatattatccagggccgcctcaggcaagtcagcaaatgaaccaacaacaatatatgcaaatgatgatgaaccaacagcagcaacaacaacaacaacaacaagctgtagctcatggtggctatggcggtggtcacggtggcgacatgtaccatccgatgatgtacgctcggccttatcctgcagttaattatgctcaccctccaccaatgccgcctcctcactcggattcttatactcatatgttcagcgatgagaatccaggtagttgtagtattatgtgatcatcttttgtaatgttatttagaatatggacatgtatgcttgtcttagtcttatgtttttttttttgggg

SEQ ID NO: 36660 - protein, 577 aa, Arabidopsis thaliana
  peptide (1)..(577): Ceres Seq. ID no. 13509882
MNKQDVMKLQTCVLKVNVHCEGCKHKVKKQLQKIEGVYSVKADVEQGRVTVTGNIDPALLVKKLSKSGKHAEILGGGGGGGGGGGKGFPNLNGQFANLNMGGNNKPKGGKESNQVKGKAGGGGGGGQNHGHGQPMQLNPQQIQQMMMMKAAHGGGGGGQMKMPPMAAKDQKKSVKFADDEDDEFSEDDYDDEDFSEDDYDDDEFDDDEDDDDEMGHGHGHGGGGGNHMPPNKMMMPNKMMPQMGGHHGNGGGPKGPNEIMMMMNGFKGGGGGGKKGGGGGFEIPVQMKGMGEGKNGKDGKKGKGGEKGKKEGKENKGGGKTGKTDAKSGGGGLLGFFKKGKSGNGDEKKSAGKKDGHGGNKVKSHGGGGGVQHYDSGPKKGGGGTKGGGHGGLDIDELMKHSKGGGGGGNKGNHNHSAKGIGGGPMGPGGPMGPGGPMGQGGPMGMMGPGGPMSMMGPGGPMGPMGGQGGSYPAVQGLPMSGGGGYYPGPPQASQQMNQQQYMQMMMNQQQQQQQQQQAVAHGGYGGGHGGDMYHPMMYARPYPAVNYAHPPPMPPPHSDSYTHMFSDENPGSCSIM

SEQ ID NO: 36661 - protein, 571 aa, Arabidopsis thaliana
  peptide (1)..(571): Ceres Seq. ID no. 13509883
MKLQTCVLKVNVHCEGCKHKVKKQLQKIEGVYSVKADVEQGRVTVTGNIDPALLVKKLSKSGKHAEILGGGGGGGGGGGKGFPNLNGQFANLNMGGNNKPKGGKESNQVKGKAGGGGGGGQNHGHGQPMQLNPQQIQQMMMMKAAHGGGGGGQMKMPPMAAKDQKKSVKFADDEDDEFSEDDYDDEDFSEDDYDDDEFDDDEDDDDEMGHGHGHGGGGGNHMPPNKMMMPNKMMPQMGGHHGNGGGPKGPNEIMMMMNGFKGGGGGGKKGGGGGFEIPVQMKGMGEGKNGKDGKKGKGGEKGKKEGKENKGGGKTGKTDAKSGGGGLLGFFKKGKSGNGDEKKSAGKKDGHGGNKVKSHGGGGGVQHYDSGPKKGGGGTKGGGHGGLDIDELMKHSKGGGGGGNKGNHNHSAKGIGGGPMGPGGPMGPGGPMGQGGPMGMMGPGGPMSMMGPGGPMGPMGGQGGSYPAVQGLPMSGGGGYYPGPPQASQQMNQQQYMQMMMNQQQQQQQQQQAVAHGGYGGGHGGDMYHPMMYARPYPAVNYAHPPPMPPPHSDSYTHMFSDENPGSCSIM

SEQ ID NO: 36662 - protein, 478 aa, Arabidopsis thaliana
  peptide (1)..(478): Ceres Seq. ID no. 13509884
MGGNNKPKGGKESNQVKGKAGGGGGGGQNHGHGQPMQLNPQQIQQMMMMKAAHGGGGGGQMKMPPMAAKDQKKSVKFADDEDDEFSEDDYDDEDFSEDDYDDDEFDDDEDDDDEMGHGHGHGGGGGNHMPPNKMMMPNKMMPQMGGHHGNGGGPKGPNEIMMMMNGFKGGGGGGKKGGGGGFEIPVQMKGMGEGKNGKDGKKGKGGEKGKKEGKENKGGGKTGKTDAKSGGGGLLGFFKKGKSGNGDEKKSAGKKDGHGGNKVKSHGGGGGVQHYDSGPKKGGGGTKGGGHGGLDIDELMKHSKGGGGGGNKGNHNHSAKGIGGGPMGPGGPMGPGGPMGQGGPMGMMGPGGPMSMMGPGGPMGPMGGQGGSYPAVQGLPMSGGGGYYPGPPQASQQMNQQQYMQMMMNQQQQQQQQQQAVAHGGYGGGHGGDMYHPMMYARPYPAVNYAHPPPMPPPHSDSYTHMFSDENPGSCSIM

SEQ ID NO: 36663 - DNA, 1207 bp, Arabidopsis thaliana
  misc_feature (1)..(1207): Ceres Seq. ID no. 12390595
  misc_feature (1)..(1207): Ortholog of  Ceres SEQ ID NO 15227018 as cited in SEQ ID NO 0
acacctcacatccttttctttccccttctctcaaccttttggtggaaaaaaccagaaaatggggttgcatccaatttccgacgccaatgaacacaatcccttcggctctctcaccgccgacgaattctacgccaaacattccgttagccactcctccgctttcatcaccaaccctcgcggtctcaaactcttcactcaatggtggtcaccactccctccaactaaaccaatcggtatcatcgctgtcgttcatggcttcaccggcgaatccagttggttccttcagctcacatcaatcctcttcgctaaatccggtttcataacctgcgcaattgatcaccaaggccatggattctccgatggactcatcgctcatatccctgacatcaatcccgtcgtcgatgactgtatctctttcttcgatgacttccgtagccgtcaaacaccgtcagatctgccgtgttttctctactctgaatccctaggcggcgcgattgctctctacatctcgcttcgtcagagaggtgtttgggatggacttatcctcaacggagctatgtgtggaatcagcgataaattcaaaccgccgtggccgttggagcatttgctattcgtcgtcgcgaatcttatccctacttggcgcgttatccccactcgcggatctattcccgatgtttcgttcaaggagccgtggaagaggaagcttgccatggctagcccaaggaggacggtggcgaaaccacgggccgctactgcttatgagctgattcgtgtttgtaaggatctgcaggggaggtttgaggaagtggaggttccgcttctgattgtgcacggcggaggtgatgttgtatgcgacgtagcgtgtgttgaggagcttcatcggagagcgattagtgaggataagacgatcaagatctaccctgagttgtggcatcagatgattggggaatcggaggagaaagtcgatctggtttacggtgatatgctgagctggctcaagagtcgagctgaaaggaaggcacgcgccgccgttgatggaggagcagcttagagtcccttttgagtctttgggtgttgtattgtagtccaataggactgtgccatctggcaagaaactatttatggttttactgtttcgtaatcgtagcacatggtttacagttaaaccaatacctttgggtatcatcaataatataaaaaatcgttg

SEQ ID NO: 36664 - protein, 349 aa, Arabidopsis thaliana
  peptide (1)..(349): Ceres Seq. ID no. 12390596
HLTSFSFPFSQPFGGKNQKMGLHPISDANEHNPFGSLTADEFYAKHSVSHSSAFITNPRGLKLFTQWWSPLPPTKPIGIIAVVHGFTGESSWFLQLTSILFAKSGFITCAIDHQGHGFSDGLIAHIPDINPVVDDCISFFDDFRSRQTPSDLPCFLYSESLGGAIALYISLRQRGVWDGLILNGAMCGISDKFKPPWPLEHLLFVVANLIPTWRVIPTRGSIPDVSFKEPWKRKLAMASPRRTVAKPRAATAYELIRVCKDLQGRFEEVEVPLLIVHGGGDVVCDVACVEELHRRAISEDKTIKIYPELWHQMIGESEEKVDLVYGDMLSWLKSRAERKARAAVDGGAA

SEQ ID NO: 36665 - protein, 330 aa, Arabidopsis thaliana; identical to SEQ ID NO: 22701
  peptide (1)..(330): Ceres Seq. ID no. 12390597

SEQ ID NO: 36666 - DNA, 1646 bp, Arabidopsis thaliana
  misc_feature (1)..(1646): Ceres Seq. ID no. 13495734
  misc_feature (1)..(1646): Ortholog of  Ceres SEQ ID NO 13593889 as cited in SEQ ID NO 53305
  misc_feature (1)..(1646): Ortholog of  Ceres SEQ ID NO 13581959 as cited in SEQ ID NO 56156
ccaccaccaccttcgatcgatttctactaacttgttcttcttcttctttctcaactctcttgtcttttgtctctccaccaattttttcttgttctttctctctccaccacataaaaaaaaaaaacctagctttgtcccctcaactcactgattgaactgcttgattttcgattgatcatctgggtggttttgaatcgaagagtattgttgtattagtggctggtggctctccaaaagagtaaggccggagagagaaatcaatggcctctggcggcggagaggcggataaatcacttgaaatcgggtccgggaccgcggatcccaaaataggcggtactgggagcaggagcgccggagaagaacgatacttcagggcagatacactggatttcagtaaatgggatttgcatatgggtcaaacctctactagcagcgtcctcaccaattccgcttccacgagcgctcccgcaccggcgatgcaggaatgggagattgacctctccaaactcgatatgaagcacgtcctcgctcacggtacttacggcactgtctaccgcggtgtctacgccggccaagaagtcgcagtgaaagtgttagattggggagaagatggttacgccacaccagctgaaactacagctctccgtgcttccttcgagcaagaggtcgccgtctggcagaagctcgatcatcccaacgttaccaagtttataggagcatccatgggaacctctgatctgcggatccctcctgctggtgatactggcggacgtggtaacggtgcacatcctgcgagggcctgttgtgttgtggttgaatatgttgccggaggcacgcttaagaagttcctcatcaagaaatatagggccaaactacccatcaaggatgtcattcagctcgctttggatctcgctagagggcttagttacctccactccaaggcgattgtacatagggacgtgaagtcagagaacatgctgttacagcctaacaagacgctgaagatcgctgatttcggggtagctagagttgaagctcagaaccctcaagacatgacgggtgaaactggaacacttggatacatggcaccagaggttcttgaaggaaagccttacaacaggaaatgcgatgtctatagctttggggtatgcctctgggaaatatactgctgtgacatgccctatgctgactgtagttttgctgagatctctcacgccgttgttcataggaatctgagaccagagattccgaaatgctgcccgcatgcggtggcaaacatcatgaagagatgctgggacccgaatccagacaggcgtccggagatggaggaggtggtgaagctgcttgaagccatagacacaagcaaaggtggtggaatgatagctccggaccagtttcaggggtgcctctgtttcttcaaacctcgaggcccctgaatctctctccctctctttcctttttgctccgtgtctgatatattcttgagagctgcgtgattctttggattttgtatttactttgagctatgggagttggattggtgtgggttttgtcataagaatctttctgcgctctatgtatttatatacttaacacagtcgtgtataattcgattaagctttattttattttttgatgttgattcc

SEQ ID NO: 36667 - protein, 391 aa, Arabidopsis thaliana
  peptide (1)..(391): Ceres Seq. ID no. 13495735
MASGGGEADKSLEIGSGTADPKIGGTGSRSAGEERYFRADTLDFSKWDLHMGQTSTSSVLTNSASTSAPAPAMQEWEIDLSKLDMKHVLAHGTYGTVYRGVYAGQEVAVKVLDWGEDGYATPAETTALRASFEQEVAVWQKLDHPNVTKFIGASMGTSDLRIPPAGDTGGRGNGAHPARACCVVVEYVAGGTLKKFLIKKYRAKLPIKDVIQLALDLARGLSYLHSKAIVHRDVKSENMLLQPNKTLKIADFGVARVEAQNPQDMTGETGTLGYMAPEVLEGKPYNRKCDVYSFGVCLWEIYCCDMPYADCSFAEISHAVVHRNLRPEIPKCCPHAVANIMKRCWDPNPDRRPEMEEVVKLLEAIDTSKGGGMIAPDQFQGCLCFFKPRGP

SEQ ID NO: 36668 - protein, 341 aa, Arabidopsis thaliana
  peptide (1)..(341): Ceres Seq. ID no. 13495736
MGQTSTSSVLTNSASTSAPAPAMQEWEIDLSKLDMKHVLAHGTYGTVYRGVYAGQEVAVKVLDWGEDGYATPAETTALRASFEQEVAVWQKLDHPNVTKFIGASMGTSDLRIPPAGDTGGRGNGAHPARACCVVVEYVAGGTLKKFLIKKYRAKLPIKDVIQLALDLARGLSYLHSKAIVHRDVKSENMLLQPNKTLKIADFGVARVEAQNPQDMTGETGTLGYMAPEVLEGKPYNRKCDVYSFGVCLWEIYCCDMPYADCSFAEISHAVVHRNLRPEIPKCCPHAVANIMKRCWDPNPDRRPEMEEVVKLLEAIDTSKGGGMIAPDQFQGCLCFFKPRGP

SEQ ID NO: 36669 - protein, 319 aa, Arabidopsis thaliana
  peptide (1)..(319): Ceres Seq. ID no. 13495737
MQEWEIDLSKLDMKHVLAHGTYGTVYRGVYAGQEVAVKVLDWGEDGYATPAETTALRASFEQEVAVWQKLDHPNVTKFIGASMGTSDLRIPPAGDTGGRGNGAHPARACCVVVEYVAGGTLKKFLIKKYRAKLPIKDVIQLALDLARGLSYLHSKAIVHRDVKSENMLLQPNKTLKIADFGVARVEAQNPQDMTGETGTLGYMAPEVLEGKPYNRKCDVYSFGVCLWEIYCCDMPYADCSFAEISHAVVHRNLRPEIPKCCPHAVANIMKRCWDPNPDRRPEMEEVVKLLEAIDTSKGGGMIAPDQFQGCLCFFKPRGP

SEQ ID NO: 36670 - DNA, 1064 bp, Arabidopsis thaliana
  misc_feature (1)..(1064): Ceres Seq. ID no. 12560070
  misc_feature (1)..(1064): Ortholog of  Ceres SEQ ID NO 12609419 as cited in SEQ ID NO 52077
caatcttttcttcgatctctttcttttttatctcttcatcgattgtgagaaaagttttgatttgtctctctatatctttcatctttcttatttttacactttgatagattctctatttttggaatctgattcatatgtttggggtttaatagtttcagctcaaagaaatctgggttaaagtgtgttagtgttcgtgtgttctctaaaggaaaatcctgaagaaaccaattgtaacttgtacactgggaaaatataagtgttcctgaggagtaaaagaggggaaaaagagaatgagaatagtccgggttaacgggaggcatagcgtctgggaagagtacagtgtctaacctcttcaaggctagtggcattcccgttgttgacgctgatgttgttgctcgagatgtattgaagaaaggaagcggtggatggaaaagagtcgttgcagcttttggtgaggagattctgcttcctagtggagaagtggatcggccaaaactcggtcagattgtgttctcgtctgattccaagcgtcaacttctaaacaagctgatggctccatacatatcaagtggtatcttctgggaaattctgaaacaatgggcgaagtggagctaaagtgatagttgtcgatatccctttgttgttcgaagtgaagatggataaatggactaaacctattgtggttgtgtgggttagtcaagagacacaacttaagagactgatggagagagatggattgagtgaggaagatgcaagaaacagagtgatggctcagatgccgttggattcgaaaagaagcaaagctgatgttgtgatcgataataatggctctcttgacgaccttcaccaacagttcgagaaggttttgattgaaattagaagaccattgacgtggatcgagttttggcgttcaaggcaaggagccttctcggtccttggttcagtgattttaggattatctgtttgcaaacagctcaaaattggctcttaacatttcacttctgttactgctaaaaaacttgttataatcttaaagctttgatttattattctcttgctctctc

SEQ ID NO: 36671 - protein, 111 aa, Arabidopsis thaliana
  peptide (1)..(111): Ceres Seq. ID no. 12560071
MDKWTKPIVVVWVSQETQLKRLMERDGLSEEDARNRVMAQMPLDSKRSKADVVIDNNGSLDDLHQQFEKVLIEIRRPLTWIEFWRSRQGAFSVLGSVILGLSVCKQLKIGS

SEQ ID NO: 36672 - protein, 89 aa, Arabidopsis thaliana
  peptide (1)..(89): Ceres Seq. ID no. 12560072
MERDGLSEEDARNRVMAQMPLDSKRSKADVVIDNNGSLDDLHQQFEKVLIEIRRPLTWIEFWRSRQGAFSVLGSVILGLSVCKQLKIGS

SEQ ID NO: 36673 - protein, 74 aa, Arabidopsis thaliana
  peptide (1)..(74): Ceres Seq. ID no. 12560073
MAQMPLDSKRSKADVVIDNNGSLDDLHQQFEKVLIEIRRPLTWIEFWRSRQGAFSVLGSVILGLSVCKQLKIGS

SEQ ID NO: 36674 - DNA, 783 bp, Arabidopsis thaliana
  misc_feature (1)..(783): Ceres Seq. ID no. 12357676
  misc_feature (1)..(783): Ortholog of  Ceres SEQ ID NO 15177027 as cited in SEQ ID NO 58171
ttggcgagaaaagttgagaactggaatcgaagaagcgatagggttttggttacttggagtgtgagtattttagttaccaccgcttgcaatttcaaattggtttcttttttccggtgacatttagtaagacaatggaagaaataagatcggcgatggagaagcaagtggatctcgtagcggatctggttgagaaactctccggagagctccgaacggggtttcaacctgcttacgataatttcttggggtttttccacgccattaattggaaggaaccttggattatgggtttaatggcgtttcatgctttgttgttactagtgactcttctttctagaaggcatctcaacttccatatgttcctcttcttattggctttggctggggtatactttgcagagaatctcaaccgggagttgaggaaaaactggaagagcttctcaactcaaaactactttgactcgaacggagtcttcctatcgactctctggtctgggaccacttttggtcattgcaatgataatcctgataaacacactcttttcgctttgctacttaatcgtaaagtggaaaagagctgagctcaggcatcgcgcaaggcttgctcataccaaggaggaatgatcccactttttttaatctcacatttatgtatactctcacacaatgcatcaaaactgttttgagttttttagtagaagctgctcttttatgtatttcgttttcaattgaatcgaattgtatcaaaccgaaccaaaccaaattattctacttcggtctgtt

SEQ ID NO: 36675 - protein, 149 aa, Arabidopsis thaliana
  peptide (1)..(149): Ceres Seq. ID no. 12357677
MEEIRSAMEKQVDLVADLVEKLSGELRTGFQPAYDNFLGFFHAINWKEPWIMGLMAFHALLLLVTLLSRRHLNFHMFLFLLALAGVYFAENLNRELRKNWKSFSTQNYFDSNGVFLSTLWSGTTFGHCNDNPDKHTLFALLLNRKVEKS

SEQ ID NO: 36676 - protein, 142 aa, Arabidopsis thaliana
  peptide (1)..(142): Ceres Seq. ID no. 12357678
MEKQVDLVADLVEKLSGELRTGFQPAYDNFLGFFHAINWKEPWIMGLMAFHALLLLVTLLSRRHLNFHMFLFLLALAGVYFAENLNRELRKNWKSFSTQNYFDSNGVFLSTLWSGTTFGHCNDNPDKHTLFALLLNRKVEKS

SEQ ID NO: 36677 - protein, 98 aa, Arabidopsis thaliana
  peptide (1)..(98): Ceres Seq. ID no. 12357679
MGLMAFHALLLLVTLLSRRHLNFHMFLFLLALAGVYFAENLNRELRKNWKSFSTQNYFDSNGVFLSTLWSGTTFGHCNDNPDKHTLFALLLNRKVEKS

SEQ ID NO: 36678 - DNA, 1233 bp, Arabidopsis thaliana
  misc_feature (1)..(1233): Ceres Seq. ID no. 12336540
  misc_feature (1)..(1233): Ortholog of  Ceres SEQ ID NO 15226408 as cited in SEQ ID NO 55563
aattactttagagatttcccaaattccgtctcgaagatgtcaacggagagacgtgcttcgtcgaatccaatgaccaacgaagagaacgctatgttccttgatatattgcatgaagcaccattatttggtcacaggaaatctagaagccttgttggaagttacctctatatgcttctattggcaggttatgctattttagctgctggtgctccttggatgtttcaccgagtccaacagttgaccccttcattgctctgctgctgcgatgttgcgcttttggttgtcacaggtgtctttcaacaatactttgtttatcaagtccagaaaatacgtctccagggttattacagtttcagtcaaaagttgaagcatgttgttcgtctgccatttgcaatcgctgcatatgggactgctgcaatgcttcttgtgatagtgtggaggcctcaaatccacattctttctatttcttctttgcaacggatcatcatgttggttgaagcagtgggcgctggctttttcatgggtttatacatcggttatgtgcaccaatacaattccgtgaattcccggccagatgtcttgaagtcattatattctcctcttcagccgtcaagttctatggaaggtttgaggtattatgaaggccggctttctgatcaacaaacggctttgttacaatatcaacgtgaaaatctccattttctaagcgaggagattctgtgcttgcaagagaaacttagcaaatatgaacaatctgatgatggaagcacacctcaggttgatctcgcacatcttttagctgctcgagatcaagagctgaggacactttcagctgagatgaatcagcttcagtctgagctacggcttgctcgttctttaatagccgagagagatgcagaggtgcagcgtgtcaacagtaccaacaaccagtatatcgaagaaaacgaaagactgagggcaattttgagtgaatggagcatgcgggcagcgaatcttgagagagctttggaagtggaacggatgtcgaactcagaactacagaaggaagtagcaagcacgcgtagaaagcagatgcttgagacaacaacgtctgagcaaccttaattctaatatgggaatcaaagcttatataggtttttaacataatctctaaagtttgatggtgtaactataaagatcatggaatgtgtctactgaaagaagtttgtgtagtaaacggctcttttgtttttt

SEQ ID NO: 36679 - protein, 367 aa, Arabidopsis thaliana
  peptide (1)..(367): Ceres Seq. ID no. 12336541
NYFRDFPNSVSKMSTERRASSNPMTNEENAMFLDILHEAPLFGHRKSRSLVGSYLYMLLLAGYAILAAGAPWMFHRVQQLTPSLLCCCDVALLVVTGVFQQYFVYQVQKIRLQGYYSFSQKLKHVVRLPFAIAAYGTAAMLLVIVWRPQIHILSISSLQRIIMLVEAVGAGFFMGLYIGYVHQYNSVNSRPDVLKSLYSPLQPSSSMEGLRYYEGRLSDQQTALLQYQRENLHFLSEEILCLQEKLSKYEQSDDGSTPQVDLAHLLAARDQELRTLSAEMNQLQSELRLARSLIAERDAEVQRVNSTNNQYIEENERLRAILSEWSMRAANLERALEVERMSNSELQKEVASTRRKQMLETTTSEQP

SEQ ID NO: 36680 - protein, 355 aa, Arabidopsis thaliana
  peptide (1)..(355): Ceres Seq. ID no. 12336542
MSTERRASSNPMTNEENAMFLDILHEAPLFGHRKSRSLVGSYLYMLLLAGYAILAAGAPWMFHRVQQLTPSLLCCCDVALLVVTGVFQQYFVYQVQKIRLQGYYSFSQKLKHVVRLPFAIAAYGTAAMLLVIVWRPQIHILSISSLQRIIMLVEAVGAGFFMGLYIGYVHQYNSVNSRPDVLKSLYSPLQPSSSMEGLRYYEGRLSDQQTALLQYQRENLHFLSEEILCLQEKLSKYEQSDDGSTPQVDLAHLLAARDQELRTLSAEMNQLQSELRLARSLIAERDAEVQRVNSTNNQYIEENERLRAILSEWSMRAANLERALEVERMSNSELQKEVASTRRKQMLETTTSEQP

SEQ ID NO: 36681 - protein, 344 aa, Arabidopsis thaliana
  peptide (1)..(344): Ceres Seq. ID no. 12336543
MTNEENAMFLDILHEAPLFGHRKSRSLVGSYLYMLLLAGYAILAAGAPWMFHRVQQLTPSLLCCCDVALLVVTGVFQQYFVYQVQKIRLQGYYSFSQKLKHVVRLPFAIAAYGTAAMLLVIVWRPQIHILSISSLQRIIMLVEAVGAGFFMGLYIGYVHQYNSVNSRPDVLKSLYSPLQPSSSMEGLRYYEGRLSDQQTALLQYQRENLHFLSEEILCLQEKLSKYEQSDDGSTPQVDLAHLLAARDQELRTLSAEMNQLQSELRLARSLIAERDAEVQRVNSTNNQYIEENERLRAILSEWSMRAANLERALEVERMSNSELQKEVASTRRKQMLETTTSEQP

SEQ ID NO: 36682 - DNA, 721 bp, Arabidopsis thaliana
  misc_feature (1)..(721): Ceres Seq. ID no. 13646117
  misc_feature (1)..(721): Ortholog of  Ceres SEQ ID NO 12610243 as cited in SEQ ID NO 56206
  misc_feature (1)..(721): Ortholog of  Ceres SEQ ID NO 13661089 as cited in SEQ ID NO 61053
  misc_feature (1)..(721): Ortholog of  Ceres SEQ ID NO 12586495 as cited in SEQ ID NO 64946
acaacacaacttcagctttaagacagctaaaactaaatacaaagaaacagagatgggtttggttacagaggaggtgagagctaaggcagagatgtacaccggagatgagatatgtagagagaagacaaagtgtttcctcaaggaaatatctatgcccaatggtttattaccattgaaggatatagaagaggttgggtatgacagagagtcaggtgttgtatggctgaagcagaagaagagcatcactcacaagttcacagagatagataagcttgtctcctatggaaccgaagtcacagccattgttgagaccgggaaaatcaagaagctcactggagtcaaagccaaggaacttcttatttgggtcactatcaatgagatctataccgaggaaccccctaccaagatcacgttcaagacaccgaccacactgtccaggactttcccggtctcaacaatggctgtgacttcggttctattggacacatcgttgcttactacatcttggctacttccagcaatggatacgacccaagcttctttggatgattcttttcaatgtcaatctctcgtatatgtatatgtatatgtttgacttgtgttgcaagctatctaatctgttctctatctctgtttcttcttctgttgttgttgttgttgtctaagacttgtccctctttttgcaaatgttttatttctccatttacaaatattggtttgc

SEQ ID NO: 36683 - protein, 197 aa, Arabidopsis thaliana
  peptide (1)..(197): Ceres Seq. ID no. 13646118
QHNFSFKTAKTKYKETEMGLVTEEVRAKAEMYTGDEICREKTKCFLKEISMPNGLLPLKDIEEVGYDRESGVVWLKQKKSITHKFTEIDKLVSYGTEVTAIVETGKIKKLTGVKAKELLIWVTINEIYTEEPPTKITFKTPTTLSRTFPVSTMAVTSVLLDTSLLTTSWLLPAMDTTQASLDDSFQCQSLVYVYVYV

SEQ ID NO: 36684 - protein, 180 aa, Arabidopsis thaliana
  peptide (1)..(180): Ceres Seq. ID no. 13646119
MGLVTEEVRAKAEMYTGDEICREKTKCFLKEISMPNGLLPLKDIEEVGYDRESGVVWLKQKKSITHKFTEIDKLVSYGTEVTAIVETGKIKKLTGVKAKELLIWVTINEIYTEEPPTKITFKTPTTLSRTFPVSTMAVTSVLLDTSLLTTSWLLPAMDTTQASLDDSFQCQSLVYVYVYV

SEQ ID NO: 36685 - protein, 167 aa, Arabidopsis thaliana
  peptide (1)..(167): Ceres Seq. ID no. 13646120
MYTGDEICREKTKCFLKEISMPNGLLPLKDIEEVGYDRESGVVWLKQKKSITHKFTEIDKLVSYGTEVTAIVETGKIKKLTGVKAKELLIWVTINEIYTEEPPTKITFKTPTTLSRTFPVSTMAVTSVLLDTSLLTTSWLLPAMDTTQASLDDSFQCQSLVYVYVYV

SEQ ID NO: 36686 - DNA, 1370 bp, Arabidopsis thaliana
  misc_feature (1)..(1370): Ceres Seq. ID no. 13491770
  misc_feature (1)..(1370): Ortholog of  Ceres SEQ ID NO 13596198 as cited in SEQ ID NO 68488
aattaaccgtcacgagctacatgctctgtatcttcagatttcctaaatacttacaattcccattccaattctgatttggttaatccaaaacaaaaaaaaaggaaactttcttttaccctaaatctataaaaacgaaacccttcttcacaaatctttgttcttcgtaatctctcttaaaagcttttgtttcaatttcaatggagtgggttcgaggagaaacaattgggttcggaaccttctctactgtcagtacagcgacaaagtctagaaactccggcgactttcctgcacttatcgctgtgaagtcgacgggttcttacggcgccgcttcactctccaacgagaaatcggtgttggattcactccgtgattgtcctgagatcatacggtgttacggcgaggattcaactgtggagaacggagaagagatgcataacttgttcttagagtacgcttcgagaggaagcttagcgaggtacatgaagaaacttggcggtgagggtttaccggagtccaccgtacgtcgctacacaggatcggtgcttcgagggttacgtcatattcacgctaaagggtttgcacactgcgatataaaactcgggaatattctgttattcaacgacggctctgttaaaattgccgattttggtttggcgatgagagttcacggagatttaacggcgttaagaaaaagtgaggagattagagggactccgttatacatggcaccggaatctgttaatgataatgagtatggatcagcggctgacgtgtgggctttaggatgtgctgtagttgagatgttgagtggcaaaacggcatggagtgttaaagaaggatcacacttcatgtcgcttttgatacgtatcggtgttggtgatgagttaccgaagattccagagatgttgtccgaagaaggcaaggatttcttgtcgaagtgttttgttaaagatcaagcgaaaagatggacggctgagatgcttttaaaccattcattcgtagccattgatcttgaagatgatcaccgagaagacttcgttgtgaaggttaaggaagaggataaagtattgatgtctccaaagtgtccctttgagtttgatgattgggattcttttacattggattcaaacccatcgttggattctccggtggagagacttgggagtttggttagtggttcgatccctgattggtctgtcggtgagagttgggtttcagtccggtgatgaaagtgatatgaaaacagaggaaaaacagagtgtttggaaggctaggttttttttagcacctagttagacccattctacgattcttgttcgtattctttaggtgtaattgatttgttaatacaattcattctagtgttcctc

SEQ ID NO: 36687 - protein, 342 aa, Arabidopsis thaliana
  peptide (1)..(342): Ceres Seq. ID no. 13491771
MEWVRGETIGFGTFSTVSTATKSRNSGDFPALIAVKSTGSYGAASLSNEKSVLDSLRDCPEIIRCYGEDSTVENGEEMHNLFLEYASRGSLARYMKKLGGEGLPESTVRRYTGSVLRGLRHIHAKGFAHCDIKLGNILLFNDGSVKIADFGLAMRVHGDLTALRKSEEIRGTPLYMAPESVNDNEYGSAADVWALGCAVVEMLSGKTAWSVKEGSHFMSLLIRIGVGDELPKIPEMLSEEGKDFLSKCFVKDQAKRWTAEMLLNHSFVAIDLEDDHREDFVVKVKEEDKVLMSPKCPFEFDDWDSFTLDSNPSLDSPVERLGSLVSGSIPDWSVGESWVSVR

SEQ ID NO: 36688 - protein, 265 aa, Arabidopsis thaliana
  peptide (1)..(265): Ceres Seq. ID no. 13491772
MHNLFLEYASRGSLARYMKKLGGEGLPESTVRRYTGSVLRGLRHIHAKGFAHCDIKLGNILLFNDGSVKIADFGLAMRVHGDLTALRKSEEIRGTPLYMAPESVNDNEYGSAADVWALGCAVVEMLSGKTAWSVKEGSHFMSLLIRIGVGDELPKIPEMLSEEGKDFLSKCFVKDQAKRWTAEMLLNHSFVAIDLEDDHREDFVVKVKEEDKVLMSPKCPFEFDDWDSFTLDSNPSLDSPVERLGSLVSGSIPDWSVGESWVSVR

SEQ ID NO: 36689 - protein, 248 aa, Arabidopsis thaliana
  peptide (1)..(248): Ceres Seq. ID no. 13491773
MKKLGGEGLPESTVRRYTGSVLRGLRHIHAKGFAHCDIKLGNILLFNDGSVKIADFGLAMRVHGDLTALRKSEEIRGTPLYMAPESVNDNEYGSAADVWALGCAVVEMLSGKTAWSVKEGSHFMSLLIRIGVGDELPKIPEMLSEEGKDFLSKCFVKDQAKRWTAEMLLNHSFVAIDLEDDHREDFVVKVKEEDKVLMSPKCPFEFDDWDSFTLDSNPSLDSPVERLGSLVSGSIPDWSVGESWVSVR

SEQ ID NO: 36690 - DNA, 1659 bp, Arabidopsis thaliana
  misc_feature (1)..(1659): Ceres Seq. ID no. 13491319
  misc_feature (1)..(1659): Ortholog of  Ceres SEQ ID NO 14306857 as cited in SEQ ID NO 60035
  misc_feature (1)..(1659): Ortholog of  Ceres SEQ ID NO 15227091 as cited in SEQ ID NO 60294
  misc_feature (1)..(1659): Ortholog of  Ceres SEQ ID NO 14307960 as cited in SEQ ID NO 66187
  misc_feature (1)..(1659): Ortholog of  Ceres SEQ ID NO 13502874 as cited in SEQ ID NO 66298
  misc_feature (1)..(1659): Ortholog of  Ceres SEQ ID NO 12614124 as cited in SEQ ID NO 68392
ttcactcaccaaaatagatctaaaacatggaaaccaaaaccctaattttctcaattctcttcgttgttctctctctcatttacttaattggaaaactcaagcgaaagccaaatctacctccgagtccggcatggtcattaccggtgattggtcatctccgccttctcaaaccaccgattcatcgcacattcctctccctctctcaatccctaaacaatgctccgatcttctccctccgactcggtaaccgactcgttttcgtgaactcgtcacactcgatcgccgaggaatgtttcaccaaaaacgacgtcgtactggcgaacagaccaaacttcatcctcgctaaacacgttgcgtacgattacacaaccatgatcgcagcttcctacggtgaccactggcgtaacctccgccgcatcggctccgtcgagatattctccaatcaccgtctcaatagctttttgtctattcgtaaagacgagatccgacgacttgtgtttcgtctttctcggaacttttcacaagagtttgtgaaagtggatatgaaatcaatgttatctgacttaacattcaacaacattttaagaatggtggccggaaaacgttactacggagacggtgttgaggatgatccggaggctaaacgtgtccggcagcttatagcggatgtggtggcttgtgctggtgctggaaacgctgttgattacttaccggttttgcggttggtttcagattacgagacacgggttaagaagttggcgggtaggctcgacgagttcttgcaaggattggttgatgagaaacgagaagctaaggagaaaggaaacactatgatcgatcacttgcttactctgcaagaatcccaaccggattacttcacggatcgtatcattaaaggaaacatgctcgctttgatactagcagggaccgacacatcagcggttacgttagaatgggcattgtcgaacgtgttgaaccatccggatgtattgaacaaggcgagagatgaaatcgatagaaagataggtttagacaggcttatggatgaatcagatatctcaaacctgccttatctccaaaacattgtgtctgaaacgttgcgcctttatcctgcggctcccatgcttcttcctcacgttgcctcggaagattgtaaagttgcaggatacgatatgccgcgtggcacgatactattgaccaatgtgtgggctatacacagagatcctcagctatgggatgatccaatgagcttcaagccagagaggtttgagaaagaaggagaagctcagaagctaatgccgtttgggttaggaagaagggcgtgtcctggttctggactggctcatcggcttataaacctgactcttggatcattgattcagtgtttggaatgggagaagattggagaagaagtggatatgagtgaaggcaaaggtgttacaatgcctaaagccaagcctttggaagccatgtgcagagcacgtccctctgttgttaaaatcttcaacgagtccgtttgacgtttagacttttggtaatggctatgtatacattagataactagttatgtttgtatgttttctttttttttggtgaaaatattatgtttgtatgttatatgagaatattttaccaatattcctagatgatattttgggc

SEQ ID NO: 36691 - protein, 497 aa, Arabidopsis thaliana
  peptide (1)..(497): Ceres Seq. ID no. 13491320
METKTLIFSILFVVLSLIYLIGKLKRKPNLPPSPAWSLPVIGHLRLLKPPIHRTFLSLSQSLNNAPIFSLRLGNRLVFVNSSHSIAEECFTKNDVVLANRPNFILAKHVAYDYTTMIAASYGDHWRNLRRIGSVEIFSNHRLNSFLSIRKDEIRRLVFRLSRNFSQEFVKVDMKSMLSDLTFNNILRMVAGKRYYGDGVEDDPEAKRVRQLIADVVACAGAGNAVDYLPVLRLVSDYETRVKKLAGRLDEFLQGLVDEKREAKEKGNTMIDHLLTLQESQPDYFTDRIIKGNMLALILAGTDTSAVTLEWALSNVLNHPDVLNKARDEIDRKIGLDRLMDESDISNLPYLQNIVSETLRLYPAAPMLLPHVASEDCKVAGYDMPRGTILLTNVWAIHRDPQLWDDPMSFKPERFEKEGEAQKLMPFGLGRRACPGSGLAHRLINLTLGSLIQCLEWEKIGEEVDMSEGKGVTMPKAKPLEAMCRARPSVVKIFNESV

SEQ ID NO: 36692 - protein, 382 aa, Arabidopsis thaliana
  peptide (1)..(382): Ceres Seq. ID no. 13491321
MIAASYGDHWRNLRRIGSVEIFSNHRLNSFLSIRKDEIRRLVFRLSRNFSQEFVKVDMKSMLSDLTFNNILRMVAGKRYYGDGVEDDPEAKRVRQLIADVVACAGAGNAVDYLPVLRLVSDYETRVKKLAGRLDEFLQGLVDEKREAKEKGNTMIDHLLTLQESQPDYFTDRIIKGNMLALILAGTDTSAVTLEWALSNVLNHPDVLNKARDEIDRKIGLDRLMDESDISNLPYLQNIVSETLRLYPAAPMLLPHVASEDCKVAGYDMPRGTILLTNVWAIHRDPQLWDDPMSFKPERFEKEGEAQKLMPFGLGRRACPGSGLAHRLINLTLGSLIQCLEWEKIGEEVDMSEGKGVTMPKAKPLEAMCRARPSVVKIFNESV

SEQ ID NO: 36693 - protein, 325 aa, Arabidopsis thaliana
  peptide (1)..(325): Ceres Seq. ID no. 13491322
MKSMLSDLTFNNILRMVAGKRYYGDGVEDDPEAKRVRQLIADVVACAGAGNAVDYLPVLRLVSDYETRVKKLAGRLDEFLQGLVDEKREAKEKGNTMIDHLLTLQESQPDYFTDRIIKGNMLALILAGTDTSAVTLEWALSNVLNHPDVLNKARDEIDRKIGLDRLMDESDISNLPYLQNIVSETLRLYPAAPMLLPHVASEDCKVAGYDMPRGTILLTNVWAIHRDPQLWDDPMSFKPERFEKEGEAQKLMPFGLGRRACPGSGLAHRLINLTLGSLIQCLEWEKIGEEVDMSEGKGVTMPKAKPLEAMCRARPSVVKIFNESV

SEQ ID NO: 36694 - DNA, 1205 bp, Arabidopsis thaliana
  misc_feature (1)..(1205): Ceres Seq. ID no. 12603454
  misc_feature (1)..(1205): Ortholog of  Ceres SEQ ID NO 13593955 as cited in SEQ ID NO 54278
  misc_feature (1)..(1205): Ortholog of  Ceres SEQ ID NO 13597380 as cited in SEQ ID NO 64054
  misc_feature (1)..(1205): Ortholog of  Ceres SEQ ID NO 12625474 as cited in SEQ ID NO 64169
  misc_feature (1)..(1205): Ortholog of  Ceres SEQ ID NO 13597502 as cited in SEQ ID NO 64681
aattttccttttgggactcggactctctctctagtctctatatatatttatgcaattcccggaaaatctgtttttttctttctctattgtcatcatcccacacactaaccaaattaaccatgaaccgtaatcaacacaaaccaatgtttgttacattcctcatcaatattcttctcctccaacttctaaaccttaccaatgcatcaccatccccaccaataacagccctatacgccttcggcgactccacagtggactccggtaacaacaattacattcccactcttttccagagcaaccatcctccctatggtaaatcctttccgtccaaactctccaccggaaggttctccgacggaaaactcgccaccgacttcatagtctcctctctaggactcaaacccactctaccagcttacctcaacccttcggtcaaacctgtagatcttttgaccggcgttagtttcgcctcggccggaggtggtttagatgatcggacggcaaagtcatcattgactattaccatggacaagcaatggagttacttcgaagaggcgctgggtaaaatgaagagtttggttggagactcggagactaatcgggtgattaagaatgctgtgttcgtcattagtgcggggactaatgatatgatctttaatgtttacgatcatgttcttgggagtttgatctccgtttcggattatcaagattctctactaaccaaagtcgaagtttttgtccagagactatacgaggcaggagcacgaaggattacaatagctggactaccaccaatcggatgccttccggtgcaagtaacacttactagcatcaatactcctcgcatcttccatcatcggatctgtacggaacatcagaacgatgattctcgggtttacaatcaaaagctacagaagctaatcttcggtctcagtcagaggtttcgaggttccaaagttctttaccttgatatctactctccgttaatagacatgatcaaacatcctcgtaaatacggactagaggaaacattgagaggatgttgtgggacagggctacttgaggcaggacctctatgccaaccattgtctcggacttgtgacgatgtttccaagtatttattctttgattctgtgcatccttcacagacggcttattctgtcatcgctagtttcgccttacaaaaattgtttcctctcctctaa

SEQ ID NO: 36695 - protein, 400 aa, Arabidopsis thaliana
  peptide (1)..(400): Ceres Seq. ID no. 12603455
FSFWDSDSLSSLYIYLCNSRKICFFLSLLSSSHTLTKLTMNRNQHKPMFVTFLINILLLQLLNLTNASPSPPITALYAFGDSTVDSGNNNYIPTLFQSNHPPYGKSFPSKLSTGRFSDGKLATDFIVSSLGLKPTLPAYLNPSVKPVDLLTGVSFASAGGGLDDRTAKSSLTITMDKQWSYFEEALGKMKSLVGDSETNRVIKNAVFVISAGTNDMIFNVYDHVLGSLISVSDYQDSLLTKVEVFVQRLYEAGARRITIAGLPPIGCLPVQVTLTSINTPRIFHHRICTEHQNDDSRVYNQKLQKLIFGLSQRFRGSKVLYLDIYSPLIDMIKHPRKYGLEETLRGCCGTGLLEAGPLCQPLSRTCDDVSKYLFFDSVHPSQTAYSVIASFALQKLFPLL

SEQ ID NO: 36696 - protein, 361 aa, Arabidopsis thaliana
  peptide (1)..(361): Ceres Seq. ID no. 12603456
MNRNQHKPMFVTFLINILLLQLLNLTNASPSPPITALYAFGDSTVDSGNNNYIPTLFQSNHPPYGKSFPSKLSTGRFSDGKLATDFIVSSLGLKPTLPAYLNPSVKPVDLLTGVSFASAGGGLDDRTAKSSLTITMDKQWSYFEEALGKMKSLVGDSETNRVIKNAVFVISAGTNDMIFNVYDHVLGSLISVSDYQDSLLTKVEVFVQRLYEAGARRITIAGLPPIGCLPVQVTLTSINTPRIFHHRICTEHQNDDSRVYNQKLQKLIFGLSQRFRGSKVLYLDIYSPLIDMIKHPRKYGLEETLRGCCGTGLLEAGPLCQPLSRTCDDVSKYLFFDSVHPSQTAYSVIASFALQKLFPLL

SEQ ID NO: 36697 - protein, 353 aa, Arabidopsis thaliana
  peptide (1)..(353): Ceres Seq. ID no. 12603457
MFVTFLINILLLQLLNLTNASPSPPITALYAFGDSTVDSGNNNYIPTLFQSNHPPYGKSFPSKLSTGRFSDGKLATDFIVSSLGLKPTLPAYLNPSVKPVDLLTGVSFASAGGGLDDRTAKSSLTITMDKQWSYFEEALGKMKSLVGDSETNRVIKNAVFVISAGTNDMIFNVYDHVLGSLISVSDYQDSLLTKVEVFVQRLYEAGARRITIAGLPPIGCLPVQVTLTSINTPRIFHHRICTEHQNDDSRVYNQKLQKLIFGLSQRFRGSKVLYLDIYSPLIDMIKHPRKYGLEETLRGCCGTGLLEAGPLCQPLSRTCDDVSKYLFFDSVHPSQTAYSVIASFALQKLFPLL

SEQ ID NO: 36698 - DNA, 1520 bp, Arabidopsis thaliana
  misc_feature (1)..(1520): Ceres Seq. ID no. 12336366
  misc_feature (1)..(1520): Ortholog of  Ceres SEQ ID NO 12614739 as cited in SEQ ID NO 68587
gtattaaaagaaagaaagaaaaaaaaaggagaggagaagaagcagtggagagagagcatgtgaataaaaagcgtgaagctttttgatatctctttctcttcctcttcctttctcctccgatagatttcgccggcgatggcggtggactccttagaaacggagattgacacggcggtgcgtgttgtccacctcgcttcttctctctgtgttaaagttcaagagaagcttcatcttcctaacggtggtcacgttaagtctaaagacgatgattcccctgtcaccgtcgctgattttggtgtacaagcaattgtgagctgggttttagctgaagtgtttggtgatcaaaacctttcaattgttgctgaagaagacactgagacactctctgaggctgattctttaggtcttttaggagctgtgtcgaatgcggttaatgaagcattgtccgaagctcagaactacgggcttccgaagccagttaagccattggggtctagtgaaattcttaaggctattagtagatgtaactctgttggaggacctaaaggaaggcattgggttcttgatcctgttgatggaacgttagggtttgttcgtggggatcagtatgctgttgctttagctttgatagagaatggtaaagttcttttgggtgtactaggatgtcctaattatccggttaagaaagaatgtttaagtaatggttgtaaccaagctatgaagacgaaagctgttgctggttcagtatcgaaaggatgtgttatgtatgcaaagagaggtagtggtcaagcttggatgcaacctttgatcgttggaggaataccagaatctgcaacacttcttaaggtttcttcagttgatgatccggttttagctacagtttgtgagccagtagagagagcaaactcaaaccacttgttcactgcaggacttgccaatagcatgggagttagaaagcagcctatgcgagtgtatagcatggtgaaatatgcagcgattgcacgtggagacgctgaagtgtttatgaagtttgcacagtcaagttacaaagagaagatatgggatcacgcagctggagttgttattgtggaagaagctggtggtgtggtgactgatgcgggagggagaaacttagacttctcgaaaggtgtttacttggaaggtcttgaccgtggaatcatcgcatgttctggtcaagttttacatgagaagattataggtgctgtttatgctagttgggaatcttccagtctctgaaaaagcttatccacaatccgtagtttggtgcagcatcatcgagccaaagcaaaggaggaacaagggccattacggtttaggatgagcaagggccagtttcaatgaatgtgaatggcggagaagtaaatatagtcgaggaagcagcggtaaaagtaagaatctagtttatttacctatctaagagtaataaagctgctgcatttcacgaacccttatgttctatgatctttaatggatgatatcatttttaatcttcgtcctgt

SEQ ID NO: 36699 - protein, 373 aa, Arabidopsis thaliana
  peptide (1)..(373): Ceres Seq. ID no. 12336367
MAVDSLETEIDTAVRVVHLASSLCVKVQEKLHLPNGGHVKSKDDDSPVTVADFGVQAIVSWVLAEVFGDQNLSIVAEEDTETLSEADSLGLLGAVSNAVNEALSEAQNYGLPKPVKPLGSSEILKAISRCNSVGGPKGRHWVLDPVDGTLGFVRGDQYAVALALIENGKVLLGVLGCPNYPVKKECLSNGCNQAMKTKAVAGSVSKGCVMYAKRGSGQAWMQPLIVGGIPESATLLKVSSVDDPVLATVCEPVERANSNHLFTAGLANSMGVRKQPMRVYSMVKYAAIARGDAEVFMKFAQSSYKEKIWDHAAGVVIVEEAGGVVTDAGGRNLDFSKGVYLEGLDRGIIACSGQVLHEKIIGAVYASWESSSL

SEQ ID NO: 36700 - DNA, 1257 bp, Arabidopsis thaliana
  misc_feature (1)..(1257): Ceres Seq. ID no. 12481865
  misc_feature (1)..(1257): Ortholog of  Ceres SEQ ID NO 13638402 as cited in SEQ ID NO 60300
  misc_feature (1)..(1257): Ortholog of  Ceres SEQ ID NO 12618349 as cited in SEQ ID NO 64838
  misc_feature (1)..(1257): Ortholog of  Ceres SEQ ID NO 15176161 as cited in SEQ ID NO 0
aaggacctgatttctctctctcattctctcaacgaaatctcgatctcgtcgaggaagaagaagaacccagatcagaaaacataacaacaatgtcgtcgtctgcgaagaaacaaaccctgttcatatcgacattaatcatctcatggtactcttcaaacatcggtgttcttctcctcaacaagttccttctctcgaattacggattcaaattcccgatttttctcacaatgtgtcacatgtccgcttgcgctatccttagctacatctccattgttttcctcaagcttgttcctctccaacatctcaaatctcgttctcaattccttaaggttgctactctcagcatcgtcttttgtgcttccgtcgtcggtggtaacatctcccttcgttaccttcctgtctctttcaatcaagccgtcggtgctacgacgccgtttttcacggctctgtttgcttatcttatgacctttaagagagaagcttgggttacttatggtgctctcgtccctgtcgtcgccggtgtcgtcatcgccagtgggggtgagccaggatttcactggtttgggttcataatgtgcattagtgctactgcggcaagagcctttaaatctgttcttcaaggcatcttactttcttcagagggggaaaaattgaactcaatgaatttgatgttgtatatgtctcccatagctgtcattgctcttcttcccgttacgctatttatggaaccagacgtgatcagtgtgaccttgacgcttgcaaaacaacatcagtacatgtggatacttcttctggttaactctgtcatggcttattcagccaatctgttgaattttctggttaccaaacacacaagcgccctcaccctccaggttcttggaaatgctaaaggagcagttgcagtggtgatttctatcttgatctttcaaaacccggttacggttatgggaattggcgggtactccataaccgtccttggggtggttgcttatggagagacaaaacgcagatttagatgaactctcagacattagcaagtgagacaacatagcttctctatgtttgtttcttcatctgttcaagactcatccttaggacctgaaatttttgggcatttaggagatgagaatttatcaatagtgattttttgtaactattttatacgcactttatcatgtaatatgtatttggactatgttagatttgatggtgagataatcatttttgtgtgtttcctggttgaaataccattttggc

SEQ ID NO: 36701 - protein, 338 aa, Arabidopsis thaliana
  peptide (1)..(338): Ceres Seq. ID no. 12481866
GPDFSLSFSQRNLDLVEEEEEPRSENITTMSSSAKKQTLFISTLIISWYSSNIGVLLLNKFLLSNYGFKFPIFLTMCHMSACAILSYISIVFLKLVPLQHLKSRSQFLKVATLSIVFCASVVGGNISLRYLPVSFNQAVGATTPFFTALFAYLMTFKREAWVTYGALVPVVAGVVIASGGEPGFHWFGFIMCISATAARAFKSVLQGILLSSEGEKLNSMNLMLYMSPIAVIALLPVTLFMEPDVISVTLTLAKQHQYMWILLLVNSVMAYSANLLNFLVTKHTSALTLQVLGNAKGAVAVVISILIFQNPVTVMGIGGYSITVLGVVAYGETKRRFR

SEQ ID NO: 36702 - protein, 309 aa, Arabidopsis thaliana
  peptide (1)..(309): Ceres Seq. ID no. 12481867
MSSSAKKQTLFISTLIISWYSSNIGVLLLNKFLLSNYGFKFPIFLTMCHMSACAILSYISIVFLKLVPLQHLKSRSQFLKVATLSIVFCASVVGGNISLRYLPVSFNQAVGATTPFFTALFAYLMTFKREAWVTYGALVPVVAGVVIASGGEPGFHWFGFIMCISATAARAFKSVLQGILLSSEGEKLNSMNLMLYMSPIAVIALLPVTLFMEPDVISVTLTLAKQHQYMWILLLVNSVMAYSANLLNFLVTKHTSALTLQVLGNAKGAVAVVISILIFQNPVTVMGIGGYSITVLGVVAYGETKRRFR

SEQ ID NO: 36703 - protein, 263 aa, Arabidopsis thaliana
  peptide (1)..(263): Ceres Seq. ID no. 12481868
MCHMSACAILSYISIVFLKLVPLQHLKSRSQFLKVATLSIVFCASVVGGNISLRYLPVSFNQAVGATTPFFTALFAYLMTFKREAWVTYGALVPVVAGVVIASGGEPGFHWFGFIMCISATAARAFKSVLQGILLSSEGEKLNSMNLMLYMSPIAVIALLPVTLFMEPDVISVTLTLAKQHQYMWILLLVNSVMAYSANLLNFLVTKHTSALTLQVLGNAKGAVAVVISILIFQNPVTVMGIGGYSITVLGVVAYGETKRRFR

SEQ ID NO: 36704 - DNA, 1611 bp, Arabidopsis thaliana
  misc_feature (1)..(1611): Ceres Seq. ID no. 13499676
  misc_feature (1)..(1611): Ortholog of  Ceres SEQ ID NO 14303866 as cited in SEQ ID NO 53689
  misc_feature (1)..(1611): Ortholog of  Ceres SEQ ID NO 14315958 as cited in SEQ ID NO 59979
  misc_feature (1)..(1611): Ortholog of  Ceres SEQ ID NO 13597037 as cited in SEQ ID NO 69005
aaattaaaagtcaatcatatcaaatcccaaatcctcccagatgtttttatcatcttcttcttcctgaagatttgatttcattttcctctctttcagatccctattctcatggcttctggatcttactggtgctatagttgtagccgattcgtttgggtttccgattcaatctcttgccctgattgcgacggtggtttcctcgaactcatccaagagcctctcgatttcacaccttccgattccttcaccaccaccaccaccactcaacatcgcagccccactcgcttccctcctccttcttcttcttcctccaccccatccgcttctatgcacgccgataacagtcccactcctaccatcgttactcgtacacgaagcaatcgatctcctaatccagttattgttctccgtggatctgctgctgctccttcttctgatgttgtttccgaaggtttagatcgatctgcttttcagatgtattacgatgatggtactgattctggtcttagacctttaccaccgagtatgactgagtttttgttaggttctggatttgatcgtttgttagatcagatctctcagatcgagcttaacaccaatcggaatcttcgttcttgtgaacatccaccggcttctaaatcggccattgaagctttgcctctgattgaaatcgatccgactcatctcttatcggattctcaatctcattgcgctgtttgcaaagagaatttcgttttgaaatcatctgctcgcgagatgccttgtaatcacatctatcatcctgattgtattcttccttggcttgcgattcgtaactcttgtccggtttgccgtcatgagctaccggcggaggatctcaccgacggaaccggtgctgctttgactgctgttaccgctactgcagaggaagaggaagactcagctgcggggttaacgatttggaggttaccaggtggaggattcgctgtagggagaatccctggtggttggagaggtggagatagaatgatgccggtggtttacacggaggttgatggtggtagactcggtgatgagagacttccgagaagagtagcttggggttcgagaagaggtggaagagatggtggaggtagtagagagagaggtggtggctttgcgggtcggatcatgaggcttttcggatgttttagtggatcatctggatccattgctgctgctgctgctgcatcatccgggtccgggtccagaattcgggttactcgtagaaccaggtcgttctctatgttcagtacggcgtcgtcttcgtcaaggagacgaaattggctagcgtgattactagaattaccaagctctcttctcaggtgaaaactaaacacgaaagaacacactcttcttctgtttaaatttttcctatgttccttattaagtttttgtctatttcagtgtaatgattatattcattcctaaaatttgaatctatgcgagtaaattgatacaaaattaggtgacatagtgtcttcagtggcaaatttaggaggatatgttactgtgagtctgtgactagataagtgagagtgtagatgaattgaagaatgtactctgaaggagattcatagttgttctatttgt

SEQ ID NO: 36705 - protein, 401 aa, Arabidopsis thaliana
  peptide (1)..(401): Ceres Seq. ID no. 13499677
MASGSYWCYSCSRFVWVSDSISCPDCDGGFLELIQEPLDFTPSDSFTTTTTTQHRSPTRFPPPSSSSSTPSASMHADNSPTPTIVTRTRSNRSPNPVIVLRGSAAAPSSDVVSEGLDRSAFQMYYDDGTDSGLRPLPPSMTEFLLGSGFDRLLDQISQIELNTNRNLRSCEHPPASKSAIEALPLIEIDPTHLLSDSQSHCAVCKENFVLKSSAREMPCNHIYHPDCILPWLAIRNSCPVCRHELPAEDLTDGTGAALTAVTATAEEEEDSAAGLTIWRLPGGGFAVGRIPGGWRGGDRMMPVVYTEVDGGRLGDERLPRRVAWGSRRGGRDGGGSRERGGGFAGRIMRLFGCFSGSSGSIAAAAAASSGSGSRIRVTRRTRSFSMFSTASSSSRRRNWLA

SEQ ID NO: 36706 - protein, 328 aa, Arabidopsis thaliana
  peptide (1)..(328): Ceres Seq. ID no. 13499678
MHADNSPTPTIVTRTRSNRSPNPVIVLRGSAAAPSSDVVSEGLDRSAFQMYYDDGTDSGLRPLPPSMTEFLLGSGFDRLLDQISQIELNTNRNLRSCEHPPASKSAIEALPLIEIDPTHLLSDSQSHCAVCKENFVLKSSAREMPCNHIYHPDCILPWLAIRNSCPVCRHELPAEDLTDGTGAALTAVTATAEEEEDSAAGLTIWRLPGGGFAVGRIPGGWRGGDRMMPVVYTEVDGGRLGDERLPRRVAWGSRRGGRDGGGSRERGGGFAGRIMRLFGCFSGSSGSIAAAAAASSGSGSRIRVTRRTRSFSMFSTASSSSRRRNWLA

SEQ ID NO: 36707 - protein, 279 aa, Arabidopsis thaliana
  peptide (1)..(279): Ceres Seq. ID no. 13499679
MYYDDGTDSGLRPLPPSMTEFLLGSGFDRLLDQISQIELNTNRNLRSCEHPPASKSAIEALPLIEIDPTHLLSDSQSHCAVCKENFVLKSSAREMPCNHIYHPDCILPWLAIRNSCPVCRHELPAEDLTDGTGAALTAVTATAEEEEDSAAGLTIWRLPGGGFAVGRIPGGWRGGDRMMPVVYTEVDGGRLGDERLPRRVAWGSRRGGRDGGGSRERGGGFAGRIMRLFGCFSGSSGSIAAAAAASSGSGSRIRVTRRTRSFSMFSTASSSSRRRNWLA

SEQ ID NO: 36708 - DNA, 1232 bp, Arabidopsis thaliana
  misc_feature (1)..(1232): Ceres Seq. ID no. 13489097
  misc_feature (1)..(1232): Ortholog of  Ceres SEQ ID NO 13598741 as cited in SEQ ID NO 62749
  misc_feature (1)..(1232): Ortholog of  Ceres SEQ ID NO 12587535 as cited in SEQ ID NO 64020
  misc_feature (1)..(1232): Ortholog of  Ceres SEQ ID NO 12586366 as cited in SEQ ID NO 68983
attgatataggcgaactaattaataagactttaaaatgtctctctatcactctcttagcattttcctcctcctatctctctgccatggctcttacagtcttcaaccacgtcgagttcctcatctagacgggattctcccaaatggaaacttcgagataacccctctcaaatcaaacatgaagggtcgacaaataatcggggctaactctcttcctcattgggaaatcgccgggcacgtggagctagtctccggtggacctcagcctggaggattctatttccccgttccacgtggagtccacgcggttagactcggaaacttgggcaccatctctcagaacgtgagggtgaagagtggtttggtctactctctaacgttcggagctacgaggacttgtgctcaggatgagaacatcaaagtctctgtgcctggtcaggccaatgagcttccgctccagaccgtctttagctccgacggtggagacacttacgcttgggctttcaaggcaacttctgatgtggttaaggtcactttccataaccctggtgttcaagaagaccgcacgtgtggacctctcttagatgttgtcgcaatcaaggagattcttcctctccggtataccagaggaaacttggtgaaaaatggaggattcgagatcggtccacatgttttcgctaatttctcaaccggaatcttgattccagcaagaatccaagacttcatctctcctcttccgggatggatcgtcgaatcccttaaaccagtgaagtatatcgatagacgtcatttcaaagttccttatggacaaggggccgtcgagctagttgccggaagagaaagcgcaatagctcagatcatccgaaccatcgctggtaaagcctatatgctctcattcgcggttggtgatgcacaaaacggttgccacgggtcgatgatggtggaagcgttcgcaggaagagaaccgtttaagctttcttttatgtcagaaggtaaaggagcgttcaaaacagggcattttaggtttgttgctgattcggatcgaacgaggctaacgttttatagtgcgttttatcatacaaagcttcatgacttcggccatctttgtgggcctgttcttgatagcgttgttgttaccctggcccgttaacaatttgtggcttttaattcttattagactgaatattcgaaacactatactctattcgtaacgaatttgtggttgcactaaaag

SEQ ID NO: 36709 - protein, 370 aa, Arabidopsis thaliana
  peptide (1)..(370): Ceres Seq. ID no. 13489098
MSLYHSLSIFLLLSLCHGSYSLQPRRVPHLDGILPNGNFEITPLKSNMKGRQIIGANSLPHWEIAGHVELVSGGPQPGGFYFPVPRGVHAVRLGNLGTISQNVRVKSGLVYSLTFGATRTCAQDENIKVSVPGQANELPLQTVFSSDGGDTYAWAFKATSDVVKVTFHNPGVQEDRTCGPLLDVVAIKEILPLRYTRGNLVKNGGFEIGPHVFANFSTGILIPARIQDFISPLPGWIVESLKPVKYIDRRHFKVPYGQGAVELVAGRESAIAQIIRTIAGKAYMLSFAVGDAQNGCHGSMMVEAFAGREPFKLSFMSEGKGAFKTGHFRFVADSDRTRLTFYSAFYHTKLHDFGHLCGPVLDSVVVTLAR

SEQ ID NO: 36710 - protein, 323 aa, Arabidopsis thaliana
  peptide (1)..(323): Ceres Seq. ID no. 13489099
MKGRQIIGANSLPHWEIAGHVELVSGGPQPGGFYFPVPRGVHAVRLGNLGTISQNVRVKSGLVYSLTFGATRTCAQDENIKVSVPGQANELPLQTVFSSDGGDTYAWAFKATSDVVKVTFHNPGVQEDRTCGPLLDVVAIKEILPLRYTRGNLVKNGGFEIGPHVFANFSTGILIPARIQDFISPLPGWIVESLKPVKYIDRRHFKVPYGQGAVELVAGRESAIAQIIRTIAGKAYMLSFAVGDAQNGCHGSMMVEAFAGREPFKLSFMSEGKGAFKTGHFRFVADSDRTRLTFYSAFYHTKLHDFGHLCGPVLDSVVVTLAR

SEQ ID NO: 36711 - DNA, 1220 bp, Arabidopsis thaliana
  misc_feature (1)..(1220): Ceres Seq. ID no. 12329420
  misc_feature (1)..(1220): Ortholog of  Ceres SEQ ID NO 13581579 as cited in SEQ ID NO 58361
  misc_feature (1)..(1220): Ortholog of  Ceres SEQ ID NO 13596474 as cited in SEQ ID NO 62169
  misc_feature (1)..(1220): Ortholog of  Ceres SEQ ID NO 13598714 as cited in SEQ ID NO 62656
  misc_feature (1)..(1220): Ortholog of  Ceres SEQ ID NO 13596969 as cited in SEQ ID NO 63375
  misc_feature (1)..(1220): Ortholog of  Ceres SEQ ID NO 13597519 as cited in SEQ ID NO 64759
  misc_feature (1)..(1220): Ortholog of  Ceres SEQ ID NO 13595926 as cited in SEQ ID NO 67778
  misc_feature (1)..(1220): Ortholog of  Ceres SEQ ID NO 13662323 as cited in SEQ ID NO 68305
aacccaacaaattcattctaaatacatttcttttcactcaagaaattaaaatttcgaaaagtttgttaaaatgaatgcacacatgctcaatctccttgtcatagtcatttttgtagtttctttcgatgtccaagcactcagtcctcactactacgaccatacttgtccacaagccgaccacattgtaaccaatgcagtcaagaaagccatgtcaaacgaccaaactgtccctgctgcgcttttgaggatgcatttccacgactgtttcgtcagaggatgtgatggctcagttctcttagactctaaggggaagaacaaagcagagaaagatggacctcctaacatctcactccatgcattttatgtgattgacaatgcaaagaaggcattagaagaacaatgtcccggtatcgtctcttgcgccgacattctttcacttgcggcaagagatgctgtcgctctctcaggagggcctacatgggcagtgccaaaagggagaaaagatggaagaatatcaaaggcaatagaaacaagacaactaccagctcctactttcaacatttctcaattgcgtcaaaattttggccaaagaggcctctctatgcatgatcttgttgctctctctggaggtcatacactaggattcgcccactgttcatcgttccagaataggctccataaattcaacacacaaaaggaggttgacccaacactaaacccctcattcgcagccaggttggagggagtgtgcccggcccataacacggtgaagaatgctggatcgaacatggatggaaccgtgacgtcattcgacaatatctactacaagatgcttatccaaggcaagtcactattctcatccgacgaatcgcttcttgcagtaccctctactaagaaactcgtggccaaatatgcaaattccaacgaagagttcgagagggcttttgtgaaatcgatgatcaagatgagtagtatcagtgggaatggcaatgaggtcagacttaactgcagaagggttcgctagaatctcaatctacgcttccaacatcacgttactactacatttttatgtctttcgttttctttcgtcacattgattacttgtgaatgggcctttctaaagattaaggcagaggttcttgtatcagaattatctatcaatctctcgtgtgtgcttgtataggcatttatttacaagtaataagatcttttctctttct

SEQ ID NO: 36712 - protein, 317 aa, Arabidopsis thaliana
  peptide (1)..(317): Ceres Seq. ID no. 12329421
MNAHMLNLLVIVIFVVSFDVQALSPHYYDHTCPQADHIVTNAVKKAMSNDQTVPAALLRMHFHDCFVRGCDGSVLLDSKGKNKAEKDGPPNISLHAFYVIDNAKKALEEQCPGIVSCADILSLAARDAVALSGGPTWAVPKGRKDGRISKAIETRQLPAPTFNISQLRQNFGQRGLSMHDLVALSGGHTLGFAHCSSFQNRLHKFNTQKEVDPTLNPSFAARLEGVCPAHNTVKNAGSNMDGTVTSFDNIYYKMLIQGKSLFSSDESLLAVPSTKKLVAKYANSNEEFERAFVKSMIKMSSISGNGNEVRLNCRRVR

SEQ ID NO: 36713 - protein, 313 aa, Arabidopsis thaliana
  peptide (1)..(313): Ceres Seq. ID no. 12329422
MLNLLVIVIFVVSFDVQALSPHYYDHTCPQADHIVTNAVKKAMSNDQTVPAALLRMHFHDCFVRGCDGSVLLDSKGKNKAEKDGPPNISLHAFYVIDNAKKALEEQCPGIVSCADILSLAARDAVALSGGPTWAVPKGRKDGRISKAIETRQLPAPTFNISQLRQNFGQRGLSMHDLVALSGGHTLGFAHCSSFQNRLHKFNTQKEVDPTLNPSFAARLEGVCPAHNTVKNAGSNMDGTVTSFDNIYYKMLIQGKSLFSSDESLLAVPSTKKLVAKYANSNEEFERAFVKSMIKMSSISGNGNEVRLNCRRVR

SEQ ID NO: 36714 - protein, 271 aa, Arabidopsis thaliana
  peptide (1)..(271): Ceres Seq. ID no. 12329423
MSNDQTVPAALLRMHFHDCFVRGCDGSVLLDSKGKNKAEKDGPPNISLHAFYVIDNAKKALEEQCPGIVSCADILSLAARDAVALSGGPTWAVPKGRKDGRISKAIETRQLPAPTFNISQLRQNFGQRGLSMHDLVALSGGHTLGFAHCSSFQNRLHKFNTQKEVDPTLNPSFAARLEGVCPAHNTVKNAGSNMDGTVTSFDNIYYKMLIQGKSLFSSDESLLAVPSTKKLVAKYANSNEEFERAFVKSMIKMSSISGNGNEVRLNCRRVR

SEQ ID NO: 36715 - DNA, 1136 bp, Arabidopsis thaliana
  misc_feature (1)..(1136): Ceres Seq. ID no. 12562322
  misc_feature (1)..(1136): Ortholog of  Ceres SEQ ID NO 13654728 as cited in SEQ ID NO 62302
  misc_feature (1)..(1136): Ortholog of  Ceres SEQ ID NO 13597134 as cited in SEQ ID NO 64501
  misc_feature (1)..(1136): Ortholog of  Ceres SEQ ID NO 15174333 as cited in SEQ ID NO 0
  misc_feature (1)..(1136): Ortholog of  Ceres SEQ ID NO 15179047 as cited in SEQ ID NO 0
aattagaatctttcccgacaaagaaatagctctaagcacgacctttttcttcctaagtcgccggcgagacaaaaaaaacataatcccgacggttacacgtaccggataattgtatttaagttgaatccgctttgtactttcctcacagccaaagatttttccttactaggattttcattttctcttctgttttcgtttcaaattcagaaaatcttccgtttcaatccggtttatatcggtttttagcaatgtcgatggtaactgtcaaagttagcaacgtttctcttgaagcaacagaaagagatctcaaggagttcttctctttttccggcgatattgcttacctcgagactcaaagcgagaatgatggttctaaattagcatatgtcacattcaaggatttacaaggagctgaaaccgcagttctcctcaccggatcgacgattgttgattcatcggtcacagttacaatgtcaccagattaccaactacctcctgatgctttagcttccattgaatcattgaaagagagcaataaatcatcatctcctacgcgagaagatgtatcggtatttagaaaagctgaagatgttgtaagtggtatgatttcaaaagggtttgttttaggtaaagacgctatagctaaagcgaagagtcttgatgagaagcatcagttgacatcaacagcttcagctagagttacatctttcgacaaaagaatcggattcacggagaaaatcaacaccgggactacagttgtgagcgaaaaagttaaagaagttgatcagaagtttcaagtcacagagaaaacaaaatcagcaatagctgctgctgagcagacagtgagcaatgctggttctgctataatgaaaaaccggtatgttttaaccggtgccacgtgggttacgggtgcgtttaacagagtgagtaaagctgctgaagaagttggacaaaaggcgaaagagaaagttggtttggctgaggaagaagaagaagagaagaagaaagtggttgatgaagttgctatagttcatctgactgaatcaccaaaggctttagaccaatcagaacaagattcaaaactccctgaatcaaaatcacagccacacaaggagcttaacgcaagtgttgtttga

SEQ ID NO: 36716 - protein, 295 aa, Arabidopsis thaliana
  peptide (1)..(295): Ceres Seq. ID no. 12562323
MSMVTVKVSNVSLEATERDLKEFFSFSGDIAYLETQSENDGSKLAYVTFKDLQGAETAVLLTGSTIVDSSVTVTMSPDYQLPPDALASIESLKESNKSSSPTREDVSVFRKAEDVVSGMISKGFVLGKDAIAKAKSLDEKHQLTSTASARVTSFDKRIGFTEKINTGTTVVSEKVKEVDQKFQVTEKTKSAIAAAEQTVSNAGSAIMKNRYVLTGATWVTGAFNRVSKAAEEVGQKAKEKVGLAEEEEEEKKKVVDEVAIVHLTESPKALDQSEQDSKLPESKSQPHKELNASVV

SEQ ID NO: 36717 - protein, 293 aa, Arabidopsis thaliana
  peptide (1)..(293): Ceres Seq. ID no. 12562324
MVTVKVSNVSLEATERDLKEFFSFSGDIAYLETQSENDGSKLAYVTFKDLQGAETAVLLTGSTIVDSSVTVTMSPDYQLPPDALASIESLKESNKSSSPTREDVSVFRKAEDVVSGMISKGFVLGKDAIAKAKSLDEKHQLTSTASARVTSFDKRIGFTEKINTGTTVVSEKVKEVDQKFQVTEKTKSAIAAAEQTVSNAGSAIMKNRYVLTGATWVTGAFNRVSKAAEEVGQKAKEKVGLAEEEEEEKKKVVDEVAIVHLTESPKALDQSEQDSKLPESKSQPHKELNASVV

SEQ ID NO: 36718 - protein, 221 aa, Arabidopsis thaliana
  peptide (1)..(221): Ceres Seq. ID no. 12562325
MSPDYQLPPDALASIESLKESNKSSSPTREDVSVFRKAEDVVSGMISKGFVLGKDAIAKAKSLDEKHQLTSTASARVTSFDKRIGFTEKINTGTTVVSEKVKEVDQKFQVTEKTKSAIAAAEQTVSNAGSAIMKNRYVLTGATWVTGAFNRVSKAAEEVGQKAKEKVGLAEEEEEEKKKVVDEVAIVHLTESPKALDQSEQDSKLPESKSQPHKELNASVV

SEQ ID NO: 36719 - DNA, 3042 bp, Arabidopsis thaliana
  misc_feature (1)..(3042): Ceres Seq. ID no. 12489473
  misc_feature (1)..(3042): Ortholog of  Ceres SEQ ID NO 15225530 as cited in SEQ ID NO 55089
aaacaaaaaaaaaaattcacccaaaaaaaaaaaacctcgttgccttcttcttcgccgttacagtcctctttctttcttcaattcgccgtcaaaatcttctctttctcttcccccgccggtccttcaccaatcctctgatctctctacacacgaacctttgattttgaccaacgtcgatgcatgttcatgactagtctcttcctcaatccttcaatttcatcaattcacgtcgatttcgtatccgattcgttgttctagctctttgtgtggtgttagggttttaagattttggaattggggtttggagtttgtgatgtttgaagtcaaaatggggtcaaagatgtgcatgaacgcttcatgtggtacgacttctactgttgaatggaagaaaggttggcctcttcgatctggtcttctcgctgatctctgttatcgttgcggatctgcgtatgagagttctctattctgtgaacaatttcataaggaccaatctggttggagggaatgctatttgtgtagcaagagactacattgtggatgcattgcttctaaggtaacgattgagttaatggactatggtggtgttggttgtagtacatgtgcttgctgccatcaactcaatttgaacacaaggggtgagaatccaggtgtttttagcagattgccaatgaaaacgttagctgataggcaacatgtaaatggcgaaagcggaggaagaaacgaaggcgatctcttttctcagccactagtcatgggcggagataaaagggaagagttcatgcctcaccgtgggtttggtaagctaatgagtccagaaagtacaaccaccgggcataggctggatgctgctggggaaatgcatgaatcatcacctttacagccatctttaaatatgggtttggctgtgaatccgtttagcccatcttttgcaaccgaggctgtcgagggaatgaaacacatcagtccttctcagtccaacatggtccattgctctgcttctaatatactgcaaaagccatcaagacctgctatttcaactcctcctgtggctagtaaatccgctcaggcgcggattggaaggcctcctgtcgaagggcgagggagaggccacttgcttccgcggtattggccaaaatatacggataaagaggttcagcagatctctggaaatttgaatttgaacattgtacctctctttgagaaaactcttagtgccagtgatgctggtcgcattggtcgtctagttcttccaaaagcctgtgcagaggcatattttcctccgattagtcaatccgaaggcattcctttgaaaatccaagatgtgaggggtagggagtggacgttccagttcagatattggcccaataacaatagtagaatgtatgttttagaaggtgtcactccatgcatacagtccatgatgctacaggctggtgatacagtaactttcagtcgggttgatcctggcggaaaactaatcatgggttccaggaaggcagctaatgctggagacatgcagggttgtgggctcaccaacggaacatcaactgaggacacatcatcgtctggtgtaacagaaaacccaccctccataaatggttcctcgtgtatttcactaataccgaaagagttgaatggtatgcctgagaatttgaacagtgagactaacgggggcaggataggtgatgatcctacacgagttaaagagaagaagagaactcgaaccattggtgcaaaaaataagagacttcttttgcatagtgaagaatctatggagctgagactcacttgggaagaagctcaggacttgcttcgtccctctcctagtgtaaagcctaccatcgttgtcattgaggagcaagaaattgaagaatatgacgaacctcctgtctttggaaagaggactatagtcactacaaaaccttcaggtgaacaggaacgatgggcaacttgcgacgactgctctaaatggagaaggttacctgtagatgctcttctttcctttaaatggacatgtatagacaatgtttgggatgtgagtaggtgttcatgttctgcaccggaggagagtctgaaggaacttgagaatgttcttaaagtaggaagagagcacaagaagagaagaactggggaaagccaggcagcaaaaagtcagcaagaaccgtgtggtttggacgcactggcgagtgcagcagtcttaggagacacaataggcgagccagaggtagcgaccacgaccagacatccaaggcacagggctggatgctcttgcatcgtgtgcattcagccaccaagtgggaaaggtaggcacaagcctacatgtggctgcactgtgtgtagcaccgtgaagagaaggttcaagacgcttatgatgaggaggaagaagaagcagttggagcgcgatgtaacagcagcagaagataagaagaagaaggacatggaactggctgagtctgataagagtaaggaggagaaggaagtgaacacagcgagaatagacctgaacagtgatccatacaataaagaagatgttgaagctgttgcggtggagaaagaagagagtcgaaaaagagcaataggacagtgttcgggcgtggtggctcaagacgccagtgatgttttaggagttacagagttagaaggagagggtaagaatgttcgtgaagagccgagagtttcaagctgatatggaaggaaaaagggaaagggtaaaagccaaagtcatagccagttttattaatatgctgagaccaagagtaggagaagaagaagagaaagagagagagagagagagagagagaagtacagttttgtgtttgattctgtcatagttgtaggaaaaataagtttctggttctaaacagcgacaatgtcccatcttttgttttttgtttttgtttttgtatttttatggtatcgtgttgagtttggggtttatagtatgtctccattaatctaggttttgttgtagaaggcaaatggagctttgtgcttggtgatgaaacagttgagttgatttttttttttgtaattgttttcaac

SEQ ID NO: 36720 - protein, 790 aa, Arabidopsis thaliana
  peptide (1)..(790): Ceres Seq. ID no. 12489474
MFEVKMGSKMCMNASCGTTSTVEWKKGWPLRSGLLADLCYRCGSAYESSLFCEQFHKDQSGWRECYLCSKRLHCGCIASKVTIELMDYGGVGCSTCACCHQLNLNTRGENPGVFSRLPMKTLADRQHVNGESGGRNEGDLFSQPLVMGGDKREEFMPHRGFGKLMSPESTTTGHRLDAAGEMHESSPLQPSLNMGLAVNPFSPSFATEAVEGMKHISPSQSNMVHCSASNILQKPSRPAISTPPVASKSAQARIGRPPVEGRGRGHLLPRYWPKYTDKEVQQISGNLNLNIVPLFEKTLSASDAGRIGRLVLPKACAEAYFPPISQSEGIPLKIQDVRGREWTFQFRYWPNNNSRMYVLEGVTPCIQSMMLQAGDTVTFSRVDPGGKLIMGSRKAANAGDMQGCGLTNGTSTEDTSSSGVTENPPSINGSSCISLIPKELNGMPENLNSETNGGRIGDDPTRVKEKKRTRTIGAKNKRLLLHSEESMELRLTWEEAQDLLRPSPSVKPTIVVIEEQEIEEYDEPPVFGKRTIVTTKPSGEQERWATCDDCSKWRRLPVDALLSFKWTCIDNVWDVSRCSCSAPEESLKELENVLKVGREHKKRRTGESQAAKSQQEPCGLDALASAAVLGDTIGEPEVATTTRHPRHRAGCSCIVCIQPPSGKGRHKPTCGCTVCSTVKRRFKTLMMRRKKKQLERDVTAAEDKKKKDMELAESDKSKEEKEVNTARIDLNSDPYNKEDVEAVAVEKEESRKRAIGQCSGVVAQDASDVLGVTELEGEGKNVREEPRVSS

SEQ ID NO: 36721 - protein, 785 aa, Arabidopsis thaliana
  peptide (1)..(785): Ceres Seq. ID no. 12489475
MGSKMCMNASCGTTSTVEWKKGWPLRSGLLADLCYRCGSAYESSLFCEQFHKDQSGWRECYLCSKRLHCGCIASKVTIELMDYGGVGCSTCACCHQLNLNTRGENPGVFSRLPMKTLADRQHVNGESGGRNEGDLFSQPLVMGGDKREEFMPHRGFGKLMSPESTTTGHRLDAAGEMHESSPLQPSLNMGLAVNPFSPSFATEAVEGMKHISPSQSNMVHCSASNILQKPSRPAISTPPVASKSAQARIGRPPVEGRGRGHLLPRYWPKYTDKEVQQISGNLNLNIVPLFEKTLSASDAGRIGRLVLPKACAEAYFPPISQSEGIPLKIQDVRGREWTFQFRYWPNNNSRMYVLEGVTPCIQSMMLQAGDTVTFSRVDPGGKLIMGSRKAANAGDMQGCGLTNGTSTEDTSSSGVTENPPSINGSSCISLIPKELNGMPENLNSETNGGRIGDDPTRVKEKKRTRTIGAKNKRLLLHSEESMELRLTWEEAQDLLRPSPSVKPTIVVIEEQEIEEYDEPPVFGKRTIVTTKPSGEQERWATCDDCSKWRRLPVDALLSFKWTCIDNVWDVSRCSCSAPEESLKELENVLKVGREHKKRRTGESQAAKSQQEPCGLDALASAAVLGDTIGEPEVATTTRHPRHRAGCSCIVCIQPPSGKGRHKPTCGCTVCSTVKRRFKTLMMRRKKKQLERDVTAAEDKKKKDMELAESDKSKEEKEVNTARIDLNSDPYNKEDVEAVAVEKEESRKRAIGQCSGVVAQDASDVLGVTELEGEGKNVREEPRVSS

SEQ ID NO: 36722 - protein, 781 aa, Arabidopsis thaliana
  peptide (1)..(781): Ceres Seq. ID no. 12489476
MCMNASCGTTSTVEWKKGWPLRSGLLADLCYRCGSAYESSLFCEQFHKDQSGWRECYLCSKRLHCGCIASKVTIELMDYGGVGCSTCACCHQLNLNTRGENPGVFSRLPMKTLADRQHVNGESGGRNEGDLFSQPLVMGGDKREEFMPHRGFGKLMSPESTTTGHRLDAAGEMHESSPLQPSLNMGLAVNPFSPSFATEAVEGMKHISPSQSNMVHCSASNILQKPSRPAISTPPVASKSAQARIGRPPVEGRGRGHLLPRYWPKYTDKEVQQISGNLNLNIVPLFEKTLSASDAGRIGRLVLPKACAEAYFPPISQSEGIPLKIQDVRGREWTFQFRYWPNNNSRMYVLEGVTPCIQSMMLQAGDTVTFSRVDPGGKLIMGSRKAANAGDMQGCGLTNGTSTEDTSSSGVTENPPSINGSSCISLIPKELNGMPENLNSETNGGRIGDDPTRVKEKKRTRTIGAKNKRLLLHSEESMELRLTWEEAQDLLRPSPSVKPTIVVIEEQEIEEYDEPPVFGKRTIVTTKPSGEQERWATCDDCSKWRRLPVDALLSFKWTCIDNVWDVSRCSCSAPEESLKELENVLKVGREHKKRRTGESQAAKSQQEPCGLDALASAAVLGDTIGEPEVATTTRHPRHRAGCSCIVCIQPPSGKGRHKPTCGCTVCSTVKRRFKTLMMRRKKKQLERDVTAAEDKKKKDMELAESDKSKEEKEVNTARIDLNSDPYNKEDVEAVAVEKEESRKRAIGQCSGVVAQDASDVLGVTELEGEGKNVREEPRVSS

SEQ ID NO: 36723 - DNA, 1020 bp, Arabidopsis thaliana; identical to SEQ ID NO: 36124
  misc_feature (1)..(1020): Ceres Seq. ID no. 12562601
  misc_feature (1)..(1020): Ortholog of  Ceres SEQ ID NO 12598739 as cited in SEQ ID NO 64558
  misc_feature (1)..(1020): Ortholog of  Ceres SEQ ID NO 13586862 as cited in SEQ ID NO 0

SEQ ID NO: 36724 - protein, 223 aa, Arabidopsis thaliana; identical to SEQ ID NO: 36125
  peptide (1)..(223): Ceres Seq. ID no. 12562602

SEQ ID NO: 36725 - protein, 189 aa, Arabidopsis thaliana; identical to SEQ ID NO: 36126
  peptide (1)..(189): Ceres Seq. ID no. 12562603

SEQ ID NO: 36726 - protein, 135 aa, Arabidopsis thaliana; identical to SEQ ID NO: 22828
  peptide (1)..(135): Ceres Seq. ID no. 12562604

SEQ ID NO: 36727 - DNA, 779 bp, Arabidopsis thaliana
  misc_feature (1)..(779): Ceres Seq. ID no. 12580269
  misc_feature (1)..(779): Ortholog of  Ceres SEQ ID NO 13595763 as cited in SEQ ID NO 57864
aagaaattcgatttcgatgcgtataatctgtcttccgctttttttttttggttttgaaatcgacaaccttttttttgcttgttgggttaaattcgtatatcatcaattttgcgatgagttttcacttttccaatcgaaatagcaaatgggcattagctaatttcctgaattgtgagtttttgtgttacgctgtgtccttgattcatataagctattgcaaagaggataaatgataaagccttcagctttacaacataattcacttttactcactagagtttagaaattcaccttctttctctgtttcaggagttacaagacatcacaatgttttcgatatgtgttatttaaagttcattgtggatctcaggtttgacaagattggataaaagcagccatggcaagtctgataatgactacaccattctcaggttctgtcactacatgtaagaagacaaataacctgtctgttcagagagcctttaaggtgacttgtatgcagacagagaaaccattagaggagctatacaatgttaaagtggaacggaaagtttcacagaaacggttggaggaacttggggtttcgagatggtcagtttggaagacagggaaatgcaaattgccatgggattggcaggtggatcagttggtttacattgaacaaggagaggttcgagttgttcccgaaggaagcaagaggtatatgcagtttttagctggagatcttgttcggtatccgtacttcctctggttatatcttatataatgactttgattcc

SEQ ID NO: 36728 - protein, 122 aa, Arabidopsis thaliana
  peptide (1)..(122): Ceres Seq. ID no. 12580270
MASLIMTTPFSGSVTTCKKTNNLSVQRAFKVTCMQTEKPLEELYNVKVERKVSQKRLEELGVSRWSVWKTGKCKLPWDWQVDQLVYIEQGEVRVVPEGSKRYMQFLAGDLVRYPYFLWLYLI

SEQ ID NO: 36729 - protein, 117 aa, Arabidopsis thaliana
  peptide (1)..(117): Ceres Seq. ID no. 12580271
MTTPFSGSVTTCKKTNNLSVQRAFKVTCMQTEKPLEELYNVKVERKVSQKRLEELGVSRWSVWKTGKCKLPWDWQVDQLVYIEQGEVRVVPEGSKRYMQFLAGDLVRYPYFLWLYLI

SEQ ID NO: 36730 - protein, 89 aa, Arabidopsis thaliana
  peptide (1)..(89): Ceres Seq. ID no. 12580272
MQTEKPLEELYNVKVERKVSQKRLEELGVSRWSVWKTGKCKLPWDWQVDQLVYIEQGEVRVVPEGSKRYMQFLAGDLVRYPYFLWLYLI

SEQ ID NO: 36731 - DNA, 1499 bp, Arabidopsis thaliana
  misc_feature (1)..(1499): Ceres Seq. ID no. 12340515
  misc_feature (1)..(1499): Ortholog of  Ceres SEQ ID NO 13597475 as cited in SEQ ID NO 65105
  misc_feature (1)..(1499): Ortholog of  Ceres SEQ ID NO 14301761 as cited in SEQ ID NO 66790
attagaagttcagaaatactgtttataaatacaaatccagagtcagagatccattcgatagcactttcctctctttctctcatcgtaaaaccgttcttcgttttttctatttctctcgtctctttcttctacccagatcactgatcaaccgtgaattttactctactctttcatcaattttactgtgtttaattcataaaacaaaacaaacgatcgatttttgtttttttttggggatgaagatcagaagcaaaagcaaaggctatcgtcaagagatcaaatcaacttgcaccgactccaacactctgttctcaaaagatgtggttgcaacttcggagcttttttcatctgtgatatcgtagcgtgtgaaagacggataattctacagagacaatgcatcatcccattcggtcagaagaaaataaagtcaaacaaaaatggcggagaaaaagagagtcaagtacttcattgttgatgcattcgctgaatctgccttcaaagggaatccagctgctgtttgctttctagaagacgataacgagagagacgacgcgtggcttcagtctcttgccaccgagttcaatatctccgagacttgtttcctcactccgatcatcggagacttgcctcgcttccgtctccgttggttcactccagtcgctgaggtttccgtgttttcttttggttttggaattcggaattgttcggttgacttgttatcattgacttgatagatcctgataactagaacttgtactcattcactggctcttgtgaatctctctttgctttgctgttattgtgcaggtggatttgtgtggtcatgcaactttagcatctgctcacgttctcttctcaactggtttggttggttcagagacagttgagttcgacacattatcagggattctaacagctaaacatctcaaaaatgatgatgatggagaagaatcaagtatcgaattggatttccctgttgttccaacatatgaagtcaactacattgatgatgatctctctttgttctccaaagccttgaatggagctaccattcttgatgtcaaagccacaaagaaagacctcctcgttgtgctttcatcttgggaagctgttattgatttgaagccaagattagatgagatatcgaaatgcccttgtgaaggaatgatggtgactgccgctgcttctgatggatctacttatgatttctgtagtcgctactttgccccgagattcggaatcaatgaggaccctgttactggaagtgctcattgtgctttagctcattactggagcctcaggatgaacaagtgtgatttcttcgcctaccaggcttcaagcagaggaggaacgttgaaggtgcacctggacaaagagaagcagagggttctactgagaggcaaagcagtcactgttatggaaggttatgtcttagtgtgattttggctatgatgaaaattcaggctcttgtaaacgatgaaattaataaaagattccat

SEQ ID NO: 36732 - protein, 97 aa, Arabidopsis thaliana
  peptide (1)..(97): Ceres Seq. ID no. 12340516
MAEKKRVKYFIVDAFAESAFKGNPAAVCFLEDDNERDDAWLQSLATEFNISETCFLTPIIGDLPRFRLRWFTPVAEVSVFSFGFGIRNCSVDLLSLT

SEQ ID NO: 36733 - protein, 91 aa, Arabidopsis thaliana
  peptide (1)..(91): Ceres Seq. ID no. 12340517
MMVTAAASDGSTYDFCSRYFAPRFGINEDPVTGSAHCALAHYWSLRMNKCDFFAYQASSRGGTLKVHLDKEKQRVLLRGKAVTVMEGYVLV

SEQ ID NO: 36734 - protein, 90 aa, Arabidopsis thaliana
  peptide (1)..(90): Ceres Seq. ID no. 12340518
MVTAAASDGSTYDFCSRYFAPRFGINEDPVTGSAHCALAHYWSLRMNKCDFFAYQASSRGGTLKVHLDKEKQRVLLRGKAVTVMEGYVLV

SEQ ID NO: 36735 - DNA, 1259 bp, Arabidopsis thaliana; identical to SEQ ID NO: 35122
  misc_feature (1)..(1259): Ceres Seq. ID no. 13489103
  misc_feature (1)..(1259): Ortholog of  Ceres SEQ ID NO 15225196 as cited in SEQ ID NO 63947

SEQ ID NO: 36736 - protein, 346 aa, Arabidopsis thaliana; identical to SEQ ID NO: 35123
  peptide (1)..(346): Ceres Seq. ID no. 13489104

SEQ ID NO: 36737 - protein, 314 aa, Arabidopsis thaliana; identical to SEQ ID NO: 35124
  peptide (1)..(314): Ceres Seq. ID no. 13489105

SEQ ID NO: 36738 - DNA, 1386 bp, Arabidopsis thaliana
  misc_feature (1)..(1386): Ceres Seq. ID no. 12337134
  misc_feature (1)..(1386): Ortholog of  Ceres SEQ ID NO 13658257 as cited in SEQ ID NO 66654
actggtggtaatatcgctggcgtttcgcaagtatcaccgggaattgcaaagaagcagaggaccatgtacggagacgctacaaactggaatgaagatgagtatagagaatcaattttgaaggagcgagagatagagacacgcaccgtcttcagaaccgcctgggctcctccggcgagaatctctaatccagacgcatttgttgtagcctccagcgatggaactttagctttccattcactgaactcgcttgtgtctcaatcggcgagttttggctactcgaaaggtcaagatgttatggtggctgaacctgagagagtggttagggcacacgaaggtcctgcttatgatgttaagttctatggtgaagacgaagatgctttgctacttagttgtggtgatgatggtagagttaggggatggaaatggagagaatttgctgaatcagatgtgtctcttcatttgaaagagaatcatctgaagccattgcttgaactgattaatccacaacacaaaggtccttggggtgcgctttcaccgatgcctgagatcaatgccatgtctgttgatcctcagtcaggaagtgtatttacagcagctggtgattcttgcgcatattgttgggacgtggagagtggtaagattaaaatgacctttaaaggtcattcagactatttgcatactgtagtttctcgtagttctgcaagtcagatattgacgggttcagaggatgggactgcgagaatctgggattgcaaaacgggaaaatgtgttaaagtaattggttcccaggataaaaagtcccgccttcgcgttagttctatggcccttgatgggagtgaaagctggttggtttgtggacagggcaaaaatttagctttatggaatcttcccgcctcagaatgcgtacaaacaatacccatccctgcacatgtacaggatgtgatgtttgatgaaaagcaaattttgactgtaggagcagaaccacttctaagacgtttcgacttaaatggagctttgctttctcaaattcactgtgctccttgttcagtattttccatttccttgcatccagcaggagtagttgctgtgggaggttatggaggtattgttgatgtcatctctcaatttggaagccatctctgcacatttcgtagcagttcattgtaaaactccttacagtttcttgatttggctcgataccctaaagaggtaccgaaatgtgtcagtcagattattgcagaggttaagaaaccttttctttgtttttcttaggatcttgctcctgactaaagaccaattagttgtttggttaagtgtaattggtttgtggttccgtagttgctatcaaatttgaaccattaaaatgacattggaccggtttagtct

SEQ ID NO: 36739 - protein, 388 aa, Arabidopsis thaliana
  peptide (1)..(388): Ceres Seq. ID no. 12337135
TGGNIAGVSQVSPGIAKKQRTMYGDATNWNEDEYRESILKEREIETRTVFRTAWAPPARISNPDAFVVASSDGTLAFHSLNSLVSQSASFGYSKGQDVMVAEPERVVRAHEGPAYDVKFYGEDEDALLLSCGDDGRVRGWKWREFAESDVSLHLKENHLKPLLELINPQHKGPWGALSPMPEINAMSVDPQSGSVFTAAGDSCAYCWDVESGKIKMTFKGHSDYLHTVVSRSSASQILTGSEDGTARIWDCKTGKCVKVIGSQDKKSRLRVSSMALDGSESWLVCGQGKNLALWNLPASECVQTIPIPAHVQDVMFDEKQILTVGAEPLLRRFDLNGALLSQIHCAPCSVFSISLHPAGVVAVGGYGGIVDVISQFGSHLCTFRSSSL

SEQ ID NO: 36740 - protein, 367 aa, Arabidopsis thaliana
  peptide (1)..(367): Ceres Seq. ID no. 12337136
MYGDATNWNEDEYRESILKEREIETRTVFRTAWAPPARISNPDAFVVASSDGTLAFHSLNSLVSQSASFGYSKGQDVMVAEPERVVRAHEGPAYDVKFYGEDEDALLLSCGDDGRVRGWKWREFAESDVSLHLKENHLKPLLELINPQHKGPWGALSPMPEINAMSVDPQSGSVFTAAGDSCAYCWDVESGKIKMTFKGHSDYLHTVVSRSSASQILTGSEDGTARIWDCKTGKCVKVIGSQDKKSRLRVSSMALDGSESWLVCGQGKNLALWNLPASECVQTIPIPAHVQDVMFDEKQILTVGAEPLLRRFDLNGALLSQIHCAPCSVFSISLHPAGVVAVGGYGGIVDVISQFGSHLCTFRSSSL

SEQ ID NO: 36741 - protein, 290 aa, Arabidopsis thaliana
  peptide (1)..(290): Ceres Seq. ID no. 12337137
MVAEPERVVRAHEGPAYDVKFYGEDEDALLLSCGDDGRVRGWKWREFAESDVSLHLKENHLKPLLELINPQHKGPWGALSPMPEINAMSVDPQSGSVFTAAGDSCAYCWDVESGKIKMTFKGHSDYLHTVVSRSSASQILTGSEDGTARIWDCKTGKCVKVIGSQDKKSRLRVSSMALDGSESWLVCGQGKNLALWNLPASECVQTIPIPAHVQDVMFDEKQILTVGAEPLLRRFDLNGALLSQIHCAPCSVFSISLHPAGVVAVGGYGGIVDVISQFGSHLCTFRSSSL

SEQ ID NO: 36742 - DNA, 1592 bp, Arabidopsis thaliana
  misc_feature (1)..(1592): Ceres Seq. ID no. 12489485
  misc_feature (1)..(1592): Ortholog of  Ceres SEQ ID NO 15176273 as cited in SEQ ID NO 58534
aatttatagatttgcttgggatcaattagctcgcatgtggattttcatatatatacaataccatatgaagccaaatatattataaagaaagaaatcttttttagattttgagctctggaatggagaaaagtatcaatggatcatgcagactcatcaagagactcgtgattatactttcttgtctttcatattcctttgttcgatcagactttacagagagaacaaatatcaattatgtatcagctgtgggagatcccgggatgagaaacgataacttaagggtggctatagaagcttggaaccaatgcaacgaggtcggtgaagaagctacaaacatgggaagccctcgaatggcagattgcttcgatatcgataactctagctttcccgtgaagataatccacaaagtcgacgaaagagacaacaggcttggggtaggaaatggaacctacggaggaataagcgctggagacaacgcagatatctacgcagcgcaaaaggaggtatacttaggaaacaaatgtcaagttgtggacaagccaaatccatggcagttttggatgataatgctaaagaacggtaatacggatactttagccgcaatttgtcccgaaaacgggaaaaaggcgaaaccatttcctcctacggggaggtttccatgttttgggaaaggatgtatgaacatgccatcgatgcatcatgagtacacaagcttggttgataacgaagaaggacatatgagtgggagtttttatgggacttgggacttggataacgaccaaaaagatccggttggtaataattcgtattataaggtgaaatgggagaagaagattgggggaaatgagagttgggtttttcatcatttgttgaagacttcttctaagtatccatggttgatgctttatctacgcgctgatgcttctcgaggtttctctggtggttatcattacgacactagagggatgatgaagatgctagagattattaaaggaggcggttcagggagccaattttacctaatggacatgggaagttgctggaaaaacgacggaagagactgcgacggcgacgtcacaaccgacgttacaaggtacagcgaaatgataatcaacccgggggcaaccgccgtttgcacccgcaaccgcctaggcgcttgtccgccagagcatacttttccaaacgggactaaagttcacaggacggacaaggagaagttccctttcgaagcgtatcactattactgcgttccgggaaacgcgcgttttgcggaatctccgtacgaggtttgtgatccgtacagtaatccacaaccgcaggagattctgcagatcttgcctcatccagtgtgggaacagtttgggtatccgacaaagaaaggacaaggttggattggagatccaagaacttgggaacttgatgtcggaaaactctctcagtcactcttcttttaccaggatccagggacgaaaccggtggagagacattggtcgtcgatagatttaggaactgaaatatatatgagtaagaatcaaattgctgaatggactgtaactgatttcgacattgttataccaaatgccgatatttaa

SEQ ID NO: 36743 - protein, 490 aa, Arabidopsis thaliana
  peptide (1)..(490): Ceres Seq. ID no. 12489486
MEKSINGSCRLIKRLVIILSCLSYSFVRSDFTERTNINYVSAVGDPGMRNDNLRVAIEAWNQCNEVGEEATNMGSPRMADCFDIDNSSFPVKIIHKVDERDNRLGVGNGTYGGISAGDNADIYAAQKEVYLGNKCQVVDKPNPWQFWMIMLKNGNTDTLAAICPENGKKAKPFPPTGRFPCFGKGCMNMPSMHHEYTSLVDNEEGHMSGSFYGTWDLDNDQKDPVGNNSYYKVKWEKKIGGNESWVFHHLLKTSSKYPWLMLYLRADASRGFSGGYHYDTRGMMKMLEIIKGGGSGSQFYLMDMGSCWKNDGRDCDGDVTTDVTRYSEMIINPGATAVCTRNRLGACPPEHTFPNGTKVHRTDKEKFPFEAYHYYCVPGNARFAESPYEVCDPYSNPQPQEILQILPHPVWEQFGYPTKKGQGWIGDPRTWELDVGKLSQSLFFYQDPGTKPVERHWSSIDLGTEIYMSKNQIAEWTVTDFDIVIPNADI

SEQ ID NO: 36744 - protein, 443 aa, Arabidopsis thaliana
  peptide (1)..(443): Ceres Seq. ID no. 12489487
MRNDNLRVAIEAWNQCNEVGEEATNMGSPRMADCFDIDNSSFPVKIIHKVDERDNRLGVGNGTYGGISAGDNADIYAAQKEVYLGNKCQVVDKPNPWQFWMIMLKNGNTDTLAAICPENGKKAKPFPPTGRFPCFGKGCMNMPSMHHEYTSLVDNEEGHMSGSFYGTWDLDNDQKDPVGNNSYYKVKWEKKIGGNESWVFHHLLKTSSKYPWLMLYLRADASRGFSGGYHYDTRGMMKMLEIIKGGGSGSQFYLMDMGSCWKNDGRDCDGDVTTDVTRYSEMIINPGATAVCTRNRLGACPPEHTFPNGTKVHRTDKEKFPFEAYHYYCVPGNARFAESPYEVCDPYSNPQPQEILQILPHPVWEQFGYPTKKGQGWIGDPRTWELDVGKLSQSLFFYQDPGTKPVERHWSSIDLGTEIYMSKNQIAEWTVTDFDIVIPNADI

SEQ ID NO: 36745 - protein, 418 aa, Arabidopsis thaliana
  peptide (1)..(418): Ceres Seq. ID no. 12489488
MGSPRMADCFDIDNSSFPVKIIHKVDERDNRLGVGNGTYGGISAGDNADIYAAQKEVYLGNKCQVVDKPNPWQFWMIMLKNGNTDTLAAICPENGKKAKPFPPTGRFPCFGKGCMNMPSMHHEYTSLVDNEEGHMSGSFYGTWDLDNDQKDPVGNNSYYKVKWEKKIGGNESWVFHHLLKTSSKYPWLMLYLRADASRGFSGGYHYDTRGMMKMLEIIKGGGSGSQFYLMDMGSCWKNDGRDCDGDVTTDVTRYSEMIINPGATAVCTRNRLGACPPEHTFPNGTKVHRTDKEKFPFEAYHYYCVPGNARFAESPYEVCDPYSNPQPQEILQILPHPVWEQFGYPTKKGQGWIGDPRTWELDVGKLSQSLFFYQDPGTKPVERHWSSIDLGTEIYMSKNQIAEWTVTDFDIVIPNADI

SEQ ID NO: 36746 - DNA, 1213 bp, Arabidopsis thaliana
  misc_feature (1)..(1213): Ceres Seq. ID no. 12395310
  misc_feature (1)..(1213): Ortholog of  Ceres SEQ ID NO 14303355 as cited in SEQ ID NO 59746
  misc_feature (1)..(1213): Ortholog of  Ceres SEQ ID NO 14302415 as cited in SEQ ID NO 62781
aacaacatctttcacacaacaattcacacaatttctcgtttttttttgtttatcatcaaaagttttaatctaaattacgtatcaaattccgagcaagatgactattcttgttgaacattttgttcctgattcaagagtggatgaaaagaaagtgatagaggagagggataatgaattggtgttggatggaggttttgtggttccaaaatcaaaggaaactgatgcattcgatgctcctgatatgaatttcttgggccattccttcagggattatgagaatgatgaaagcgagagacaacaaggtgttgaggaattttacaggatgcaacacattcaccagacctatgactttgtgaagaagatgaggaaagagtatggaaaacttaacaagatggaaatgagtatatgggaatgttgtgagttattgaacaatgttgttgatgaaagcgatccggatcttgatgagcctcaaattcaacaccttctccaaaccgctgaagccattcgaagggactatcccgacgaagattggctccatctcactgccctaatccatgatcttggcaaggttctccttctgccagaattcggtggtcttccccagtgggctgtcgttggcgatacatttccagttggatgtaccttcgactcagccaatattcaccacaagtatttcaaaggaaaccatgatatcaacaacccaaagtacaacacaaaaaatggagtttacactgaaggatgtggtttagacaatgttctcatgtcatggggtcatgacgactacatgtatttggtggctaagaagaatggcacgacccttcctcacgctggtctcttcattattcgatatcattccttttatccattgcacaaggcaggagcctacacacacttgatgaacgatgaggacagagatgatctcaagtggctccatgtcttcaataaatatgacctatacagtaagagcaaagttctggtagatgtcgaacaagtgaagccttactacatttcactcatcaacaagtattttccggcgaaactaaaatggtgagataaagctacgagtcaattaattaactatcttttatgaggagaacgagatcgaaggttaacgagttttctattgtatacaacggaagataaatctatctaataaaaaagttggtgtgttcatttgtaattttttcccccatcagtttaaaagttatgttgt

SEQ ID NO: 36747 - protein, 317 aa, Arabidopsis thaliana
  peptide (1)..(317): Ceres Seq. ID no. 12395311
MTILVEHFVPDSRVDEKKVIEERDNELVLDGGFVVPKSKETDAFDAPDMNFLGHSFRDYENDESERQQGVEEFYRMQHIHQTYDFVKKMRKEYGKLNKMEMSIWECCELLNNVVDESDPDLDEPQIQHLLQTAEAIRRDYPDEDWLHLTALIHDLGKVLLLPEFGGLPQWAVVGDTFPVGCTFDSANIHHKYFKGNHDINNPKYNTKNGVYTEGCGLDNVLMSWGHDDYMYLVAKKNGTTLPHAGLFIIRYHSFYPLHKAGAYTHLMNDEDRDDLKWLHVFNKYDLYSKSKVLVDVEQVKPYYISLINKYFPAKLKW

SEQ ID NO: 36748 - protein, 269 aa, Arabidopsis thaliana
  peptide (1)..(269): Ceres Seq. ID no. 12395312
MNFLGHSFRDYENDESERQQGVEEFYRMQHIHQTYDFVKKMRKEYGKLNKMEMSIWECCELLNNVVDESDPDLDEPQIQHLLQTAEAIRRDYPDEDWLHLTALIHDLGKVLLLPEFGGLPQWAVVGDTFPVGCTFDSANIHHKYFKGNHDINNPKYNTKNGVYTEGCGLDNVLMSWGHDDYMYLVAKKNGTTLPHAGLFIIRYHSFYPLHKAGAYTHLMNDEDRDDLKWLHVFNKYDLYSKSKVLVDVEQVKPYYISLINKYFPAKLKW

SEQ ID NO: 36749 - protein, 242 aa, Arabidopsis thaliana
  peptide (1)..(242): Ceres Seq. ID no. 12395313
MQHIHQTYDFVKKMRKEYGKLNKMEMSIWECCELLNNVVDESDPDLDEPQIQHLLQTAEAIRRDYPDEDWLHLTALIHDLGKVLLLPEFGGLPQWAVVGDTFPVGCTFDSANIHHKYFKGNHDINNPKYNTKNGVYTEGCGLDNVLMSWGHDDYMYLVAKKNGTTLPHAGLFIIRYHSFYPLHKAGAYTHLMNDEDRDDLKWLHVFNKYDLYSKSKVLVDVEQVKPYYISLINKYFPAKLKW

SEQ ID NO: 36750 - DNA, 1854 bp, Arabidopsis thaliana
  misc_feature (1)..(1854): Ceres Seq. ID no. 13491207
  misc_feature (1)..(1854): Ortholog of  Ceres SEQ ID NO 14307573 as cited in SEQ ID NO 55513
attaccgaagagaaccaatacaaattcaaggagtgatttagattaacgcctaaatgcatcatttgcgattacaaaatcaaattttgctccagatggattttaattacttttcgtcgcttttttactttagagtttagaccttgaaatcgatggaaagcaatcgaacccgaaattctctcatttctcaatcaaaactatcttctttcacttctgggcaagaagctctgttgtggaacatcggaaatcagaactgaaacagaaacagaaaccatggagaagagagaagacgaacaacaaaagcgcgacgattctagattcaatcaaacactcaagaacgtccaagggtttcttaaaggtagaagtattcctggtaaggtattgttgactaggagatcagatcctcctccatacccaatctctccaacatatcaacggagcttatctgagaatgacgccggaagaaatgagctattcgaaagtcctgttgaggtggaggatcacaattcaagcaagaaacatgataatacatatgctggtaagctacgatcaaactctagtgctgaaaggagtgtgaaagaagttcaaaacttgaagataggtgttcgatcaagtgactctgctagagttatgaagttcaacaaagtgctttcagaaacaactgtcatattagagaaactgcgcgagctagcatggaatggtgtaccacactatatgcggcctgatgtctggcggcttctcttgggatatgcaccacctaattcagatagaagggaggctgttctgagaagaaaacgtcttgaatatctggaatctgttggccaattttatgaccttccagattccgaacgttctgatgatgagatcaatatgcttcgccagattgctgttgactgtccgaggactgtaccagatgtcagtttctttcagcaagaacaggtgcagaaatcactggagcgtattctttacacgtgggccattagacatccagcaagcggatatgttcagggaataaatgacctggtcacgcccttcctagtgattttcttgtcagaatatctagatggcggtgtagacagttggtcaatggatgatctatctgctgaaaaagtctcagatgtagaagcggattgctactggtgcttaacaaagctccttgacggtatgcaagatcattacacgtttgctcaacctggaatccagagacttgtgtttaagctgaaggaactggtcaggcgtatcgatgaacctgtttcaagacacatggaagagcatgggctagagtttcttcaatttgctttccggtggtataattgtcttctgattcgtgagatcccattcaatctcatcaatcgactatgggacacttatcttgctgaaggagatgcgttgccagacttcctggtgtatatatatgctagctttctcttgacgtggtctgatgagctgaagaagctagattttcaagaaatggtaatgttcctgcaacaccttccgacacataactggtcagaccaagagctcgaaatggttttgtcaagagcttacatgtggcatagtatgttcaataattccccaaaccatttggctagctgaaatgacttttcctccatggtgcttgctgctgtttttccctttgttatattatcttcttcttcttgttgtctaaatcagctttcgttttgttttgggttatggtaaatgctaacattcttgtcttgttaattgttattagtttatgtatggtttcacttgttgaatctgtcaccagtttgtgtgtttgtaatatttgtagctttcactaatttggctctctcaatatttttttttttttgggaattcatgaaatttggggag

SEQ ID NO: 36751 - protein, 440 aa, Arabidopsis thaliana
  peptide (1)..(440): Ceres Seq. ID no. 13491208
MEKREDEQQKRDDSRFNQTLKNVQGFLKGRSIPGKVLLTRRSDPPPYPISPTYQRSLSENDAGRNELFESPVEVEDHNSSKKHDNTYAGKLRSNSSAERSVKEVQNLKIGVRSSDSARVMKFNKVLSETTVILEKLRELAWNGVPHYMRPDVWRLLLGYAPPNSDRREAVLRRKRLEYLESVGQFYDLPDSERSDDEINMLRQIAVDCPRTVPDVSFFQQEQVQKSLERILYTWAIRHPASGYVQGINDLVTPFLVIFLSEYLDGGVDSWSMDDLSAEKVSDVEADCYWCLTKLLDGMQDHYTFAQPGIQRLVFKLKELVRRIDEPVSRHMEEHGLEFLQFAFRWYNCLLIREIPFNLINRLWDTYLAEGDALPDFLVYIYASFLLTWSDELKKLDFQEMVMFLQHLPTHNWSDQELEMVLSRAYMWHSMFNNSPNHLAS

SEQ ID NO: 36752 - protein, 321 aa, Arabidopsis thaliana
  peptide (1)..(321): Ceres Seq. ID no. 13491209
MKFNKVLSETTVILEKLRELAWNGVPHYMRPDVWRLLLGYAPPNSDRREAVLRRKRLEYLESVGQFYDLPDSERSDDEINMLRQIAVDCPRTVPDVSFFQQEQVQKSLERILYTWAIRHPASGYVQGINDLVTPFLVIFLSEYLDGGVDSWSMDDLSAEKVSDVEADCYWCLTKLLDGMQDHYTFAQPGIQRLVFKLKELVRRIDEPVSRHMEEHGLEFLQFAFRWYNCLLIREIPFNLINRLWDTYLAEGDALPDFLVYIYASFLLTWSDELKKLDFQEMVMFLQHLPTHNWSDQELEMVLSRAYMWHSMFNNSPNHLAS

SEQ ID NO: 36753 - protein, 293 aa, Arabidopsis thaliana
  peptide (1)..(293): Ceres Seq. ID no. 13491210
MRPDVWRLLLGYAPPNSDRREAVLRRKRLEYLESVGQFYDLPDSERSDDEINMLRQIAVDCPRTVPDVSFFQQEQVQKSLERILYTWAIRHPASGYVQGINDLVTPFLVIFLSEYLDGGVDSWSMDDLSAEKVSDVEADCYWCLTKLLDGMQDHYTFAQPGIQRLVFKLKELVRRIDEPVSRHMEEHGLEFLQFAFRWYNCLLIREIPFNLINRLWDTYLAEGDALPDFLVYIYASFLLTWSDELKKLDFQEMVMFLQHLPTHNWSDQELEMVLSRAYMWHSMFNNSPNHLAS

SEQ ID NO: 36754 - DNA, 1203 bp, Arabidopsis thaliana
  misc_feature (1)..(1203): Ceres Seq. ID no. 12421284
  misc_feature (1)..(1203): Ortholog of  Ceres SEQ ID NO 15175496 as cited in SEQ ID NO 56127
  misc_feature (1)..(1203): Ortholog of  Ceres SEQ ID NO 13639124 as cited in SEQ ID NO 56718
  misc_feature (1)..(1203): Ortholog of  Ceres SEQ ID NO 13598714 as cited in SEQ ID NO 62656
  misc_feature (1)..(1203): Ortholog of  Ceres SEQ ID NO 13597519 as cited in SEQ ID NO 64759
  misc_feature (1)..(1203): Ortholog of  Ceres SEQ ID NO 13597870 as cited in SEQ ID NO 64982
  misc_feature (1)..(1203): Ortholog of  Ceres SEQ ID NO 13656123 as cited in SEQ ID NO 65212
agcatgttgattaatcacacagcacaaataagagttagaaaaatgggagtgtacttaggtaagtattgttatataatgataataatgttagtgttggtgttgggaaaagaagtgagaagccagttgttaaaaaatggttattattcaacttcatgtccaaaagctgagtcgatagttagatccactgttgaatctcactttgattctgatcccacaatttcccctggcttgcttaggcttcatttccatgactgttttgttcagggttgtgatggttcggttttaatcaaagggaaatctgcggagcaagctgctctaccaaatcttggtctaagaggtttagaagtgatcgatgatgctaaagcccggcttgaggcggtgtgtccaggagttgtgtcatgtgcagatatacttgcacttgctgctcgtgactctgttgacttgagtgatgggccaagctggcgagtaccaacgggtcgtaaagacgggagaatctcgttggcaactgaagcatcgaatctaccttctccacttgactctgttgctgttcaaaagcaaaagtttcaagataaaggattggatactcatgatctagttactctactaggtgcacatacaattggacaaaccgactgtctcttcttccgttaccgtttatacaacttcacggtgaccggaaactccgatccaaccataagcccatcgtttcttacacagctcaagactctttgtcctcccaatggagacggttcgaaacgtgttgctcttgacattggtagcccctcaaaattcgatgaaagtttcttcaagaacttacgcgacggaaacgctattctagagtcggaccaacggctttggtcggacgccgagacaaatgccgtggtgaagaagtatgcgagtcgtcttagaggtttgttagggtttaggtttgattatgagtttggtaaagctatgattaagatgagttccattgatgtaaagactgacgttgatggcgaggttaggaaagtttgttccaaggtgaactagtttgaataaagacatatagtatatgtattcggtttctctatgtttcagatttctaatcactgaatgcatgttacgtaattgtcgtctttcaatatttatttttcagttttttatttctctagaaaaaatagtgagtttgttttggatggtaaaacagtatatgctaatctttat

SEQ ID NO: 36755 - protein, 342 aa, Arabidopsis thaliana
  peptide (1)..(342): Ceres Seq. ID no. 12421285
SMLINHTAQIRVRKMGVYLGKYCYIMIIMLVLVLGKEVRSQLLKNGYYSTSCPKAESIVRSTVESHFDSDPTISPGLLRLHFHDCFVQGCDGSVLIKGKSAEQAALPNLGLRGLEVIDDAKARLEAVCPGVVSCADILALAARDSVDLSDGPSWRVPTGRKDGRISLATEASNLPSPLDSVAVQKQKFQDKGLDTHDLVTLLGAHTIGQTDCLFFRYRLYNFTVTGNSDPTISPSFLTQLKTLCPPNGDGSKRVALDIGSPSKFDESFFKNLRDGNAILESDQRLWSDAETNAVVKKYASRLRGLLGFRFDYEFGKAMIKMSSIDVKTDVDGEVRKVCSKVN

SEQ ID NO: 36756 - protein, 341 aa, Arabidopsis thaliana
  peptide (1)..(341): Ceres Seq. ID no. 12421286
MLINHTAQIRVRKMGVYLGKYCYIMIIMLVLVLGKEVRSQLLKNGYYSTSCPKAESIVRSTVESHFDSDPTISPGLLRLHFHDCFVQGCDGSVLIKGKSAEQAALPNLGLRGLEVIDDAKARLEAVCPGVVSCADILALAARDSVDLSDGPSWRVPTGRKDGRISLATEASNLPSPLDSVAVQKQKFQDKGLDTHDLVTLLGAHTIGQTDCLFFRYRLYNFTVTGNSDPTISPSFLTQLKTLCPPNGDGSKRVALDIGSPSKFDESFFKNLRDGNAILESDQRLWSDAETNAVVKKYASRLRGLLGFRFDYEFGKAMIKMSSIDVKTDVDGEVRKVCSKVN

SEQ ID NO: 36757 - protein, 328 aa, Arabidopsis thaliana
  peptide (1)..(328): Ceres Seq. ID no. 12421287
MGVYLGKYCYIMIIMLVLVLGKEVRSQLLKNGYYSTSCPKAESIVRSTVESHFDSDPTISPGLLRLHFHDCFVQGCDGSVLIKGKSAEQAALPNLGLRGLEVIDDAKARLEAVCPGVVSCADILALAARDSVDLSDGPSWRVPTGRKDGRISLATEASNLPSPLDSVAVQKQKFQDKGLDTHDLVTLLGAHTIGQTDCLFFRYRLYNFTVTGNSDPTISPSFLTQLKTLCPPNGDGSKRVALDIGSPSKFDESFFKNLRDGNAILESDQRLWSDAETNAVVKKYASRLRGLLGFRFDYEFGKAMIKMSSIDVKTDVDGEVRKVCSKVN

SEQ ID NO: 36758 - DNA, 1193 bp, Arabidopsis thaliana
  misc_feature (1)..(1193): Ceres Seq. ID no. 12337554
  misc_feature (1)..(1193): Ortholog of  Ceres SEQ ID NO 14306781 as cited in SEQ ID NO 53019
  misc_feature (1)..(1193): Ortholog of  Ceres SEQ ID NO 15177237 as cited in SEQ ID NO 53825
  misc_feature (1)..(1193): Ortholog of  Ceres SEQ ID NO 15176012 as cited in SEQ ID NO 60374
  misc_feature (1)..(1193): Ortholog of  Ceres SEQ ID NO 13598643 as cited in SEQ ID NO 64307
ataaatttcgtaacaaaagaaaaaacagaacacagaatcttgttctcccaccgatcaccaccggagatatggaatcgccgattactcaaccccaaatgtttagattgcagtttcttcgtcttcttcatagtcgacgatcaccccaagttccattaatagccgattcttcaaatcctatcgagaatcctctctttcaagctgatgttccttctaccacagcaatagagtcttgtccaaaagaaaacattggattcagagcaagggaaattacctttgcttattttaagcttgaaagagagaagtgaagaaaaaaggccagcgattgtgtttatgcatggcacaaacacaaacaaagaatggttaaggccatggcttgaagcatatgcttcgcggggatatgtagccatcggtttagactctcgttaccacggtgaacgtgctgattgcaaaactgcatatcgagatgctcttatatcatcttggagaaatggaaacactatgccttttatctttgatactgtatgggatttgatcaaactagctgaatatcttactcagagggatgatatagacccgaaaaagataggaatcaccggtatttcgctaggagggatgcatgcttggtttgctgctgcagctgacactcgctattccgtggttgtcccattaatcggtgttcagggttttagatgggcaatagagaatgatgagtgggaagcaagagtcaacagtatcaaacctttatttgaagaagcaaggattgatctcggaaagaacataatcgacaaagaactagtcgagaaggtgtggaacagaatagctcctggcctagcttcgaagtttgattcaccgtactcattaccagtgattgctccacggcctctttacatccttaacggcgcaaatgatcctcgatgtcctcttggcggactagaacttgcgttaaagagagctgaaaaggcgtataaggaaacagcttctcctggaaacttcaagttcaaagcagaagatggagttggacacgaagcgacgagtttcatgatcaaagaatcatcagactggtttgacaaattccttaaacaagaagatatgacaacttgacagattgtaatattgtgaactaataaagaagaatcatcttcttctcgttaataatgtattcactctcgcaaatcaatatcattacaaatttc

SEQ ID NO: 36759 - protein, 256 aa, Arabidopsis thaliana; identical to SEQ ID NO: 24153
  peptide (1)..(256): Ceres Seq. ID no. 12337555

SEQ ID NO: 36760 - protein, 200 aa, Arabidopsis thaliana
  peptide (1)..(200): Ceres Seq. ID no. 12337556
MPFIFDTVWDLIKLAEYLTQRDDIDPKKIGITGISLGGMHAWFAAAADTRYSVVVPLIGVQGFRWAIENDEWEARVNSIKPLFEEARIDLGKNIIDKELVEKVWNRIAPGLASKFDSPYSLPVIAPRPLYILNGANDPRCPLGGLELALKRAEKAYKETASPGNFKFKAEDGVGHEATSFMIKESSDWFDKFLKQEDMTT

SEQ ID NO: 36761 - protein, 162 aa, Arabidopsis thaliana
  peptide (1)..(162): Ceres Seq. ID no. 12337557
MHAWFAAAADTRYSVVVPLIGVQGFRWAIENDEWEARVNSIKPLFEEARIDLGKNIIDKELVEKVWNRIAPGLASKFDSPYSLPVIAPRPLYILNGANDPRCPLGGLELALKRAEKAYKETASPGNFKFKAEDGVGHEATSFMIKESSDWFDKFLKQEDMTT

SEQ ID NO: 36762 - DNA, 1654 bp, Arabidopsis thaliana
  misc_feature (1)..(1654): Ceres Seq. ID no. 12337569
  misc_feature (1)..(1654): Ortholog of  Ceres SEQ ID NO 15226389 as cited in SEQ ID NO 52992
  misc_feature (1)..(1654): Ortholog of  Ceres SEQ ID NO 14312152 as cited in SEQ ID NO 57197
  misc_feature (1)..(1654): Ortholog of  Ceres SEQ ID NO 13664395 as cited in SEQ ID NO 67508
  misc_feature (1)..(1654): Ortholog of  Ceres SEQ ID NO 13662335 as cited in SEQ ID NO 68440
ccacaaaacatatttacgtatatatcatctcatgatgttcacttgattaaaaattaacatcacgaatttaacagaatatattattaaataatccagcaggtaacaaagttataaatggcacacgtgtgggctcatacccagataagctctcgttcctcatactcttaacgctcacaacaaacaatctcacctttcttcttcttcttcttctctctgtttctcaagtttcttaatgcctaggaatatagaaccattggatcttggaatccaaataccatatcatttcagatgtccaatatcactcgaacttatgcaagacccagtcaccgtctgcaccggccaaacctacgaccgagccagcatcgagtcatgggtctccatcggtaacaacacgacatgtccagtcacacgagctcctctctccgacttcacactcatccctaaccacactctccgtcgtctcatccaagaatggtgcgtcgctaaccgctccaatggagtcgaacgtatccctactcctaaacaaccagctgatccaacctctgttcgtgctcttctcagtcaagcctctgctataacaggaacccacgtctctgttcgttcacgcgccgccgctctccgccgtttacgtggtttcgctcgtgattctgataaaaatcgcgttttgatcgcagctcataacgctacagagattttgattaagattctgttctctgaaacgacgtcgtcggagttagtctctgagtctttagctctacttgttatgttaccgataacggagccgaaccagtttgtttcgatatcgtcggatccgggtcgggtcgagtttttgacccggttgttattcgattcgtcgattgaaacacgcgttaacgccgccgcgttgatcgagattgtttcgacgggaaccaaatcggcggacctgaaaggttcgatttcgaattcagaatctgtattcgaaggagttctcgatcttctgagaaatccgatttcgtcacgacgagctctcaaaatcggaatcaaaactctgttcgcgctctgttcagtgaaatcgacgcgacacatcgcgatcacagccggtgcgccggagattctaatagacagactcgcggcggatttcgatagatgcgatacggagcgagccttagcgacggtggagctactctgccgaacgccggaaggatgcgcggcgttcggtgagcacgctttaacggtgccgttgttagttaaaacgatattgagagtttcggatcgcgcgacggagtatgcggcgggggcgttgttagcgctttgtacggcggaggaaaggtggagggaggaagcggcgggggcgggagtggtggtacagttgttgttgatggtgcagagtgagtgtacggagagagcgaagaagaaagcacagaagttattgaagcttctgagagattcatggcctgactacaattccttcgctaactccgatgactttggttgcagcagccaagtggtccctttttgatttctcgatttttttttttcaaaacattgttttttcacagtaattattaaaaaaatgttttttttttaattagaaggaaaaataatggtcattttttgtgtgtatttgatggaaagatgtgaagaagaaaagataatatacagaagctttttgatg

SEQ ID NO: 36763 - protein, 421 aa, Arabidopsis thaliana
  peptide (1)..(421): Ceres Seq. ID no. 12337570
MPRNIEPLDLGIQIPYHFRCPISLELMQDPVTVCTGQTYDRASIESWVSIGNNTTCPVTRAPLSDFTLIPNHTLRRLIQEWCVANRSNGVERIPTPKQPADPTSVRALLSQASAITGTHVSVRSRAAALRRLRGFARDSDKNRVLIAAHNATEILIKILFSETTSSELVSESLALLVMLPITEPNQFVSISSDPGRVEFLTRLLFDSSIETRVNAAALIEIVSTGTKSADLKGSISNSESVFEGVLDLLRNPISSRRALKIGIKTLFALCSVKSTRHIAITAGAPEILIDRLAADFDRCDTERALATVELLCRTPEGCAAFGEHALTVPLLVKTILRVSDRATEYAAGALLALCTAEERWREEAAGAGVVVQLLLMVQSECTERAKKKAQKLLKLLRDSWPDYNSFANSDDFGCSSQVVPF

SEQ ID NO: 36764 - protein, 395 aa, Arabidopsis thaliana
  peptide (1)..(395): Ceres Seq. ID no. 12337571
MQDPVTVCTGQTYDRASIESWVSIGNNTTCPVTRAPLSDFTLIPNHTLRRLIQEWCVANRSNGVERIPTPKQPADPTSVRALLSQASAITGTHVSVRSRAAALRRLRGFARDSDKNRVLIAAHNATEILIKILFSETTSSELVSESLALLVMLPITEPNQFVSISSDPGRVEFLTRLLFDSSIETRVNAAALIEIVSTGTKSADLKGSISNSESVFEGVLDLLRNPISSRRALKIGIKTLFALCSVKSTRHIAITAGAPEILIDRLAADFDRCDTERALATVELLCRTPEGCAAFGEHALTVPLLVKTILRVSDRATEYAAGALLALCTAEERWREEAAGAGVVVQLLLMVQSECTERAKKKAQKLLKLLRDSWPDYNSFANSDDFGCSSQVVPF

SEQ ID NO: 36765 - protein, 244 aa, Arabidopsis thaliana
  peptide (1)..(244): Ceres Seq. ID no. 12337572
MLPITEPNQFVSISSDPGRVEFLTRLLFDSSIETRVNAAALIEIVSTGTKSADLKGSISNSESVFEGVLDLLRNPISSRRALKIGIKTLFALCSVKSTRHIAITAGAPEILIDRLAADFDRCDTERALATVELLCRTPEGCAAFGEHALTVPLLVKTILRVSDRATEYAAGALLALCTAEERWREEAAGAGVVVQLLLMVQSECTERAKKKAQKLLKLLRDSWPDYNSFANSDDFGCSSQVVPF

SEQ ID NO: 36766 - DNA, 1367 bp, Arabidopsis thaliana
  misc_feature (1)..(1367): Ceres Seq. ID no. 12580251
  misc_feature (1)..(1367): Ortholog of  Ceres SEQ ID NO 14310616 as cited in SEQ ID NO 55699
  misc_feature (1)..(1367): Ortholog of  Ceres SEQ ID NO 15173907 as cited in SEQ ID NO 62356
  misc_feature (1)..(1367): Ortholog of  Ceres SEQ ID NO 13596519 as cited in SEQ ID NO 62572
  misc_feature (1)..(1367): Ortholog of  Ceres SEQ ID NO 12625108 as cited in SEQ ID NO 68102
ccaattctaaaccaaacaacagattctcataatcatctcttcttttttcctctttacgaaaagaagaaagatcaaaccttccaagtaatcattttctttctctctctcacacacacacattcactagttttagcttcacaaaatgtgatctaacttcatttacctatatgcaggtttacacaaaaagaaaaaagaacgatggctcttgtcaccttcttgtttattgctacccttggagcaatgacgtcacatgtcaatggttacgccggaggaggttgggtcaacgcacacgccacattctacggtggtggtgatgcttccggcacaatgggaggtgcttgtggatacggaaacctatatagccaaggctatggaaccaacacggcggcgctaagcacggctctattcaataatggtctaagttgtggtgcttgcttcgagataagatgtcaaaacgatggaaaatggtgtcttcctggctcaattgtcgtcacagccacaaacttttgccctcctaacaacgccttaccgaacaacgcaggaggttggtgtaaccctcctcagcagcattttgatctctctcagcccgtatttcaacgcatcgctcaatacagagccggcattgtccccgtcgcttaccgaagagtgccgtgcgtgagaagaggaggaataaggtttacgataaacggacactcttacttcaacctagttctgatcactaacgtcggaggagccggagatgttcactcagcgatggttaaaggttcaagaactggatggcaagcgatgtcaagaaactggggacagaactggcagagtaactcttaccttaacggacaatctctctcattcaaagttacaacaagcgatggccaaaccattgtctctaacaacgttgctaacgcaggctggtctttcggccagaccttcacaggtgcgcagctacgttaggaagagtgattcggtgaaaattcatctcattgatcgtgtggtattgacgtgttgtagtagaagcagttagagagaggggcatgatagtaatttggtcctttctttcaattgaggtttacctaaaaagaagtggtgcttcgagtgcttgattttgcacgaggccttgatgatgtcatcttttgggaaccttttcttatctttcttcatttttattggtaaggttttatgttatactgatgcagaggtggtattgagttgaagtaccacccgctagtagtagtagtctctcatgtcatttgtatcccttctcgaagcgagagggagagttttagatttttattaatctcgttaaagtcatttgtatgttgtaaatttttcaatttctacaagtaagaaatattggagatttgtttgtt

SEQ ID NO: 36767 - protein, 250 aa, Arabidopsis thaliana; identical to SEQ ID NO: 24990
  peptide (1)..(250): Ceres Seq. ID no. 12580252

SEQ ID NO: 36768 - protein, 236 aa, Arabidopsis thaliana; identical to SEQ ID NO: 24991
  peptide (1)..(236): Ceres Seq. ID no. 12580253

SEQ ID NO: 36769 - protein, 207 aa, Arabidopsis thaliana; identical to SEQ ID NO: 24992
  peptide (1)..(207): Ceres Seq. ID no. 12580254

SEQ ID NO: 36770 - DNA, 927 bp, Arabidopsis thaliana
  misc_feature (1)..(927): Ceres Seq. ID no. 13501390
  misc_feature (1)..(927): Ortholog of  Ceres SEQ ID NO 13585560 as cited in SEQ ID NO 64470
aatcttcatctccgtcgatctccattgatctctaacactaaaattctactactcttcactttctacagcttaggaagagttctcgacaagctgattcttcgagttctcgacaagtttcagtgtttttgtttccgggtcacagagaacaaaggcaatttacaataatggcagagactaaacaaccactgatcggtcttaaatgggaaccaaagcttccaggcttatccttagacttgaaaactggttcaaccagaagcaaaacagctgagagttctaagtcagagcttgttgatggtctttgtcttccacctaatgatccaaggaagattaacaagatgattagaaaacaactcaaagacactactggttctaactggtttgatatgcctgctccaacaatgactcctgagttgaaaagagatcttcagttgcttaagttgagaactgtaatggatcctgctctacactacaagaaatctgtgtcacggtctaaactagctgaaaaatatttccagattggtacagtaattgaaccagctgaagagttttatgggagattgacaaagaagaatagaaaagcaactcttgctgatgagttggtttcagatcctaaaactgctctctacaggaagcgtaaagttagggagattgaggagaagagtagagctgttacgaataagaaatggaataaaaagggaaaccagtctaagaacacaaagccaagaaggaactgaattatttttgttaagagtatgatcatagttttgggacacattttttctatttttaatagaatatggtcatagtattggatacactttcttgcggtgatataggttgtaatgactcttgttgtttatggcctttgtttaaaggattttgtgttattggttacacctttgataactgtaataactcttgttgttt

SEQ ID NO: 36771 - protein, 189 aa, Arabidopsis thaliana
  peptide (1)..(189): Ceres Seq. ID no. 13501391
MAETKQPLIGLKWEPKLPGLSLDLKTGSTRSKTAESSKSELVDGLCLPPNDPRKINKMIRKQLKDTTGSNWFDMPAPTMTPELKRDLQLLKLRTVMDPALHYKKSVSRSKLAEKYFQIGTVIEPAEEFYGRLTKKNRKATLADELVSDPKTALYRKRKVREIEEKSRAVTNKKWNKKGNQSKNTKPRRN

SEQ ID NO: 36772 - protein, 132 aa, Arabidopsis thaliana
  peptide (1)..(132): Ceres Seq. ID no. 13501392
MIRKQLKDTTGSNWFDMPAPTMTPELKRDLQLLKLRTVMDPALHYKKSVSRSKLAEKYFQIGTVIEPAEEFYGRLTKKNRKATLADELVSDPKTALYRKRKVREIEEKSRAVTNKKWNKKGNQSKNTKPRRN

SEQ ID NO: 36773 - protein, 116 aa, Arabidopsis thaliana
  peptide (1)..(116): Ceres Seq. ID no. 13501393
MPAPTMTPELKRDLQLLKLRTVMDPALHYKKSVSRSKLAEKYFQIGTVIEPAEEFYGRLTKKNRKATLADELVSDPKTALYRKRKVREIEEKSRAVTNKKWNKKGNQSKNTKPRRN

SEQ ID NO: 36774 - DNA, 646 bp, Arabidopsis thaliana
  misc_feature (1)..(646): Ceres Seq. ID no. 13496920
  misc_feature (1)..(646): Ortholog of  Ceres SEQ ID NO 12610267 as cited in SEQ ID NO 51993
  misc_feature (1)..(646): Ortholog of  Ceres SEQ ID NO 13495070 as cited in SEQ ID NO 53216
  misc_feature (1)..(646): Ortholog of  Ceres SEQ ID NO 13661333 as cited in SEQ ID NO 61620
  misc_feature (1)..(646): Ortholog of  Ceres SEQ ID NO 13596812 as cited in SEQ ID NO 62283
  misc_feature (1)..(646): Ortholog of  Ceres SEQ ID NO 13623021 as cited in SEQ ID NO 0
  misc_feature (1)..(646): Ortholog of  Ceres SEQ ID NO 14309080 as cited in SEQ ID NO 0
atccgattttatttgtttgataagttcgtgtcgtcttcgtctctctaacccaattctgtggtgtctgaagaaagcagaatcaaatcctttctttcagaggacttagcaggccaaatgcaatatctggaatgggtgttgcagatgagagcaaaaccacatttctagagcttcaaaggaaaaaaactcatcgctatgtggtcttcaagattgatgaatccaaaaaagaagttgttgttgagaaaactggaaatcctacagagagctacgatgatttcttagcttcacttcctgataatgactgcagatacgctgtttatgactttgatttcgttacttctgagaattgtcaaaagagcaaaatcttcttctttgcttggtctccttcgacctctggaattcgagccaaggtgctttactcgacttctaaagaccagttaagtagggagcttcaagggattcactatgagattcaagctactgatcctactgaggttgatcttgaagtgttacgcgaacgagcgaactgagagcaagcaagattgctatgtctattcaaaacttatggtaatgtaatgaataattcgtattctctgtggattgatttgtgtaaacacagtttcatgttctatgtcaaactgtataaccg

SEQ ID NO: 36775 - protein, 132 aa, Arabidopsis thaliana; identical to SEQ ID NO: 28359
  peptide (1)..(132): Ceres Seq. ID no. 13496921

SEQ ID NO: 36776 - DNA, 1674 bp, Arabidopsis thaliana
  misc_feature (1)..(1674): Ceres Seq. ID no. 12482626
  misc_feature (1)..(1674): Ortholog of  Ceres SEQ ID NO 14304944 as cited in SEQ ID NO 53041
  misc_feature (1)..(1674): Ortholog of  Ceres SEQ ID NO 15171508 as cited in SEQ ID NO 58526
  misc_feature (1)..(1674): Ortholog of  Ceres SEQ ID NO 13654989 as cited in SEQ ID NO 63117
  misc_feature (1)..(1674): Ortholog of  Ceres SEQ ID NO 13584744 as cited in SEQ ID NO 69137
agatgtaatttgtataattttagtaactcttcagtttttttttgttttaaaaatatattttctctctctctgtcttcctgcaatctatcgccggccgattcaataatttcgctttactctgccaaaaaagtttgttcttttgttttctgggattatccaaagagaagaaacagaggaaatcagtctcttttttagtttcagaccctaaatcctaggttttgaagttttgtttctttagtaattttgtcaggttttgtgtctggtgttgggatttttcggagcttggtttcttgaaccagctccattttctaaaaattccttctttaaatccccattgttgtaagtcttaaagaaaaaagaagatgacttgttgtttctcttgtttgaatcctcgaaccaaggacataagagtcgacattgataacgctcgatgcaactctcgttaccaaaccgattcatcagttcatggaagtgatacaacaggaacagagtcgatttcgggtatcttagtaaatggtaaagtgaatagtccgatacctggtggtggagctcggagcttcacgttcaaggagttagctgcagctacaagaaacttccgggaagttaatttgctcggagaaggaggttttggcagagtttataagggacgtttagattcaggacaagtagtggctattaagcaattgaatccagatgggcttcaagggaaccgagagtttatagtagaagttcttatgcttagcttattgcatcatcccaatctcgttacattgatcggttactgtacttctggtgatcaaagacttcttgtctatgaatacatgccaatgggaagcttagaagatcacctttttgatcttgagtctaatcaagaaccattaagctggaatactcgaatgaaaatcgcggttggtgcagctcgaggaatagagtatcttcactgcacagctaacccgccagtgatttaccgtgatttgaaatccgcaaacatattgttagataaagagttcagtccaaaactctcggatttcggattggcgaaactcggtccagttggtgatcgaactcatgtatcgactcgtgtcatgggaacttacggttactgtgctcctgaatacgcaatgagcgggaaattaactgttaaatcggatatctactgcttcggtgtagtgttgcttgagctgattactgggagaaaagctattgatttaggtcaaaagcaaggcgagcagaatcttgttacttggtcacgtccatacctcaaggatcagaagaagtttggacatttagtggatccgtctctacgaggaaaatacccaagacggtgtttaaactatgcgattgcgattattgcaatgtgtcttaatgaagaagctcattatcgaccgttcataggtgacatagttgtggcactagagtacttagccgcacagagcagatctcatgaagctcgaaacgtctcatcaccgtcaccagagatttcaagaacgccgcgacgagacttgtaaaaactcaaaaacagcttttaagaatttcagtttggtgttgtgtaaaaatggtttttttgtttctttctcagaaaacaatatatgtttggtaaatgtttcgttattagtctcttttacttgatgtatatggcaattatggaaacaattaaagttcttttatatgtgt

SEQ ID NO: 36777 - protein, 381 aa, Arabidopsis thaliana
  peptide (1)..(381): Ceres Seq. ID no. 12482627
MTCCFSCLNPRTKDIRVDIDNARCNSRYQTDSSVHGSDTTGTESISGILVNGKVNSPIPGGGARSFTFKELAAATRNFREVNLLGEGGFGRVYKGRLDSGQVVAIKQLNPDGLQGNREFIVEVLMLSLLHHPNLVTLIGYCTSGDQRLLVYEYMPMGSLEDHLFDLESNQEPLSWNTRMKIAVGAARGIEYLHCTANPPVIYRDLKSANILLDKEFSPKLSDFGLAKLGPVGDRTHVSTRVMGTYGYCAPEYAMSGKLTVKSDIYCFGVVLLELITGRKAIDLGQKQGEQNLVTWSRPYLKDQKKFGHLVDPSLRGKYPRRCLNYAIAIIAMCLNEEAHYRPFIGDIVVALEYLAAQSRSHEARNVSSPSPEISRTPRRDL

SEQ ID NO: 36778 - protein, 257 aa, Arabidopsis thaliana
  peptide (1)..(257): Ceres Seq. ID no. 12482628
MLSLLHHPNLVTLIGYCTSGDQRLLVYEYMPMGSLEDHLFDLESNQEPLSWNTRMKIAVGAARGIEYLHCTANPPVIYRDLKSANILLDKEFSPKLSDFGLAKLGPVGDRTHVSTRVMGTYGYCAPEYAMSGKLTVKSDIYCFGVVLLELITGRKAIDLGQKQGEQNLVTWSRPYLKDQKKFGHLVDPSLRGKYPRRCLNYAIAIIAMCLNEEAHYRPFIGDIVVALEYLAAQSRSHEARNVSSPSPEISRTPRRDL

SEQ ID NO: 36779 - protein, 228 aa, Arabidopsis thaliana
  peptide (1)..(228): Ceres Seq. ID no. 12482629
MPMGSLEDHLFDLESNQEPLSWNTRMKIAVGAARGIEYLHCTANPPVIYRDLKSANILLDKEFSPKLSDFGLAKLGPVGDRTHVSTRVMGTYGYCAPEYAMSGKLTVKSDIYCFGVVLLELITGRKAIDLGQKQGEQNLVTWSRPYLKDQKKFGHLVDPSLRGKYPRRCLNYAIAIIAMCLNEEAHYRPFIGDIVVALEYLAAQSRSHEARNVSSPSPEISRTPRRDL

SEQ ID NO: 36780 - DNA, 1690 bp, Arabidopsis thaliana
  misc_feature (1)..(1690): Ceres Seq. ID no. 12421376
  misc_feature (1)..(1690): Ortholog of  Ceres SEQ ID NO 15178909 as cited in SEQ ID NO 0
atcaataaacacaaaaacaaaagaagaagagaataaacaaaagaagaaaaaaaactaataaaacaaaatcaataaaaagagaataaaaaatggtgggttctcacaaagcaagcggagtgcttcttgtgctactagtggttatggccaccacaatagcaaacgggacaccggttgtcgataaagcaaaaaatgcagctacagcagttgaagatacagcaaaaaatgcagctacagcagttggcggtgcagctgcatcagttggtgctaaagtatcaggtgccaaaccaggcgcagcagttgatgttaaagcatcaggagccaaaggagacagcaaaactgatgatagtgcggcatttgcggctgcatggaaagaagcttgtgcagcagggagcacaattacagtgccaaaaggtgagtatatggtagagagcctagagttcaaaggtccatgcaaaggtccagtcactttggaattgaatggcaatttcaaggctccggctacggtcaagaccactaagccacatgccggatggattgatttcgaaaatatagctgatttcactttgaatggaaacaaagctatttttgacggtcaagggtccctcgcttggaaggccaatgattgtgccaaaactggcaaatgcaactctctccctatcaacatccgattcactggtctaacaaactcaaagattaatagtattacatcaacaaacagcaaacttttccacatgaacatccttaactgcaagaacattactctttcggatattggtattgatgcacctccggagagtctcaacaccgatggtatccacatcggaaggtccaatggagtcaacttaattggggcaaagatcaaaaccggagatgactgcgtttccattggagatggtaccgaaaatctcattgttgagaacgtagaatgtggaccaggacacggaatttccattggaagtcttggaagataccctaatgagcaaccagtaaaaggagtcaccgtgaggaaatgcctcatcaagaacactgacaatggtgttcgcatcaagacatggccaggatctccccccggcatcgcctccaacattcttttcgaagatatcacaatggacaatgttagccttcccgttctcatcgaccaagagtactgtccttatggccactgcaaagctggggtaccatcgcaagtgaagttgtcagacgtgactatcaagggcattaagggtacatcagcaacaaaggtggctgtgaagctaatgtgcagcaaaggagtgccttgcaccaatattgctctctctgacatcaacttggtccacaacggcaaagagggaccagctgtctcggcatgttctaacatcaagcctattctcagcggaaagttggttccagcggcttgcactgaagttgctaaaccgggtccataaattaaagtcgcttgtccaccataaatccatccaatctggtgaagacgctttgattagggtgcgatgaaaaaattttgcaatatttttttgacatataaattatatggatattttatagataagacggagtccattcaggattggagtttataacctgaagagtgactcgtgaattgggtagtaattgttgtgtggattcgcatttatgcgagaatgttttaataattattcgaaaagtaataatatcattgaaattttgaagtttt

SEQ ID NO: 36781 - protein, 444 aa, Arabidopsis thaliana
  peptide (1)..(444): Ceres Seq. ID no. 12421377
MVGSHKASGVLLVLLVVMATTIANGTPVVDKAKNAATAVEDTAKNAATAVGGAAASVGAKVSGAKPGAAVDVKASGAKGDSKTDDSAAFAAAWKEACAAGSTITVPKGEYMVESLEFKGPCKGPVTLELNGNFKAPATVKTTKPHAGWIDFENIADFTLNGNKAIFDGQGSLAWKANDCAKTGKCNSLPINIRFTGLTNSKINSITSTNSKLFHMNILNCKNITLSDIGIDAPPESLNTDGIHIGRSNGVNLIGAKIKTGDDCVSIGDGTENLIVENVECGPGHGISIGSLGRYPNEQPVKGVTVRKCLIKNTDNGVRIKTWPGSPPGIASNILFEDITMDNVSLPVLIDQEYCPYGHCKAGVPSQVKLSDVTIKGIKGTSATKVAVKLMCSKGVPCTNIALSDINLVHNGKEGPAVSACSNIKPILSGKLVPAACTEVAKPGP

SEQ ID NO: 36782 - protein, 427 aa, Arabidopsis thaliana
  peptide (1)..(427): Ceres Seq. ID no. 12421378
MATTIANGTPVVDKAKNAATAVEDTAKNAATAVGGAAASVGAKVSGAKPGAAVDVKASGAKGDSKTDDSAAFAAAWKEACAAGSTITVPKGEYMVESLEFKGPCKGPVTLELNGNFKAPATVKTTKPHAGWIDFENIADFTLNGNKAIFDGQGSLAWKANDCAKTGKCNSLPINIRFTGLTNSKINSITSTNSKLFHMNILNCKNITLSDIGIDAPPESLNTDGIHIGRSNGVNLIGAKIKTGDDCVSIGDGTENLIVENVECGPGHGISIGSLGRYPNEQPVKGVTVRKCLIKNTDNGVRIKTWPGSPPGIASNILFEDITMDNVSLPVLIDQEYCPYGHCKAGVPSQVKLSDVTIKGIKGTSATKVAVKLMCSKGVPCTNIALSDINLVHNGKEGPAVSACSNIKPILSGKLVPAACTEVAKPGP

SEQ ID NO: 36783 - protein, 334 aa, Arabidopsis thaliana
  peptide (1)..(334): Ceres Seq. ID no. 12421379
MVESLEFKGPCKGPVTLELNGNFKAPATVKTTKPHAGWIDFENIADFTLNGNKAIFDGQGSLAWKANDCAKTGKCNSLPINIRFTGLTNSKINSITSTNSKLFHMNILNCKNITLSDIGIDAPPESLNTDGIHIGRSNGVNLIGAKIKTGDDCVSIGDGTENLIVENVECGPGHGISIGSLGRYPNEQPVKGVTVRKCLIKNTDNGVRIKTWPGSPPGIASNILFEDITMDNVSLPVLIDQEYCPYGHCKAGVPSQVKLSDVTIKGIKGTSATKVAVKLMCSKGVPCTNIALSDINLVHNGKEGPAVSACSNIKPILSGKLVPAACTEVAKPGP

SEQ ID NO: 36784 - DNA, 1396 bp, Arabidopsis thaliana
  misc_feature (1)..(1396): Ceres Seq. ID no. 12336379
  misc_feature (1)..(1396): Ortholog of  Ceres SEQ ID NO 13647016 as cited in SEQ ID NO 20325
  misc_feature (1)..(1396): Ortholog of  Ceres SEQ ID NO 15179824 as cited in SEQ ID NO 66250
  misc_feature (1)..(1396): Ortholog of  Ceres SEQ ID NO 13657872 as cited in SEQ ID NO 66357
aatgtattaagacttgacaacttgtctttctcacaccaaacccctctcctctgtttcataacatcttctctttttttttttcctaagcccctaatgacaaaccataatgccttaatctctgatgctaaaggcagcatcggagttgcggttagagttccaaaccaatctctgttttctcccggaggtggccgatacatcagcattccccggaagaaactcgtgcagaagctagaggccgacccgagtcaaacccgtatccacacttggatcgaagccatgagggcttcttccccaacccgtacccgaccggggaacatatctcccctcacggagtccgatgaggaggatgaatactcttcttggatggctcaacacccgtcagctttaaccatgtttgaagagatagctgaagcttcaaaagggaaacaaatcgtgatgtttctcgactatgacggtacattatcccccattgttgaaaaccctgatcgagcttacatgtctgaagagatgagagaggcagtgaaaggcgtggctagatatttcccgaccgcgattgtcactggaagatgccgtgataaggttcgtagatttgtgaaacttcccggactttactatgcaggtagccatggaatggacatcaaaggaccttccaaaagaaacaaacataataagaacaataaaggagttcttttccaagcggcgaatgagtttttgcctatgattgacaaggtctctaagtgtctagtagagaaaatgagagacatagaaggagcaaacgtcgagaacaacaagttttgtgtctccgtacattaccgttgtgttgatcaaaaggactggggattggtagcggaacacgtgacatcgatattgagtgagtatccgaaactgagtttgacacaaggaagaaaagtcttagagattcgaccaaccatcaaatgggataaaggcaaagctctcgagttcttgctcgaatccttaggattcgctaactctaacgatgttttgcccatctatataggagatgatcgtacggacgaggatgctttcaaggttttgagaaacaaaggacaaggctttggtatacttgtgtccaaaattccaaaggaaacgagtgctacatattctctacaagaaccttccgaggtaggagagtttttgcagcgactcgtggaatggaaacaaatgtcactaagaggaagatagccaatttcctgacataaatttattttcaattaataaatgaattagttttcactatgcaacaaaaattgttgtatatatgatcaatgtttttttaattattttactcttcatgaacaaatgtaagtttataggaactttcttaaccaagaaaaaaagtaagtttgctatataatattttcatcattctcttttt

SEQ ID NO: 36785 - protein, 400 aa, Arabidopsis thaliana
  peptide (1)..(400): Ceres Seq. ID no. 12336380
NVLRLDNLSFSHQTPLLCFITSSLFFFPKPLMTNHNALISDAKGSIGVAVRVPNQSLFSPGGGRYISIPRKKLVQKLEADPSQTRIHTWIEAMRASSPTRTRPGNISPLTESDEEDEYSSWMAQHPSALTMFEEIAEASKGKQIVMFLDYDGTLSPIVENPDRAYMSEEMREAVKGVARYFPTAIVTGRCRDKVRRFVKLPGLYYAGSHGMDIKGPSKRNKHNKNNKGVLFQAANEFLPMIDKVSKCLVEKMRDIEGANVENNKFCVSVHYRCVDQKDWGLVAEHVTSILSEYPKLSLTQGRKVLEIRPTIKWDKGKALEFLLESLGFANSNDVLPIYIGDDRTDEDAFKVLRNKGQGFGILVSKIPKETSATYSLQEPSEVGEFLQRLVEWKQMSLRGR

SEQ ID NO: 36786 - protein, 369 aa, Arabidopsis thaliana
  peptide (1)..(369): Ceres Seq. ID no. 12336381
MTNHNALISDAKGSIGVAVRVPNQSLFSPGGGRYISIPRKKLVQKLEADPSQTRIHTWIEAMRASSPTRTRPGNISPLTESDEEDEYSSWMAQHPSALTMFEEIAEASKGKQIVMFLDYDGTLSPIVENPDRAYMSEEMREAVKGVARYFPTAIVTGRCRDKVRRFVKLPGLYYAGSHGMDIKGPSKRNKHNKNNKGVLFQAANEFLPMIDKVSKCLVEKMRDIEGANVENNKFCVSVHYRCVDQKDWGLVAEHVTSILSEYPKLSLTQGRKVLEIRPTIKWDKGKALEFLLESLGFANSNDVLPIYIGDDRTDEDAFKVLRNKGQGFGILVSKIPKETSATYSLQEPSEVGEFLQRLVEWKQMSLRGR

SEQ ID NO: 36787 - protein, 308 aa, Arabidopsis thaliana
  peptide (1)..(308): Ceres Seq. ID no. 12336382
MRASSPTRTRPGNISPLTESDEEDEYSSWMAQHPSALTMFEEIAEASKGKQIVMFLDYDGTLSPIVENPDRAYMSEEMREAVKGVARYFPTAIVTGRCRDKVRRFVKLPGLYYAGSHGMDIKGPSKRNKHNKNNKGVLFQAANEFLPMIDKVSKCLVEKMRDIEGANVENNKFCVSVHYRCVDQKDWGLVAEHVTSILSEYPKLSLTQGRKVLEIRPTIKWDKGKALEFLLESLGFANSNDVLPIYIGDDRTDEDAFKVLRNKGQGFGILVSKIPKETSATYSLQEPSEVGEFLQRLVEWKQMSLRGR

SEQ ID NO: 36788 - DNA, 1622 bp, Arabidopsis thaliana
  misc_feature (1)..(1622): Ceres Seq. ID no. 13504804
  misc_feature (1)..(1622): Ortholog of  Ceres SEQ ID NO 13594209 as cited in SEQ ID NO 59089
  misc_feature (1)..(1622): Ortholog of  Ceres SEQ ID NO 13502874 as cited in SEQ ID NO 66298
  misc_feature (1)..(1622): Ortholog of  Ceres SEQ ID NO 12614124 as cited in SEQ ID NO 68392
agaaaacagaacaaaaaaaaacacaagaacagggcaaggaaaatgtcggttttcctctgtttcctcgtcctcttacccctgatcttaatcttcttgaacgttttgaaaccttcgaaatataagcttcctccgggtccaaagaagcttcccatcatcggaaacttacaccaacgcaggacactacatccgaggaatcgccgtaatctcgccgaaatgtatggaccagtggcgcttctccaatacggattcgtccccgtggtcgcgatctcttcgaaagaagcagcagaggaagtgctaaagatcaacgatcttgagtgttgtagtcgaccagaggcggccggaatgagagcaactttttacaacttcaaagacatcgggatggcacccttcggtgacgagtggagtctgatgcggaagctctcggtggtcgagctcttcagcgtgaaaaagcttcaatctttcaagtatatcatagaggaagagaataacttgtgtgtcaagaaactctctgagtttgctacgagacaatctccggtgaatcttgagagagccattttcactttagtcggaaatatagtgtgtcgtatcgggtacgggataaatctctatgagtgtgatttctttgaagctgatagagtcgtggatcttgtgctaaaggctgaagcggtcataagagaaactgtgttctctgatttctttcccggaagaatcggtaggttcatcgactgtatctccggtcagaacaggagattgaagaataatttctcggtagtagacactttctttcagaatgttcttaacgagcatcttaagcctggaagagagagctctactattgttgacttgatgatcgatatgaagaagaagcaagagaacgatggagatgctctcaagttcaccactgatcatctcaaaggaatgatctcggacatatttgtagcagggattggtggagtcgctggcataacactatggggaatgaccgagctgatcagaaacccaagagtgatgaagaaagtgcaagacgagattcggacaacacttggggacaagaaggagagaatcaaagaagaagatctaaaccaacttcactactttaagctcgtggtcaaggagacattaaggttacatccaacaactccactcttgctcccaagacagacaatgtctcatatcaagattcaaggctacgatgttcctgcgaaaacacagatcttagtcaacgtttatgcgatgggtcgtgatccaaaactctgggaaaacgcagatgagtttaaccctgacaggtttctcgacagttccgttgattttaaaggaaaaaactacgagtttataccgtttggatctggtaggagaatatgtccagggatgacaatgggtaccatacttgttgagatggcattgttgaatttgctttacttcttcgattggggattggcgaagcaggaggaagccaaagagatcatcaatggggaagaaaattttctagccttctttcaagttcttcaccactgaatatatggtttggttcctatcaaaaaaaatatatatatatggttttgttatgtacactagtttctaagataataaatgaaaattgtatctgcttttgatttagtttc

SEQ ID NO: 36789 - protein, 504 aa, Arabidopsis thaliana
  peptide (1)..(504): Ceres Seq. ID no. 13504805
RKQNKKKHKNRARKMSVFLCFLVLLPLILIFLNVLKPSKYKLPPGPKKLPIIGNLHQRRTLHPRNRRNLAEMYGPVALLQYGFVPVVAISSKEAAEEVLKINDLECCSRPEAAGMRATFYNFKDIGMAPFGDEWSLMRKLSVVELFSVKKLQSFKYIIEEENNLCVKKLSEFATRQSPVNLERAIFTLVGNIVCRIGYGINLYECDFFEADRVVDLVLKAEAVIRETVFSDFFPGRIGRFIDCISGQNRRLKNNFSVVDTFFQNVLNEHLKPGRESSTIVDLMIDMKKKQENDGDALKFTTDHLKGMISDIFVAGIGGVAGITLWGMTELIRNPRVMKKVQDEIRTTLGDKKERIKEEDLNQLHYFKLVVKETLRLHPTTPLLLPRQTMSHIKIQGYDVPAKTQILVNVYAMGRDPKLWENADEFNPDRFLDSSVDFKGKNYEFIPFGSGRRICPGMTMGTILVEMALLNLLYFFDWGLAKQEEAKEIINGEENFLAFFQVLHH

SEQ ID NO: 36790 - protein, 490 aa, Arabidopsis thaliana
  peptide (1)..(490): Ceres Seq. ID no. 13504806
MSVFLCFLVLLPLILIFLNVLKPSKYKLPPGPKKLPIIGNLHQRRTLHPRNRRNLAEMYGPVALLQYGFVPVVAISSKEAAEEVLKINDLECCSRPEAAGMRATFYNFKDIGMAPFGDEWSLMRKLSVVELFSVKKLQSFKYIIEEENNLCVKKLSEFATRQSPVNLERAIFTLVGNIVCRIGYGINLYECDFFEADRVVDLVLKAEAVIRETVFSDFFPGRIGRFIDCISGQNRRLKNNFSVVDTFFQNVLNEHLKPGRESSTIVDLMIDMKKKQENDGDALKFTTDHLKGMISDIFVAGIGGVAGITLWGMTELIRNPRVMKKVQDEIRTTLGDKKERIKEEDLNQLHYFKLVVKETLRLHPTTPLLLPRQTMSHIKIQGYDVPAKTQILVNVYAMGRDPKLWENADEFNPDRFLDSSVDFKGKNYEFIPFGSGRRICPGMTMGTILVEMALLNLLYFFDWGLAKQEEAKEIINGEENFLAFFQVLHH

SEQ ID NO: 36791 - protein, 433 aa, Arabidopsis thaliana
  peptide (1)..(433): Ceres Seq. ID no. 13504807
MYGPVALLQYGFVPVVAISSKEAAEEVLKINDLECCSRPEAAGMRATFYNFKDIGMAPFGDEWSLMRKLSVVELFSVKKLQSFKYIIEEENNLCVKKLSEFATRQSPVNLERAIFTLVGNIVCRIGYGINLYECDFFEADRVVDLVLKAEAVIRETVFSDFFPGRIGRFIDCISGQNRRLKNNFSVVDTFFQNVLNEHLKPGRESSTIVDLMIDMKKKQENDGDALKFTTDHLKGMISDIFVAGIGGVAGITLWGMTELIRNPRVMKKVQDEIRTTLGDKKERIKEEDLNQLHYFKLVVKETLRLHPTTPLLLPRQTMSHIKIQGYDVPAKTQILVNVYAMGRDPKLWENADEFNPDRFLDSSVDFKGKNYEFIPFGSGRRICPGMTMGTILVEMALLNLLYFFDWGLAKQEEAKEIINGEENFLAFFQVLHH

SEQ ID NO: 36792 - DNA, 1463 bp, Arabidopsis thaliana
  misc_feature (1)..(1463): Ceres Seq. ID no. 12560077
  misc_feature (1)..(1463): Ortholog of  Ceres SEQ ID NO 14311882 as cited in SEQ ID NO 51638
  misc_feature (1)..(1463): Ortholog of  Ceres SEQ ID NO 14308803 as cited in SEQ ID NO 55038
  misc_feature (1)..(1463): Ortholog of  Ceres SEQ ID NO 13595437 as cited in SEQ ID NO 56562
ataattctagccaaatctttttagggtttcacaagttcacttaaaaagttgaaaagagtctttcttcttcaactattgtaaatgcgaaatggatcgaagagatgcaatgggattatccgggtcaggttcttactatatccatagaggattatccgggtcgggtcctccaacgtttcatggatcaccacagcaacagcaaggtcttcgtcacttacctaatcaaaactctccattcgggtcaggctccactggtttcggatctccttctttacacggtgatccttctctggcaacagcagccggaggagccggagctcttcctcatcatatcggcgttaatatgattgctcctcctccacctcccagtgaaactccgatgaaacgaaagagaggacggcctagaaaatacggtcaagacggctctgtttctttggctctgtcgtcttcctctgtttcgaccattactcccaacaactctaacaaacgcggccgtggtcgacctccgggctccggcaagaaacagagaatggcttccgttggtgaactgatgccttcatcttctggaatgagcttcacgccacatgttatcgcggtttcaataggagaagatattgcatcaaaggttatagctttctctcaacaaggtccgagagccatttgcgttttatctgcaagtggtgcagtctctactgcaacacttattcaaccatcagcatctcccggagccattaaatacgagggccggtttgaaatcctagcgttatcaacatcttatatagtggcaactgatggaagcttccgtaaccgaactggaaacttatcggtttcgcttgctagccccgatgggcgtgtgattggcggtgccattggtgggcctttaatagctgcaagtcctgttcaggttattgtagggagctttatatgggcagctccaaagatcaagagcaagaaacgagaagaagaagcttctgaagttgttcaagaaactgatgatcaccacgttctggacaataataacaacacgatttcgcctgtccctcagcagcagccaaaccaaaacctgatttggtcaacaggttcaaggcaaatggatatgcgtcatgctcatgctgatattgatttaatgcgcggttgatgatagcgagaaagaactctgtgtatataaagcatggaatctaggaagaagaagaaggaatataagctaacctctgaacaaaagtatgtggaaatgttagggaaaaagattatgtggaaatgttagggaaaaagattaactctattagtgtacctctcatatctctaagcttgtttggttttactgtttctgtgactctgaagatttgcagagttcctttctttctctgttttagattgttcagtctttatgtaatttgcttgcaattctgattctacagcttagattcagtacattgtgtagaagtttacatgggaacctgaaaatt

SEQ ID NO: 36793 - protein, 348 aa, Arabidopsis thaliana
  peptide (1)..(348): Ceres Seq. ID no. 12560078
MDRRDAMGLSGSGSYYIHRGLSGSGPPTFHGSPQQQQGLRHLPNQNSPFGSGSTGFGSPSLHGDPSLATAAGGAGALPHHIGVNMIAPPPPPSETPMKRKRGRPRKYGQDGSVSLALSSSSVSTITPNNSNKRGRGRPPGSGKKQRMASVGELMPSSSGMSFTPHVIAVSIGEDIASKVIAFSQQGPRAICVLSASGAVSTATLIQPSASPGAIKYEGRFEILALSTSYIVATDGSFRNRTGNLSVSLASPDGRVIGGAIGGPLIAASPVQVIVGSFIWAAPKIKSKKREEEASEVVQETDDHHVLDNNNNTISPVPQQQPNQNLIWSTGSRQMDMRHAHADIDLMRG

SEQ ID NO: 36794 - protein, 342 aa, Arabidopsis thaliana
  peptide (1)..(342): Ceres Seq. ID no. 12560079
MGLSGSGSYYIHRGLSGSGPPTFHGSPQQQQGLRHLPNQNSPFGSGSTGFGSPSLHGDPSLATAAGGAGALPHHIGVNMIAPPPPPSETPMKRKRGRPRKYGQDGSVSLALSSSSVSTITPNNSNKRGRGRPPGSGKKQRMASVGELMPSSSGMSFTPHVIAVSIGEDIASKVIAFSQQGPRAICVLSASGAVSTATLIQPSASPGAIKYEGRFEILALSTSYIVATDGSFRNRTGNLSVSLASPDGRVIGGAIGGPLIAASPVQVIVGSFIWAAPKIKSKKREEEASEVVQETDDHHVLDNNNNTISPVPQQQPNQNLIWSTGSRQMDMRHAHADIDLMRG

SEQ ID NO: 36795 - protein, 264 aa, Arabidopsis thaliana
  peptide (1)..(264): Ceres Seq. ID no. 12560080
MIAPPPPPSETPMKRKRGRPRKYGQDGSVSLALSSSSVSTITPNNSNKRGRGRPPGSGKKQRMASVGELMPSSSGMSFTPHVIAVSIGEDIASKVIAFSQQGPRAICVLSASGAVSTATLIQPSASPGAIKYEGRFEILALSTSYIVATDGSFRNRTGNLSVSLASPDGRVIGGAIGGPLIAASPVQVIVGSFIWAAPKIKSKKREEEASEVVQETDDHHVLDNNNNTISPVPQQQPNQNLIWSTGSRQMDMRHAHADIDLMRG

SEQ ID NO: 36796 - DNA, 1539 bp, Arabidopsis thaliana
  misc_feature (1)..(1539): Ceres Seq. ID no. 13501397
  misc_feature (1)..(1539): Ortholog of  Ceres SEQ ID NO 15171442 as cited in SEQ ID NO 51520
atgacaagttggttttttttttttttttttaattttttcatcttcttgggtttggttgggtcactcttcaggtcaggtgtgtaaaaaagaaagaaagaaaagagagattgttgtgttgtaacccctttgactaaaatctaatgaacttttttaacacaacaaaactccttcagatctgaaagggttcttcttctctcttagtctctttgtccttttattctccgtcgtcgtttcatgatctgactctctggtcttctcttcttcttcttcttcttctattttttcttacttcgtcactgttgtgtctgaacatgccacgccctttcttccataagttgattttctcatccactatccaagaaaaacgtctgagggtcccagataagtttgtgagtaaattcaaggatgagctttcggttgctgttgcactcacagtacctgatggtcatgtttggcgtgtaggactaaggaaagctgacaacaaaatttggtttcaagatggttggcaagagtttgttgaccgttactccattcgcattggttatcttttgatttttagatatgaaggaaactctgccttcagcgtctacattttcaatttatcccactctgagatcaattaccattccaccggtctcatggattccgctcacaaccacttcaaacgcgcccgtttgtttgaagaccttgaagatgaagatgccgaggtcatctttccttcttctgtgtacccatcaccacttcctgagtctacagtaccagccaacaaagggtatgctagttcagccatccaaaccttgttcactggaccagttaaagctgaagagccaacgccaaccccaaaaatacctaaaaagagagggaggaagaagaaaaatgctgatcctgaggaaataaactcatcagctccgcgagatgatgatccagagaaccgttcaaagttctacgagagtgcttctgcgagaaagagaaccgtgactgcagaagaaagagagagagccatcaatgcagccaaaacgttcgaaccaacaaaccctttcttcagagtggttctgcgaccatcctatctatacagaggttgcatcatgtatcttccttctgggtttgctgagaagtacctaagtgggatctccgggttcatcaaagtccagcttgcggagaaacaatggcctgttcgatgtctctacaaagccgggagagccaaattcagtcaaggatggtacgaattcactctagagaacaacttaggagaaggagacgtctgtgtgtttgagctgctcagaaccagagatttcgttttgaaagtgacagcctttcgagtcaacgagtacgtctgaacaaagcattatggtgtgatcattctggatttgcaagtacaatgtcgtgtaggagtatcttaatttaaaaacaactaaaaaactctcttctggtctgtgtcattattgcgtcagtgtctcgttttttctctcgggtttactttgtgttatcgatgtggataagttgtttttacctcattatatataacctcttgagtggaac

SEQ ID NO: 36797 - protein, 341 aa, Arabidopsis thaliana
  peptide (1)..(341): Ceres Seq. ID no. 13501398
MPRPFFHKLIFSSTIQEKRLRVPDKFVSKFKDELSVAVALTVPDGHVWRVGLRKADNKIWFQDGWQEFVDRYSIRIGYLLIFRYEGNSAFSVYIFNLSHSEINYHSTGLMDSAHNHFKRARLFEDLEDEDAEVIFPSSVYPSPLPESTVPANKGYASSAIQTLFTGPVKAEEPTPTPKIPKKRGRKKKNADPEEINSSAPRDDDPENRSKFYESASARKRTVTAEERERAINAAKTFEPTNPFFRVVLRPSYLYRGCIMYLPSGFAEKYLSGISGFIKVQLAEKQWPVRCLYKAGRAKFSQGWYEFTLENNLGEGDVCVFELLRTRDFVLKVTAFRVNEYV

SEQ ID NO: 36798 - protein, 232 aa, Arabidopsis thaliana
  peptide (1)..(232): Ceres Seq. ID no. 13501399
MDSAHNHFKRARLFEDLEDEDAEVIFPSSVYPSPLPESTVPANKGYASSAIQTLFTGPVKAEEPTPTPKIPKKRGRKKKNADPEEINSSAPRDDDPENRSKFYESASARKRTVTAEERERAINAAKTFEPTNPFFRVVLRPSYLYRGCIMYLPSGFAEKYLSGISGFIKVQLAEKQWPVRCLYKAGRAKFSQGWYEFTLENNLGEGDVCVFELLRTRDFVLKVTAFRVNEYV

SEQ ID NO: 36799 - DNA, 796 bp, Arabidopsis thaliana
  misc_feature (1)..(796): Ceres Seq. ID no. 12420942
  misc_feature (1)..(796): Ortholog of  Ceres SEQ ID NO 12364737 as cited in SEQ ID NO 51089
  misc_feature (1)..(796): Ortholog of  Ceres SEQ ID NO 13595567 as cited in SEQ ID NO 56760
  misc_feature (1)..(796): Ortholog of  Ceres SEQ ID NO 15180805 as cited in SEQ ID NO 0
ttgtcaaaagctgattcttcgccttatggcatcgattttgcaccttcgaacggccaacccacgggaagattcactaatggtcgaaccatttccgatattgtgggtgaagccttaggagcaaaatcaccaccaccaccatatcttgaaccaaacactgaggctaacacaattctcaatggaatcaactatgcttctggtgctgctggaatcttggacgacactggacttctggttcatcggggcgagttccgctgagagaacaagtgagtaattttgagaagagtagagaatatatggtaagcgtgattggtgaaaatggtacaaaagagatgttgaagaatgcaatgttcacaatcacaattggatcaaatgatattttgaattatattcaaccatcaatacctttcttctctcaagacaagctccccactgatgtcctacaagattccatggtcctccatttaaccacacatcttaagcgattgcatcagctaggaggtaggaagttcgtggtggttggagtagggccactcggttgcataccctttgctcgagcgttgaatttaataccagccggaaaatgctccgaacaagtcaaccaagtagtccgaggttataacatgaagcttatacactctcttaagacattgaacaatgagttaagatccgaagattacaacactacatttgtctacgccaactcttacgacctattcttgaaactagttttgaactatcaactatttggcttgaagaacgcagacaagccgtgttgtggcggctactttccaccgtt

SEQ ID NO: 36800 - protein, 167 aa, Arabidopsis thaliana
  peptide (1)..(167): Ceres Seq. ID no. 12420943
MVSVIGENGTKEMLKNAMFTITIGSNDILNYIQPSIPFFSQDKLPTDVLQDSMVLHLTTHLKRLHQLGGRKFVVVGVGPLGCIPFARALNLIPAGKCSEQVNQVVRGYNMKLIHSLKTLNNELRSEDYNTTFVYANSYDLFLKLVLNYQLFGLKNADKPCCGGYFPP

SEQ ID NO: 36801 - protein, 155 aa, Arabidopsis thaliana
  peptide (1)..(155): Ceres Seq. ID no. 12420944
MLKNAMFTITIGSNDILNYIQPSIPFFSQDKLPTDVLQDSMVLHLTTHLKRLHQLGGRKFVVVGVGPLGCIPFARALNLIPAGKCSEQVNQVVRGYNMKLIHSLKTLNNELRSEDYNTTFVYANSYDLFLKLVLNYQLFGLKNADKPCCGGYFPP

SEQ ID NO: 36802 - protein, 150 aa, Arabidopsis thaliana
  peptide (1)..(150): Ceres Seq. ID no. 12420945
MFTITIGSNDILNYIQPSIPFFSQDKLPTDVLQDSMVLHLTTHLKRLHQLGGRKFVVVGVGPLGCIPFARALNLIPAGKCSEQVNQVVRGYNMKLIHSLKTLNNELRSEDYNTTFVYANSYDLFLKLVLNYQLFGLKNADKPCCGGYFPP

SEQ ID NO: 36803 - DNA, 611 bp, Arabidopsis thaliana
  misc_feature (1)..(611): Ceres Seq. ID no. 12393994
  misc_feature (1)..(611): Ortholog of  Ceres SEQ ID NO 13595613 as cited in SEQ ID NO 59866
aataataatattcgagtagaagaagaaagatccagacaaaagcttaagcaagacctctctgtcttcgtctctctctctctctctttgtctccgccatgacaagctcttcatctcctgcacgcaaggcgttaagcaagatcgcgtgtaataggttacaaaaggagttatcagagtggcaagtaaatccaccgactgggtttaagcacagagttactgataatcttcaaaaatgggtaattgaggtaacaggagcacctggtacgctttacgctaatgaaacttataatcttcaggttgagtttcctcaacattatcctatggaagctcctcaggtgatttttgttccaccagctccgttacatcctcatatttacagcaatggacatatttgtttagatattctgtatgactcatggtctccagcaatgacagtgagttcagtctgtatcagcattctctcgatgctatcaagttcacccgaaaagcaacgccccacttttttttctgtaacggatcattatgtataaatgacatctgaaatgtttcagtgtctgaattaacaccttgtgcttttgtcctttctgaagtgaaaaaccatggagattttaggc

SEQ ID NO: 36804 - protein, 143 aa, Arabidopsis thaliana
  peptide (1)..(143): Ceres Seq. ID no. 12393995
MTSSSSPARKALSKIACNRLQKELSEWQVNPPTGFKHRVTDNLQKWVIEVTGAPGTLYANETYNLQVEFPQHYPMEAPQVIFVPPAPLHPHIYSNGHICLDILYDSWSPAMTVSSVCISILSMLSSSPEKQRPTFFSVTDHYV

SEQ ID NO: 36805 - DNA, 529 bp, Arabidopsis thaliana
  misc_feature (1)..(529): Ceres Seq. ID no. 13491786
  misc_feature (1)..(529): Ortholog of  Ceres SEQ ID NO 12556794 as cited in SEQ ID NO 23
  misc_feature (1)..(529): Ortholog of  Ceres SEQ ID NO 13595787 as cited in SEQ ID NO 59785
ataacacaaatacaccaaaaaaaaaaaaacagaaagtaacatgagatctctcttattagccgtgtgcctggttcttgctttacactgcggtgaagcagccgtgtcttgcaacacggtgattgcggatctttacccttgcttatcctacgtgactcagggcggaccggtcccaaccctctgctgcaacggtctcacaacactcaagagtcaggctcaaacttctgtggaccgtcagggggtctgtcgttgcatcaaatctgctattggaggactcactctctctcctagaaccatccaaaatgctttggaattgccttctaaatgtggtgtcgatctcccttacaagttcagcccttccactgactgcgacagtatccagtgagacaagcagaaaatcttaaaggaagctactacaagaactataataacctaataattaataaatgagggcattggtttgctagttgctaaattgatcagtgatgtattgncattttgaatgtnctaatctcagcaggcacttatctcc

SEQ ID NO: 36806 - protein, 113 aa, Arabidopsis thaliana; identical to SEQ ID NO: 36177
  peptide (1)..(113): Ceres Seq. ID no. 13491787

SEQ ID NO: 36807 - DNA, 610 bp, Arabidopsis thaliana
  misc_feature (1)..(610): Ceres Seq. ID no. 12420784
  misc_feature (1)..(610): Ortholog of  Ceres SEQ ID NO 15175269 as cited in SEQ ID NO 63840
  misc_feature (1)..(610): Ortholog of  Ceres SEQ ID NO 15176141 as cited in SEQ ID NO 0
ctcacttttgttctctgttgcatcatcttccaaactcccgaagaagaagaaaataactacaatgagtcaacaacctcctgctgttggtgttcctccttctcatgcttatccggcggaaggaccacccaaggacgcttatccacctccgggacaaccctatcctcagcaaggatatcctcctccgcagggatatcctcaacaaggttatcctcctcaaggttatcctccgcaggggtaccctgcaacaaggatatcctcaacaaggttacccacctcagcaacaacagcaacagaaacacagtcctggtatgcttgaaggatgtattgctgctctgtgctgttgctgtgtcttggacgcttgcttctgagtggaggtctccgcttgaagctgcaaaattggtttataccgatgatctcatctcattctctttcgtttctctacagacttgactctcttctaagcattttatcttagttactattagattatttggattttgccaaatgggaatgtaaatggttgggtgacccaattcatgttgcacattattggcttttaccctctgctttttcttcctagcttcatctaatgattgcaccctatttattt

SEQ ID NO: 36808 - protein, 149 aa, Arabidopsis thaliana
  peptide (1)..(149): Ceres Seq. ID no. 12420785
LTFVLCCIIFQTPEEEENNYNESTTSCCWCSSFSCLSGGRTTQGRLSTSGTTLSSARISSSAGISSTRLSSSRLSSAGVPCNKDILNKVTHLSNNSNRNTVLVCLKDVLLLCAVAVSWTLASEWRSPLEAAKLVYTDDLISFSFVSLQT

SEQ ID NO: 36809 - protein, 104 aa, Arabidopsis thaliana
  peptide (1)..(104): Ceres Seq. ID no. 12420786
SLLFSVASSSKLPKKKKITTMSQQPPAVGVPPSHAYPAEGPPKDAYPPPGQPYPQQGYPPPQGYPQQGYPPQGYPPQGYPATRISSTRLPTSATTATETQSWYA

SEQ ID NO: 36810 - protein, 88 aa, Arabidopsis thaliana
  peptide (1)..(88): Ceres Seq. ID no. 12420787
MLIRRKDHPRTLIHLRDNPILSKDILLRRDILNKVILLKVILRRGTLQQGYPQQGYPPQQQQQQKHSPGMLEGCIAALCCCCVLDACF

SEQ ID NO: 36811 - protein, 84 aa, Arabidopsis thaliana
  peptide (1)..(84): Ceres Seq. ID no. 12420788
MSQQPPAVGVPPSHAYPAEGPPKDAYPPPGQPYPQQGYPPPQGYPQQGYPPQGYPPQGYPATRISSTRLPTSATTATETQSWYA

SEQ ID NO: 36812 - DNA, 1494 bp, Arabidopsis thaliana
  misc_feature (1)..(1494): Ceres Seq. ID no. 13621916
  misc_feature (1)..(1494): Ortholog of  Ceres SEQ ID NO 15174591 as cited in SEQ ID NO 53383
  misc_feature (1)..(1494): Ortholog of  Ceres SEQ ID NO 14310784 as cited in SEQ ID NO 58503
cattatggtgctgataagtatattgcatcgatggcaaatatgcttaactatcctaacaacgtgctgaacaacggtggaaggctaaggacggttttcgatgttggttgtggtgttgcgagttttggaggttatcttttatcatcggatattctcacaatgtccttggctccaaatgatgtgcatcagaaccaaatccaatttgctcttgagagagggattcctgcctccctcggtgttttagggacaaagaggctcccatacccaagcagatcttttgaactttctcactgttcacgttgcagaatcgattggctacaaagagacgggattcttcttctcgagctagacagagtacttagacctggtggttattttgcatattcatctccagaggcatatgcacaagatgaagaggatcttagaatctggagagaaatgagtgctcttgtggagcgcatgtgttggaagatcgcggcaaaaaggaatcaaaccgttatttggcagaaacctttgacaaatgattgttatctagaaagagaacctggaactcagcctcctctttgccgttctgataatgaccctgatgctgtgtggggcgtaaacatggaagcttgcattacttcttacagtgaccatgaccacaaaaccaagggaagtggattagctccatggccagctcggttaacctctcctcctcccagacttgctgattttggatattcaacgggcatgtttgagaaggacacggaactttggaggcagagagtagatacttattgggatctcttgagtccaagaatcgaatcagatacagtgaggaacataatggacatgaaagcaagcatgggctcttttgctgctgctctgaaagaaaaagatgtctgggtaatgaatgttgttcctgaggacggacctaacacgcttaaactgatatatgacagaggtttaatgggcgcggttcatagctggtgtgaagcattctcgacatatccaaggacatatgatctcctccatgcttgggatattatatcggatatcaagaaaaaaggatgtagtgaagtggatttgttactggagatggatcgaatactgcgcccgagcgggtttataatcataagggataaacaaagagtggtggattttgtgaagaagtatctaaaggcattgcattgggaagaagtaggtaccaagacagactcagattcagatcaagattcagacaatgttgtattcattgtccagaagaagctgtggttgactagtgaaagccttagagatatggagtgatgagtaagccacacgatacacaaaaattacgaccaatgatcatacaaccaacaaatttcattattgtagtagcaacattatttattaacgttgtttttaatttttctaattattgtatctttcttacattcttataagtgatgttgtttgtatgattttggtagagaagagaagacacgtataagtaaagaacgatagattcttttg

SEQ ID NO: 36813 - protein, 428 aa, Arabidopsis thaliana
  peptide (1)..(428): Ceres Seq. ID no. 13621917
HYGADKYIASMANMLNYPNNVLNNGGRLRTVFDVGCGVASFGGYLLSSDILTMSLAPNDVHQNQIQFALERGIPASLGVLGTKRLPYPSRSFELSHCSRCRIDWLQRDGILLLELDRVLRPGGYFAYSSPEAYAQDEEDLRIWREMSALVERMCWKIAAKRNQTVIWQKPLTNDCYLEREPGTQPPLCRSDNDPDAVWGVNMEACITSYSDHDHKTKGSGLAPWPARLTSPPPRLADFGYSTGMFEKDTELWRQRVDTYWDLLSPRIESDTVRNIMDMKASMGSFAAALKEKDVWVMNVVPEDGPNTLKLIYDRGLMGAVHSWCEAFSTYPRTYDLLHAWDIISDIKKKGCSEVDLLLEMDRILRPSGFIIIRDKQRVVDFVKKYLKALHWEEVGTKTDSDSDQDSDNVVFIVQKKLWLTSESLRDME

SEQ ID NO: 36814 - protein, 418 aa, Arabidopsis thaliana
  peptide (1)..(418): Ceres Seq. ID no. 13621918
MANMLNYPNNVLNNGGRLRTVFDVGCGVASFGGYLLSSDILTMSLAPNDVHQNQIQFALERGIPASLGVLGTKRLPYPSRSFELSHCSRCRIDWLQRDGILLLELDRVLRPGGYFAYSSPEAYAQDEEDLRIWREMSALVERMCWKIAAKRNQTVIWQKPLTNDCYLEREPGTQPPLCRSDNDPDAVWGVNMEACITSYSDHDHKTKGSGLAPWPARLTSPPPRLADFGYSTGMFEKDTELWRQRVDTYWDLLSPRIESDTVRNIMDMKASMGSFAAALKEKDVWVMNVVPEDGPNTLKLIYDRGLMGAVHSWCEAFSTYPRTYDLLHAWDIISDIKKKGCSEVDLLLEMDRILRPSGFIIIRDKQRVVDFVKKYLKALHWEEVGTKTDSDSDQDSDNVVFIVQKKLWLTSESLRDME

SEQ ID NO: 36815 - protein, 415 aa, Arabidopsis thaliana
  peptide (1)..(415): Ceres Seq. ID no. 13621919
MLNYPNNVLNNGGRLRTVFDVGCGVASFGGYLLSSDILTMSLAPNDVHQNQIQFALERGIPASLGVLGTKRLPYPSRSFELSHCSRCRIDWLQRDGILLLELDRVLRPGGYFAYSSPEAYAQDEEDLRIWREMSALVERMCWKIAAKRNQTVIWQKPLTNDCYLEREPGTQPPLCRSDNDPDAVWGVNMEACITSYSDHDHKTKGSGLAPWPARLTSPPPRLADFGYSTGMFEKDTELWRQRVDTYWDLLSPRIESDTVRNIMDMKASMGSFAAALKEKDVWVMNVVPEDGPNTLKLIYDRGLMGAVHSWCEAFSTYPRTYDLLHAWDIISDIKKKGCSEVDLLLEMDRILRPSGFIIIRDKQRVVDFVKKYLKALHWEEVGTKTDSDSDQDSDNVVFIVQKKLWLTSESLRDME

SEQ ID NO: 36816 - DNA, 592 bp, Arabidopsis thaliana
  misc_feature (1)..(592): Ceres Seq. ID no. 12421280
  misc_feature (1)..(592): Ortholog of  Ceres SEQ ID NO 13594809 as cited in SEQ ID NO 51847
  misc_feature (1)..(592): Ortholog of  Ceres SEQ ID NO 15173998 as cited in SEQ ID NO 0
  misc_feature (1)..(592): Ortholog of  Ceres SEQ ID NO 15178333 as cited in SEQ ID NO 0
attcttcatttcctctgcctctttctcagatcacaaaaccctaatttcgaatctttattcttcagaatggctttctgtaacaaactcggtggtctattgagacaaaacatttcttctaacggaaatgttccggttacgtctatgctcggatctctccggttgatgtctaccaagcttttcatcggaggtctctcatggggaaccgatgacgcatccttaagggatgcttttgctcacttcggtgacgttgttgatgctaaagttatcgttgatagagagacaggaagatcaagggggtttggatttgtcaacttcaatgatgagggcgctgcaactgctgccatatcagagatggacggaaaggaactgaatggtcgtcacatccgagtgaatcctgctaatggatagaccagtggcagctacggtggtggtgatggtggtggttactaaacagaggatgtggttgtgaagaagagttaatggttctgtttagttggtttcttctattgaatcttatgttagtacaaaacctgaatgggatttgctgaaaactcattactcttttttttttggttaccaatcaatttggttg

SEQ ID NO: 36817 - protein, 135 aa, Arabidopsis thaliana
  peptide (1)..(135): Ceres Seq. ID no. 12421281
ILHFLCLFLRSQNPNFESLFFRMAFCNKLGGLLRQNISSNGNVPVTSMLGSLRLMSTKLFIGGLSWGTDDASLRDAFAHFGDVVDAKVIVDRETGRSRGFGFVNFNDEGAATAAISEMDGKELNGRHIRVNPANG

SEQ ID NO: 36818 - protein, 113 aa, Arabidopsis thaliana
  peptide (1)..(113): Ceres Seq. ID no. 12421282
MAFCNKLGGLLRQNISSNGNVPVTSMLGSLRLMSTKLFIGGLSWGTDDASLRDAFAHFGDVVDAKVIVDRETGRSRGFGFVNFNDEGAATAAISEMDGKELNGRHIRVNPANG

SEQ ID NO: 36819 - protein, 88 aa, Arabidopsis thaliana
  peptide (1)..(88): Ceres Seq. ID no. 12421283
MLGSLRLMSTKLFIGGLSWGTDDASLRDAFAHFGDVVDAKVIVDRETGRSRGFGFVNFNDEGAATAAISEMDGKELNGRHIRVNPANG

SEQ ID NO: 36820 - DNA, 1030 bp, Arabidopsis thaliana
  misc_feature (1)..(1030): Ceres Seq. ID no. 13576627
  misc_feature (1)..(1030): Ortholog of  Ceres SEQ ID NO 15174694 as cited in SEQ ID NO 54754
  misc_feature (1)..(1030): Ortholog of  Ceres SEQ ID NO 15175666 as cited in SEQ ID NO 54985
  misc_feature (1)..(1030): Ortholog of  Ceres SEQ ID NO 12388689 as cited in SEQ ID NO 0
accgttaaagatgacgacgacgactgcttctctggttaagacttttctgtttcggtgcgactcgttttcatctttcaaattcaaatgcaaattcgaatctcccgcgaaaacgcgattgctctctccggcgaccgagaaacatgttgtcagatcgtcaagagcctggcgtattcgttgcttatccgatgatcctggttcgagtcatgttttcgttgcaagtagaaggaaaatggtagtcttgttgtcgacggtgcagcttctgtctcatatgcttccgcaaaacgggaacgcagctgagatttatccggtgatgcaaaacgaaataaggaaagtggtgacaaagggcaaggctgctggtgtgcttcgtttagtgtttcatgatgctggaacctttgaactggacgatcattctggtggcatcaacggatctattgcttatgaacttgagagacctgagaacataggtttgaagaaatccttaaaggcactaaatccctctcttttatctgttggcgttctagcgaaagcaaaggttaaggttgacgagatacaaccagtgtcttgggcggatatgatctctgtcgctgggtctgaagcagtttcaatatgtggcggcccaacaattccagtagttttgggaagacttgattcagcgcaacctgatccagaaggcaagctacctccagaaaccctgagtgcctcgggattgaaagaatgcttcaaaagaaaaggattttcgacccaggagcttgttgccttatctggggcacatacgattgggagtaaaggctttggagatccgacagtttttgacaatgcatactacaaaatccttcttgaaaaaccatggacgtcaacttctaagatgacgagcatggtcgggcttccttcggatcatgctttagtgcaggatgatgagtgcttaaggtgggtgaaacggtatgcagaagaccaagacaagttcttcgaagacttcacaaatgcttatatcaaactagtaaattctggggccaaatggaatatgttatga

SEQ ID NO: 36821 - protein, 342 aa, Arabidopsis thaliana
  peptide (1)..(342): Ceres Seq. ID no. 13576628
PLKMTTTTASLVKTFLFRCDSFSSFKFKCKFESPAKTRLLSPATEKHVVRSSRAWRIRCLSDDPGSSHVFVASRRKMVVLLSTVQLLSHMLPQNGNAAEIYPVMQNEIRKVVTKGKAAGVLRLVFHDAGTFELDDHSGGINGSIAYELERPENIGLKKSLKALNPSLLSVGVLAKAKVKVDEIQPVSWADMISVAGSEAVSICGGPTIPVVLGRLDSAQPDPEGKLPPETLSASGLKECFKRKGFSTQELVALSGAHTIGSKGFGDPTVFDNAYYKILLEKPWTSTSKMTSMVGLPSDHALVQDDECLRWVKRYAEDQDKFFEDFTNAYIKLVNSGAKWNML

SEQ ID NO: 36822 - protein, 339 aa, Arabidopsis thaliana
  peptide (1)..(339): Ceres Seq. ID no. 13576629
MTTTTASLVKTFLFRCDSFSSFKFKCKFESPAKTRLLSPATEKHVVRSSRAWRIRCLSDDPGSSHVFVASRRKMVVLLSTVQLLSHMLPQNGNAAEIYPVMQNEIRKVVTKGKAAGVLRLVFHDAGTFELDDHSGGINGSIAYELERPENIGLKKSLKALNPSLLSVGVLAKAKVKVDEIQPVSWADMISVAGSEAVSICGGPTIPVVLGRLDSAQPDPEGKLPPETLSASGLKECFKRKGFSTQELVALSGAHTIGSKGFGDPTVFDNAYYKILLEKPWTSTSKMTSMVGLPSDHALVQDDECLRWVKRYAEDQDKFFEDFTNAYIKLVNSGAKWNML

SEQ ID NO: 36823 - protein, 266 aa, Arabidopsis thaliana
  peptide (1)..(266): Ceres Seq. ID no. 13576630
MVVLLSTVQLLSHMLPQNGNAAEIYPVMQNEIRKVVTKGKAAGVLRLVFHDAGTFELDDHSGGINGSIAYELERPENIGLKKSLKALNPSLLSVGVLAKAKVKVDEIQPVSWADMISVAGSEAVSICGGPTIPVVLGRLDSAQPDPEGKLPPETLSASGLKECFKRKGFSTQELVALSGAHTIGSKGFGDPTVFDNAYYKILLEKPWTSTSKMTSMVGLPSDHALVQDDECLRWVKRYAEDQDKFFEDFTNAYIKLVNSGAKWNML

SEQ ID NO: 36824 - DNA, 1228 bp, Arabidopsis thaliana
  misc_feature (1)..(1228): Ceres Seq. ID no. 12337565
  misc_feature (1)..(1228): Ortholog of  Ceres SEQ ID NO 14307374 as cited in SEQ ID NO 54073
ttcagaaagtgttcataactggtgtccccaaactcaaaagatctgagattgaagctgcttgtgaagattttagtaatgtcattgggtcttgccccattggtacattgttcaaagggacgctatcaagtggggtggagatagctgtggcttctgttgctactgcgtctgccaaagaatggacaaataacatagaaatgcagttcagaaagaagatcgaaatgttatccaagataaaccacaagaattttgtcaaccttcttggttactgtgaagaagaagaacctttcactaggatcttggtctttgaatatgcatcaaacggaacagtctttgaacatttacactataaagaatcagaacacttggactgggtaatgcggctaagaatagccatgggcatagcttattgccttgaccatatgcacggactcaagccacctatagtccacagcaatcttctctcatcatcagttcaactcacagaggactatgcagtcaaaattgcggatttcaattttggatacctaaaaggcccatccgagacagaaagcagcaccaatgcactcatagatacaaacatctcagaaacaacacaagaagacaatgttcacagcttcgggttgctgttgtttgaactgatgacaggaaaactcccggagtcggttaaaaaaggcgactcgatagataccggattggctgtcttcttgagaggaaagacattaagggagatggtggatccgacaattgaaagctttgacgagaagattgagaatataggtgaagtgatcaaaagctgcataagagcagacgcgaaacagagaccgataatgaaggaagtcacagggagattacgagagatcactggattatcaccagacgacactatcccaaaactttcaccgctctggtgggcagagctggaagttctgtccactgcgtgaagagacaactactgaacttcacaaaaaaatctgtaagtattaatatgaagatttgagtgaggtttttgagtctcttagaagctcttggcttctctttaggctactttcatctatcaatctatatataagtatggaacttagtttatataacggctttaaaattcggtggatctatttggtcgtttatgtcgtaaacagaaaacggtaatacccctttttggtgtgcataatgttggtgggtggttactgtctttgtaaattagtgttactatgttcttgatatgttt

SEQ ID NO: 36825 - protein, 312 aa, Arabidopsis thaliana
  peptide (1)..(312): Ceres Seq. ID no. 12337566
QKVFITGVPKLKRSEIEAACEDFSNVIGSCPIGTLFKGTLSSGVEIAVASVATASAKEWTNNIEMQFRKKIEMLSKINHKNFVNLLGYCEEEEPFTRILVFEYASNGTVFEHLHYKESEHLDWVMRLRIAMGIAYCLDHMHGLKPPIVHSNLLSSSVQLTEDYAVKIADFNFGYLKGPSETESSTNALIDTNISETTQEDNVHSFGLLLFELMTGKLPESVKKGDSIDTGLAVFLRGKTLREMVDPTIESFDEKIENIGEVIKSCIRADAKQRPIMKEVTGRLREITGLSPDDTIPKLSPLWWAELEVLSTA

SEQ ID NO: 36826 - protein, 248 aa, Arabidopsis thaliana
  peptide (1)..(248): Ceres Seq. ID no. 12337567
MQFRKKIEMLSKINHKNFVNLLGYCEEEEPFTRILVFEYASNGTVFEHLHYKESEHLDWVMRLRIAMGIAYCLDHMHGLKPPIVHSNLLSSSVQLTEDYAVKIADFNFGYLKGPSETESSTNALIDTNISETTQEDNVHSFGLLLFELMTGKLPESVKKGDSIDTGLAVFLRGKTLREMVDPTIESFDEKIENIGEVIKSCIRADAKQRPIMKEVTGRLREITGLSPDDTIPKLSPLWWAELEVLSTA

SEQ ID NO: 36827 - protein, 240 aa, Arabidopsis thaliana
  peptide (1)..(240): Ceres Seq. ID no. 12337568
MLSKINHKNFVNLLGYCEEEEPFTRILVFEYASNGTVFEHLHYKESEHLDWVMRLRIAMGIAYCLDHMHGLKPPIVHSNLLSSSVQLTEDYAVKIADFNFGYLKGPSETESSTNALIDTNISETTQEDNVHSFGLLLFELMTGKLPESVKKGDSIDTGLAVFLRGKTLREMVDPTIESFDEKIENIGEVIKSCIRADAKQRPIMKEVTGRLREITGLSPDDTIPKLSPLWWAELEVLSTA

SEQ ID NO: 36828 - DNA, 950 bp, Arabidopsis thaliana
  misc_feature (1)..(950): Ceres Seq. ID no. 13491028
  misc_feature (1)..(950): Ortholog of  Ceres SEQ ID NO 12609037 as cited in SEQ ID NO 51306
  misc_feature (1)..(950): Ortholog of  Ceres SEQ ID NO 12610391 as cited in SEQ ID NO 55942
  misc_feature (1)..(950): Ortholog of  Ceres SEQ ID NO 14309068 as cited in SEQ ID NO 0
actcttactctgttctcgctacagaatctcctgggaaaaaaaaaagaaacttgatccacccgaattccccaaatcttcacaatttctggaaactctctcgatcgtgaagcagaaaagtgaggttccaaatgggttctgtttcgggtcaaacccgaattacaacgatgaacctctcgctctcaacagcagagaagaaccctaatttccgctcgtcgcttctcaattctaagaacgcaatttcagatactttaggggtctcttccaaatgcagtacattcctcaggggtcaatttcaaagaatacatttttcttggctacaacacactcgacctttgagaaaacgaacagtatttggtcacgtgagctgcgtcatgccgttaacggaagagaatgtggagagagtgttagacgaagtacgaccatctctaatggccgacggaggaaacgtggcgttgcacgaaatcgacggacttgtggtggttttaaagctacaaggagcttgtggttcgtgtcctagctcatcaatgacgttgaagatgggaatcgagagtcgtcttcgagacaagattccagagatcatgtccgttgagcagtttcttgaatccgagacaggaggtttagagctgaacgatgagaacattgagaaggttctctctgagttaaggccgtacctatccggtactggaggtggggggcttgagttagttgagattgatggttacgtggtcaaggttcgactcactggaccagctgctggagtcatgactgttcgtgtcgcgttgactcaaaaactgagggaaacaattccttctataggtgcagtccagcttctagagtgacattaacctttttattttgtaacttatatacaaggcctatttttgattcaatatattttatttccaattatataattagtacaactaatacaataaccatttctgttgaag

SEQ ID NO: 36829 - protein, 236 aa, Arabidopsis thaliana
  peptide (1)..(236): Ceres Seq. ID no. 13491029
MGSVSGQTRITTMNLSLSTAEKNPNFRSSLLNSKNAISDTLGVSSKCSTFLRGQFQRIHFSWLQHTRPLRKRTVFGHVSCVMPLTEENVERVLDEVRPSLMADGGNVALHEIDGLVVVLKLQGACGSCPSSSMTLKMGIESRLRDKIPEIMSVEQFLESETGGLELNDENIEKVLSELRPYLSGTGGGGLELVEIDGYVVKVRLTGPAAGVMTVRVALTQKLRETIPSIGAVQLLE

SEQ ID NO: 36830 - protein, 224 aa, Arabidopsis thaliana
  peptide (1)..(224): Ceres Seq. ID no. 13491030
MNLSLSTAEKNPNFRSSLLNSKNAISDTLGVSSKCSTFLRGQFQRIHFSWLQHTRPLRKRTVFGHVSCVMPLTEENVERVLDEVRPSLMADGGNVALHEIDGLVVVLKLQGACGSCPSSSMTLKMGIESRLRDKIPEIMSVEQFLESETGGLELNDENIEKVLSELRPYLSGTGGGGLELVEIDGYVVKVRLTGPAAGVMTVRVALTQKLRETIPSIGAVQLLE

SEQ ID NO: 36831 - protein, 155 aa, Arabidopsis thaliana
  peptide (1)..(155): Ceres Seq. ID no. 13491031
MPLTEENVERVLDEVRPSLMADGGNVALHEIDGLVVVLKLQGACGSCPSSSMTLKMGIESRLRDKIPEIMSVEQFLESETGGLELNDENIEKVLSELRPYLSGTGGGGLELVEIDGYVVKVRLTGPAAGVMTVRVALTQKLRETIPSIGAVQLLE

SEQ ID NO: 36832 - DNA, 1080 bp, Arabidopsis thaliana
  misc_feature (1)..(1080): Ceres Seq. ID no. 12337138
  misc_feature (1)..(1080): Ortholog of  Ceres SEQ ID NO 12636774 as cited in SEQ ID NO 372
  misc_feature (1)..(1080): Ortholog of  Ceres SEQ ID NO 13582350 as cited in SEQ ID NO 56734
  misc_feature (1)..(1080): Ortholog of  Ceres SEQ ID NO 12476493 as cited in SEQ ID NO 58163
  misc_feature (1)..(1080): Ortholog of  Ceres SEQ ID NO 13597295 as cited in SEQ ID NO 63743
  misc_feature (1)..(1080): Ortholog of  Ceres SEQ ID NO 12617090 as cited in SEQ ID NO 64005
  misc_feature (1)..(1080): Ortholog of  Ceres SEQ ID NO 13597439 as cited in SEQ ID NO 64081
  misc_feature (1)..(1080): Ortholog of  Ceres SEQ ID NO 13597233 as cited in SEQ ID NO 64370
gatcacaaaaaattagaatcatggaggtcgagagagaccagcacaagcctccgttgtctctacaaaacaacaaaatcccatcatcacaaaacttcccagtcgtcgacctaagcaacaccaatggggagctcgtggcgcgtaaagtggcaaaggcgagcgaagagtggggaatttttcaggtagttaaccacgggatcccaaccgaactaatccggaggttgcacaaggtggatacacagttctttgagctcccagagtccaagaaagaagccgtggccaaaccagcgaactccaaagagatacaaggatatgagatggatgatgtacaaggtagaaggagtcatatcttccataatctatatccatcatcgtcagtcaattatgcattctggcctaagaatcctcctgaatacagagaggtgactgaggagtttgcaaagcatgcaaagcagctagcggaagagatcctcggtttgctatccgaagggttaggtttacaacgtgagatgttgaagttagcattcggggacgatagtgctggttatcttatgaagatcaactattaccggccgtgtccagagccagattgggtcatgggaataaaagcccacactgatttcaatgaactcacacttctcattcccaatgaaattttcggacttcaagtgttcaaggaagaccgctggcttgatgtagattatatatatcccgcggttattatcatcatcggagatcagatcatgaagatgagcaacggaaggtacaacaatgtgttgcatagaaccttgatggataaaaagaaaacgaggatgtcgtcggtggttcatatcaagcctccttatgatatggttgtgaagccatttcccgaactcaccagcggcgataatcctcccaagttcgagcctttaacttaccaggattacatagacattgaagtccccaagctttctcgactgatcaagaattgacttctttgtcgttgtatgtatgttgtttgttgttgctctgtttcatttggccgtttggcattgttgtaaccggtttctattaattgaagttcaaacaaaaaaaatttgactc

SEQ ID NO: 36833 - protein, 321 aa, Arabidopsis thaliana
  peptide (1)..(321): Ceres Seq. ID no. 12337139
SQKIRIMEVERDQHKPPLSLQNNKIPSSQNFPVVDLSNTNGELVARKVAKASEEWGIFQVVNHGIPTELIRRLHKVDTQFFELPESKKEAVAKPANSKEIQGYEMDDVQGRRSHIFHNLYPSSSVNYAFWPKNPPEYREVTEEFAKHAKQLAEEILGLLSEGLGLQREMLKLAFGDDSAGYLMKINYYRPCPEPDWVMGIKAHTDFNELTLLIPNEIFGLQVFKEDRWLDVDYIYPAVIIIIGDQIMKMSNGRYNNVLHRTLMDKKKTRMSSVVHIKPPYDMVVKPFPELTSGDNPPKFEPLTYQDYIDIEVPKLSRLIKN

SEQ ID NO: 36834 - protein, 315 aa, Arabidopsis thaliana
  peptide (1)..(315): Ceres Seq. ID no. 12337140
MEVERDQHKPPLSLQNNKIPSSQNFPVVDLSNTNGELVARKVAKASEEWGIFQVVNHGIPTELIRRLHKVDTQFFELPESKKEAVAKPANSKEIQGYEMDDVQGRRSHIFHNLYPSSSVNYAFWPKNPPEYREVTEEFAKHAKQLAEEILGLLSEGLGLQREMLKLAFGDDSAGYLMKINYYRPCPEPDWVMGIKAHTDFNELTLLIPNEIFGLQVFKEDRWLDVDYIYPAVIIIIGDQIMKMSNGRYNNVLHRTLMDKKKTRMSSVVHIKPPYDMVVKPFPELTSGDNPPKFEPLTYQDYIDIEVPKLSRLIKN

SEQ ID NO: 36835 - protein, 217 aa, Arabidopsis thaliana
  peptide (1)..(217): Ceres Seq. ID no. 12337141
MDDVQGRRSHIFHNLYPSSSVNYAFWPKNPPEYREVTEEFAKHAKQLAEEILGLLSEGLGLQREMLKLAFGDDSAGYLMKINYYRPCPEPDWVMGIKAHTDFNELTLLIPNEIFGLQVFKEDRWLDVDYIYPAVIIIIGDQIMKMSNGRYNNVLHRTLMDKKKTRMSSVVHIKPPYDMVVKPFPELTSGDNPPKFEPLTYQDYIDIEVPKLSRLIKN

SEQ ID NO: 36836 - DNA, 1717 bp, Arabidopsis thaliana
  misc_feature (1)..(1717): Ceres Seq. ID no. 13621936
  misc_feature (1)..(1717): Ortholog of  Ceres SEQ ID NO 13663060 as cited in SEQ ID NO 60964
  misc_feature (1)..(1717): Ortholog of  Ceres SEQ ID NO 13655298 as cited in SEQ ID NO 68914
aaagaaagagaaagagaagagctggattcacatggtcttgttctttctctctccttcttttctcatcttgcggcttccctttctctctctatcgccacaatgatcattaccaaccaaactgattgaaactcatttgttctctctctctcaaatccactctctctctttcttttctcttctcctctctgtgtctctatcgccatggctgatgataaggagatgcctgctgctgtagttgatggacatgatcaagtcactggtcatattatttccaccacaatcggtggcaaaaatggtgaaccaaaacagacaattagttacatggcggagcgagttgttggtacaggctcgttcgggatcgttttccaagcaaaatgtttggagactggagaaaccgtggcgataaagaaggttttgcaagatagaagatacaagaaccgagaacttcagttgatgcgtgtgatggatcatccgaatgtggtttgtttgaagcattgcttcttttcgactacaagtaaagacgagcttttcttgaacttggttatggagtatgtccctgagagcttgtatcgagttctgaaacattatagtagtgcaaaccaaagaatgcctcttgtctatgttaaactttacatgtatcagatcttccggggacttgcttacattcacaatgttgctggagtttgtcacagagatctaaagcctcaaaatcttctggttgatcctcttactcatcaagtcaaaatctgtgactttggcagtgcgaaacagctcgttaaaggtgaagccaacatttcttacatctgctcacgattctaccgtgcacccgagctcatatttggtgccactgagtacacaacttctattgatatctggtctgctggttgtgttcttgctgagcttcttcttggtcagccattatttcccggagaaaatgctgtggatcagctcgttgaaattataaaagttcttggtacaccaactcgagaagaaatccgttgtatgaatccacattacacagatttcaggtttccacagataaaggcacatccctggcacaagatcttccacaaaaggatgcccccagaagcgattgattttgcatcaaggctgcttcaatactctccaagtctaagatgcacagcgctcgaagcttgtgcacatccgttctttgatgaactcagagaaccaaacgctcgtttaccaaatggacggcctttcccgcctctcttcaacttcaaacaagaagtagctggatcatcacctgaactggtcaacaagttgattccagaccatatcaagagacaattgggtctaagcttcttgaatcaatctggaacttaaaagggatcctgcaaaagacaactacttttttatatataatgtaccattacacgagccacaaggtcgtagttgaaggcaaacgtggaggacacaattcaaagtttttcctcctcaaactcgttcagacaaagccagctgctagcaaaaccaactacccaaatctgcgaaaacaaaaactctccagtgttgtatctgcttatttctcttctcttttcaagtttggtgaaaaacacagtctcctctttgcttcatttcttctttctttcccccttatgtaaatgagtttagtcagaagtttttttatatagtaaagtttgggcagaaggtgaagaatgtaatcaaagtgatactctttcaacgaggagcttctttc

SEQ ID NO: 36837 - protein, 380 aa, Arabidopsis thaliana
  peptide (1)..(380): Ceres Seq. ID no. 13621937
MADDKEMPAAVVDGHDQVTGHIISTTIGGKNGEPKQTISYMAERVVGTGSFGIVFQAKCLETGETVAIKKVLQDRRYKNRELQLMRVMDHPNVVCLKHCFFSTTSKDELFLNLVMEYVPESLYRVLKHYSSANQRMPLVYVKLYMYQIFRGLAYIHNVAGVCHRDLKPQNLLVDPLTHQVKICDFGSAKQLVKGEANISYICSRFYRAPELIFGATEYTTSIDIWSAGCVLAELLLGQPLFPGENAVDQLVEIIKVLGTPTREEIRCMNPHYTDFRFPQIKAHPWHKIFHKRMPPEAIDFASRLLQYSPSLRCTALEACAHPFFDELREPNARLPNGRPFPPLFNFKQEVAGSSPELVNKLIPDHIKRQLGLSFLNQSGT

SEQ ID NO: 36838 - protein, 374 aa, Arabidopsis thaliana
  peptide (1)..(374): Ceres Seq. ID no. 13621938
MPAAVVDGHDQVTGHIISTTIGGKNGEPKQTISYMAERVVGTGSFGIVFQAKCLETGETVAIKKVLQDRRYKNRELQLMRVMDHPNVVCLKHCFFSTTSKDELFLNLVMEYVPESLYRVLKHYSSANQRMPLVYVKLYMYQIFRGLAYIHNVAGVCHRDLKPQNLLVDPLTHQVKICDFGSAKQLVKGEANISYICSRFYRAPELIFGATEYTTSIDIWSAGCVLAELLLGQPLFPGENAVDQLVEIIKVLGTPTREEIRCMNPHYTDFRFPQIKAHPWHKIFHKRMPPEAIDFASRLLQYSPSLRCTALEACAHPFFDELREPNARLPNGRPFPPLFNFKQEVAGSSPELVNKLIPDHIKRQLGLSFLNQSGT

SEQ ID NO: 36839 - protein, 340 aa, Arabidopsis thaliana
  peptide (1)..(340): Ceres Seq. ID no. 13621939
MAERVVGTGSFGIVFQAKCLETGETVAIKKVLQDRRYKNRELQLMRVMDHPNVVCLKHCFFSTTSKDELFLNLVMEYVPESLYRVLKHYSSANQRMPLVYVKLYMYQIFRGLAYIHNVAGVCHRDLKPQNLLVDPLTHQVKICDFGSAKQLVKGEANISYICSRFYRAPELIFGATEYTTSIDIWSAGCVLAELLLGQPLFPGENAVDQLVEIIKVLGTPTREEIRCMNPHYTDFRFPQIKAHPWHKIFHKRMPPEAIDFASRLLQYSPSLRCTALEACAHPFFDELREPNARLPNGRPFPPLFNFKQEVAGSSPELVNKLIPDHIKRQLGLSFLNQSGT

SEQ ID NO: 36840 - DNA, 1217 bp, Arabidopsis thaliana
  misc_feature (1)..(1217): Ceres Seq. ID no. 12421348
  misc_feature (1)..(1217): Ortholog of  Ceres SEQ ID NO 14303440 as cited in SEQ ID NO 59496
acatctcccaccaatctcactcaaaagaaaatctaagaaaagattcttaattttctgaagtgaatgcaaagatgatgatggaagagaaacttgtgatcaacgaattggaactagggaaagagcttgctaaccgattgatgaacaatctcaaacacacttcttctgtcgattccaacaaaaccttgatctctgatatcctccgtatttaccagaatgccattttcatgttgagcttcaaccaagacaagaacatccttaagcgaagccttgagatcgatggaaaagattctaaaaacgtcttcaaaaagaggaaagtatcggagaagaacacagagaaagttaaggtttttgttgcaacagaacaagaaaatggctctattgatgatggtcactgctggagaaaatatgggcaaaaagagattcatggatccaaaaatcctagagcatattacagatgcacgcatcgattcacacaagactgtttagcagtgaagcaagttcagaaatcagacacagatccttcccttttcgaagtgaagtatctcggaaaccacacttgtaacaacatcacatccccgaagacgacgacgaacttctctgtttcattgacgaacacgaacatctttgaaggaaacagagtacatgttacagagcaatcggaagacatgaaaccgaccaagtccgaagaagtgatgataagccttgaagatctggagaacaagaagaacattttcagaacgttttctttctctaaccatgagattgagaacggtgtgtggaaaagtaaccttttcttgggaaatttcgtggaagatctttctcctgcaacatcagggtctgcaattaccagcgaggttttatctgcacctgctgctgttgagaattccgaaactgcagattcgtatttctcgtctttggacaatattatcgatttcggacaggattggttgtggtcgtagctttgaataattgatttggtgaatgtaatgtctctctcttaatggcagtaattatagatggtcagtttaatttaagggttattagttattacttattagtatagtaaaaattatttttgccgatggataaaaattggcttataggactaaagttacatgattttggcctttttcattgtttttcagcagggtttatgaattatgatttccctatgaagttggattgtactttatgacaattaataaagaaaggatttt

SEQ ID NO: 36841 - protein, 295 aa, Arabidopsis thaliana
  peptide (1)..(295): Ceres Seq. ID no. 12421349
MMMEEKLVINELELGKELANRLMNNLKHTSSVDSNKTLISDILRIYQNAIFMLSFNQDKNILKRSLEIDGKDSKNVFKKRKVSEKNTEKVKVFVATEQENGSIDDGHCWRKYGQKEIHGSKNPRAYYRCTHRFTQDCLAVKQVQKSDTDPSLFEVKYLGNHTCNNITSPKTTTNFSVSLTNTNIFEGNRVHVTEQSEDMKPTKSEEVMISLEDLENKKNIFRTFSFSNHEIENGVWKSNLFLGNFVEDLSPATSGSAITSEVLSAPAAVENSETADSYFSSLDNIIDFGQDWLWS

SEQ ID NO: 36842 - protein, 294 aa, Arabidopsis thaliana
  peptide (1)..(294): Ceres Seq. ID no. 12421350
MMEEKLVINELELGKELANRLMNNLKHTSSVDSNKTLISDILRIYQNAIFMLSFNQDKNILKRSLEIDGKDSKNVFKKRKVSEKNTEKVKVFVATEQENGSIDDGHCWRKYGQKEIHGSKNPRAYYRCTHRFTQDCLAVKQVQKSDTDPSLFEVKYLGNHTCNNITSPKTTTNFSVSLTNTNIFEGNRVHVTEQSEDMKPTKSEEVMISLEDLENKKNIFRTFSFSNHEIENGVWKSNLFLGNFVEDLSPATSGSAITSEVLSAPAAVENSETADSYFSSLDNIIDFGQDWLWS

SEQ ID NO: 36843 - protein, 293 aa, Arabidopsis thaliana
  peptide (1)..(293): Ceres Seq. ID no. 12421351
MEEKLVINELELGKELANRLMNNLKHTSSVDSNKTLISDILRIYQNAIFMLSFNQDKNILKRSLEIDGKDSKNVFKKRKVSEKNTEKVKVFVATEQENGSIDDGHCWRKYGQKEIHGSKNPRAYYRCTHRFTQDCLAVKQVQKSDTDPSLFEVKYLGNHTCNNITSPKTTTNFSVSLTNTNIFEGNRVHVTEQSEDMKPTKSEEVMISLEDLENKKNIFRTFSFSNHEIENGVWKSNLFLGNFVEDLSPATSGSAITSEVLSAPAAVENSETADSYFSSLDNIIDFGQDWLWS

SEQ ID NO: 36844 - DNA, 1079 bp, Arabidopsis thaliana
  misc_feature (1)..(1079): Ceres Seq. ID no. 12394591
  misc_feature (1)..(1079): Ortholog of  Ceres SEQ ID NO 13594560 as cited in SEQ ID NO 51329
  misc_feature (1)..(1079): Ortholog of  Ceres SEQ ID NO 12613701 as cited in SEQ ID NO 67983
atctcataaaaacaaaaacaacaacacacatttcaaagaactctgaaatggcaaaccaaaaagggttacatgtagtgatgatgatcatcactgtttggcttctttatgcagcacctaatatccatggatggggaaaagaaggtcatgaaatcatctgtaaaatcgctcagactaggttggatgaaacagcagcaaaggccgtgaaagagctgttacctgaatctgcagaaggagacctctcaagcttgtgtctttgggctgatcgtgtcaagttcagataccactggtcttctcctcttcattacatcaacactcctgatgcatgctcataccaatacaatagggactgcaaggacgaatctggagagaaaggaagatgtgttgcgggagccatttacaactacaccacacagcttctttcctacaaaactgcagcttcatctcagtcacaatacaacttaaccgaggccctgctcttcgtgtccccatttcatgggtgatatccatcagcctctacatgtgagttatgcttcagacaaaggaggtaacaccatcgaagtacattggtacacgagaaaagctaacctccaccatatatgggattccaacattatcgaaacagctgaagcagatctctataactctgcactagaaggaatggtggatgcactcaaaaagaatatcacgacagaatgggcagatcaagttaagagatgggatacctgcacaaagaagacagcatgtccagacatatacgcatccgaaggaattcaagcagcctgtgactgggcatacaagggggtaacggaaggagacactctagaagatgaatacttctattcacgtctaccgatagtgtatcagcggttagcacagggaggggtgagactagcagctaccctaaacaggattttcggttgaagctgaagttacagcataatgattggtctaagcctgtcttcatattagattaaaaactgcattattgaaacaaggaaatagcaatcacaagccccgaacacggcaatgctctttcattatcaaacaaaataaattatgtttactcacaaagtttcttc

SEQ ID NO: 36845 - protein, 165 aa, Arabidopsis thaliana
  peptide (1)..(165): Ceres Seq. ID no. 12394592
LIKTKTTTHISKNSEMANQKGLHVVMMIITVWLLYAAPNIHGWGKEGHEIICKIAQTRLDETAAKAVKELLPESAEGDLSSLCLWADRVKFRYHWSSPLHYINTPDACSYQYNRDCKDESGEKGRCVAGAIYNYTTQLLSYKTAASSQSQYNLTEALLFVSPFHG

SEQ ID NO: 36846 - protein, 150 aa, Arabidopsis thaliana
  peptide (1)..(150): Ceres Seq. ID no. 12394593
MANQKGLHVVMMIITVWLLYAAPNIHGWGKEGHEIICKIAQTRLDETAAKAVKELLPESAEGDLSSLCLWADRVKFRYHWSSPLHYINTPDACSYQYNRDCKDESGEKGRCVAGAIYNYTTQLLSYKTAASSQSQYNLTEALLFVSPFHG

SEQ ID NO: 36847 - protein, 142 aa, Arabidopsis thaliana
  peptide (1)..(142): Ceres Seq. ID no. 12394594
MGDIHQPLHVSYASDKGGNTIEVHWYTRKANLHHIWDSNIIETAEADLYNSALEGMVDALKKNITTEWADQVKRWDTCTKKTACPDIYASEGIQAACDWAYKGVTEGDTLEDEYFYSRLPIVYQRLAQGGVRLAATLNRIFG

SEQ ID NO: 36848 - DNA, 1841 bp, Arabidopsis thaliana
  misc_feature (1)..(1841): Ceres Seq. ID no. 12336394
  misc_feature (1)..(1841): Ortholog of  Ceres SEQ ID NO 14311882 as cited in SEQ ID NO 51638
  misc_feature (1)..(1841): Ortholog of  Ceres SEQ ID NO 14308803 as cited in SEQ ID NO 55038
  misc_feature (1)..(1841): Ortholog of  Ceres SEQ ID NO 13595437 as cited in SEQ ID NO 56562
cattaggattttgaatttccaaatacattttcagaaaaaaaagaattaaaagatcccattgttgttatcctcacagtaaatgcttttgcttgagagagagtctgttagaggttttttgtttgtttctgtttccttctgtcacccagaaaactaaaaagcaaacaaattcaagaagagagagagagagatagcctcaaaaccaagtcctaaccattgttgatagaagagaaagcttttcttttcttgttgcttatggtgaaagaatgaaagagagagaggaggagaagtaagaagcagagaaagtgtttagagctttgcatgttcctttctctccaagtttatatcttcatcggtttcacaagttcacttaaaaagttgaaaagagtctttcttcttcaactattgtaaatgcgaaatggatcgaagagatgcaatgggattatccgggtcaggttcttactatatccatagaggattacccgggtcgggtcctccaacgtttcatggatcaccacagcaacagcaaggtcttcgtcacttacctaatcaaaactctccattcgggtcaggctccactggtttcggatctccttctttacacggtgatccttctctggcaacagcagccggaggagccggagctcttcctcatcatatcggcgttaatatgattgctcctcctccacctcccagtgaaactccgatgaaacgaaagagaggacggcctagaaaatacggtcaagacggctctgtttctttggctctgtcgtcttcctctgtttcgaccattactcccaacaactctaacaaacgcggccgtggtcgacctccgggctccggcaagaaacagagaatggcttccgttggtgaactgatgccttcatcttctggaatgagcttcacgccacatgttatcgcggtttcaataggagaagatattgcatcaaaggttatagctttctctcaacaaggtccgagagccatttgcgttttatctgcaagtggtgcagtctctactgcaacacttattcaaccatcagcatctcccggagccattaaatacgagggccggtttgaaatcctagcgttatcaacatcttatatagtggcaactgatggaagcttccgtaaccgaactggaaacttatcggtttcgcttgctagccccgatgggcgtgtgattggcggtgccattggtgggcctttaatagctgcaagtcctgttcaggttattgtagggagctttatatgggcagctccaaagatcaagagcaagaaacgagaagaagaagcttctgaagttgttcaagaaactgatgatcaccacgttctggacaataataacaacacgatttcgcctgtccctcagcagcagccaaaccaaaacctgatttggtcaacaggttcaaggcaaatggatatgcgtcatgctcatgctgatattgatttaatgcgcggttgatgatagcgagaaagaactctgtgtatataaagcatggaatctaggaagaagaagaaggaatataagctaacctctgaacaaaagtatgtggaaatgttagggaaaaagattaactctattagtgtacctctcatatctctaagcttgtttggttttactgtttctgtgactctgaagatttgcagagttcctttctttctctgttttagattgttcagtctttatgtaatttgcttgcaattctgattctacagcttagattcagtacattgtgtagaagtttacatgggaacctgaaaattgggcatttcatgggccttcatatgatccaatttattttcatcaaatttgtattagtacataattaattttgtttttt

SEQ ID NO: 36849 - protein, 348 aa, Arabidopsis thaliana
  peptide (1)..(348): Ceres Seq. ID no. 12336395
MDRRDAMGLSGSGSYYIHRGLPGSGPPTFHGSPQQQQGLRHLPNQNSPFGSGSTGFGSPSLHGDPSLATAAGGAGALPHHIGVNMIAPPPPPSETPMKRKRGRPRKYGQDGSVSLALSSSSVSTITPNNSNKRGRGRPPGSGKKQRMASVGELMPSSSGMSFTPHVIAVSIGEDIASKVIAFSQQGPRAICVLSASGAVSTATLIQPSASPGAIKYEGRFEILALSTSYIVATDGSFRNRTGNLSVSLASPDGRVIGGAIGGPLIAASPVQVIVGSFIWAAPKIKSKKREEEASEVVQETDDHHVLDNNNNTISPVPQQQPNQNLIWSTGSRQMDMRHAHADIDLMRG

SEQ ID NO: 36850 - protein, 342 aa, Arabidopsis thaliana
  peptide (1)..(342): Ceres Seq. ID no. 12336396
MGLSGSGSYYIHRGLPGSGPPTFHGSPQQQQGLRHLPNQNSPFGSGSTGFGSPSLHGDPSLATAAGGAGALPHHIGVNMIAPPPPPSETPMKRKRGRPRKYGQDGSVSLALSSSSVSTITPNNSNKRGRGRPPGSGKKQRMASVGELMPSSSGMSFTPHVIAVSIGEDIASKVIAFSQQGPRAICVLSASGAVSTATLIQPSASPGAIKYEGRFEILALSTSYIVATDGSFRNRTGNLSVSLASPDGRVIGGAIGGPLIAASPVQVIVGSFIWAAPKIKSKKREEEASEVVQETDDHHVLDNNNNTISPVPQQQPNQNLIWSTGSRQMDMRHAHADIDLMRG

SEQ ID NO: 36851 - protein, 264 aa, Arabidopsis thaliana; identical to SEQ ID NO: 36795
  peptide (1)..(264): Ceres Seq. ID no. 12336397

SEQ ID NO: 36852 - DNA, 1778 bp, Arabidopsis thaliana
  misc_feature (1)..(1778): Ceres Seq. ID no. 12488347
  misc_feature (1)..(1778): Ortholog of  Ceres SEQ ID NO 14315422 as cited in SEQ ID NO 59255
aaacccacttcgcagattcactcttcaccatcttcacctctcaaagaaacccctttcttcctcttctctgttcctctgctccgccgcaaaaatgaacgaccatatccaccgtgttccggctctcaccgaggaagagattgactccgtcgccataaaaacatttgagagatacgcattaccttcttcttcctccgttaagagaaaggggaaaggagtaacgattctctggttcagaaacgatctcagagttcttgacaatgacgcattgtacaaagcttggtcttcctctgataccattttgcctgtttactgtctcgatcctcgtctctttcacactactcatttcttcaacttccctaaaaccggagctttaagaggcggttttcttatggaatgtttggttgatttgagaaagaatcttatgaaacgaggattgaatcttcttattagaagtggtaaaccagaagagattcttccttctcttgctaaagattttggagctcgtacagtttttgcgcataaagaaacgtgtagtgaggaggtagacgttgaaagacttgtgaatcaaggtttgaaaagggttggaaatagtactaagcttgagctcatttggggaagtactatgtatcacaaagatgatcttccttttgatgtttttgacttgcctgatgtctacactcagtttcgtaagtcggtggaagctaagtgtagtatcagaagctctactcgcattccactatctctagggccaacaccttctgttgatgattggggagatgttccaactcttgagaaacttggggttgagcctcaagaggtaaccagaggaatgcgattcgttggtggtgaaagtgcaggagtaggcagagtatttgagtacttttggaaaaaggatctattgaaagtatacaaagagacgaggaacggaatgttaggacctgattattcgacgaaattctctccttggcttgcctttgggtgtatctctcctcgttttatctatgaagaggtccaaagatatgaaaaggaaagagtagcaaataattcaacatactgggtactttttgaactaatatggagagattacttcaggtttctttcaattaagtgtggaaactcactttttcatctaggtggcccgagaaatgtgcaagggaagtggagccaagatcagaaactatttgagtcttggagagatgccaagacagggtatcctcttatagatgcaaacatgaaggagttatccactacaggtttcatgtcaaatcgaggccgacagattgtttgttcgtttcttgtccgggacatggggttggattggcgtatgggtgcagaatggtttgagacatgtctattagactatgatccttgttctaattatggaaactggacctatggagcaggagttggaaatgatccacgggaagaccggtacttcagcattcccaagcaagcacaaaactatgatccagaaggagaatacgttgcgttttggctgcagcagctacgtcggcttccgaaagagaaaagacattggccagggagattgatgtatatggacacagttgtgccattgaagcatggtaatggtccaatggctggagggtcaaagtctgggggtggcttcagagggagtcacagtgggagacgttctagacacaatggtccttagagagaaactattctttacacgaacttgtatcttatttttatttctgtgattcttcattcttgtgcacaaggatctctgattctctcggtctaaattacattgactt

SEQ ID NO: 36853 - protein, 556 aa, Arabidopsis thaliana
  peptide (1)..(556): Ceres Seq. ID no. 12488348
NPLRRFTLHHLHLSKKPLSSSSLFLCSAAKMNDHIHRVPALTEEEIDSVAIKTFERYALPSSSSVKRKGKGVTILWFRNDLRVLDNDALYKAWSSSDTILPVYCLDPRLFHTTHFFNFPKTGALRGGFLMECLVDLRKNLMKRGLNLLIRSGKPEEILPSLAKDFGARTVFAHKETCSEEVDVERLVNQGLKRVGNSTKLELIWGSTMYHKDDLPFDVFDLPDVYTQFRKSVEAKCSIRSSTRIPLSLGPTPSVDDWGDVPTLEKLGVEPQEVTRGMRFVGGESAGVGRVFEYFWKKDLLKVYKETRNGMLGPDYSTKFSPWLAFGCISPRFIYEEVQRYEKERVANNSTYWVLFELIWRDYFRFLSIKCGNSLFHLGGPRNVQGKWSQDQKLFESWRDAKTGYPLIDANMKELSTTGFMSNRGRQIVCSFLVRDMGLDWRMGAEWFETCLLDYDPCSNYGNWTYGAGVGNDPREDRYFSIPKQAQNYDPEGEYVAFWLQQLRRLPKEKRHWPGRLMYMDTVVPLKHGNGPMAGGSKSGGGFRGSHSGRRSRHNGP

SEQ ID NO: 36854 - protein, 526 aa, Arabidopsis thaliana
  peptide (1)..(526): Ceres Seq. ID no. 12488349
MNDHIHRVPALTEEEIDSVAIKTFERYALPSSSSVKRKGKGVTILWFRNDLRVLDNDALYKAWSSSDTILPVYCLDPRLFHTTHFFNFPKTGALRGGFLMECLVDLRKNLMKRGLNLLIRSGKPEEILPSLAKDFGARTVFAHKETCSEEVDVERLVNQGLKRVGNSTKLELIWGSTMYHKDDLPFDVFDLPDVYTQFRKSVEAKCSIRSSTRIPLSLGPTPSVDDWGDVPTLEKLGVEPQEVTRGMRFVGGESAGVGRVFEYFWKKDLLKVYKETRNGMLGPDYSTKFSPWLAFGCISPRFIYEEVQRYEKERVANNSTYWVLFELIWRDYFRFLSIKCGNSLFHLGGPRNVQGKWSQDQKLFESWRDAKTGYPLIDANMKELSTTGFMSNRGRQIVCSFLVRDMGLDWRMGAEWFETCLLDYDPCSNYGNWTYGAGVGNDPREDRYFSIPKQAQNYDPEGEYVAFWLQQLRRLPKEKRHWPGRLMYMDTVVPLKHGNGPMAGGSKSGGGFRGSHSGRRSRHNGP

SEQ ID NO: 36855 - protein, 427 aa, Arabidopsis thaliana
  peptide (1)..(427): Ceres Seq. ID no. 12488350
MECLVDLRKNLMKRGLNLLIRSGKPEEILPSLAKDFGARTVFAHKETCSEEVDVERLVNQGLKRVGNSTKLELIWGSTMYHKDDLPFDVFDLPDVYTQFRKSVEAKCSIRSSTRIPLSLGPTPSVDDWGDVPTLEKLGVEPQEVTRGMRFVGGESAGVGRVFEYFWKKDLLKVYKETRNGMLGPDYSTKFSPWLAFGCISPRFIYEEVQRYEKERVANNSTYWVLFELIWRDYFRFLSIKCGNSLFHLGGPRNVQGKWSQDQKLFESWRDAKTGYPLIDANMKELSTTGFMSNRGRQIVCSFLVRDMGLDWRMGAEWFETCLLDYDPCSNYGNWTYGAGVGNDPREDRYFSIPKQAQNYDPEGEYVAFWLQQLRRLPKEKRHWPGRLMYMDTVVPLKHGNGPMAGGSKSGGGFRGSHSGRRSRHNGP

SEQ ID NO: 36856 - DNA, 1272 bp, Arabidopsis thaliana
  misc_feature (1)..(1272): Ceres Seq. ID no. 13491032
  misc_feature (1)..(1272): Ortholog of  Ceres SEQ ID NO 12636774 as cited in SEQ ID NO 372
  misc_feature (1)..(1272): Ortholog of  Ceres SEQ ID NO 14311866 as cited in SEQ ID NO 51178
  misc_feature (1)..(1272): Ortholog of  Ceres SEQ ID NO 15174842 as cited in SEQ ID NO 53054
  misc_feature (1)..(1272): Ortholog of  Ceres SEQ ID NO 15170037 as cited in SEQ ID NO 55447
  misc_feature (1)..(1272): Ortholog of  Ceres SEQ ID NO 15175492 as cited in SEQ ID NO 56277
  misc_feature (1)..(1272): Ortholog of  Ceres SEQ ID NO 13582350 as cited in SEQ ID NO 56734
  misc_feature (1)..(1272): Ortholog of  Ceres SEQ ID NO 12476493 as cited in SEQ ID NO 58163
  misc_feature (1)..(1272): Ortholog of  Ceres SEQ ID NO 12582113 as cited in SEQ ID NO 58349
  misc_feature (1)..(1272): Ortholog of  Ceres SEQ ID NO 14310807 as cited in SEQ ID NO 58696
  misc_feature (1)..(1272): Ortholog of  Ceres SEQ ID NO 15175861 as cited in SEQ ID NO 59381
  misc_feature (1)..(1272): Ortholog of  Ceres SEQ ID NO 12578315 as cited in SEQ ID NO 62451
  misc_feature (1)..(1272): Ortholog of  Ceres SEQ ID NO 12615466 as cited in SEQ ID NO 62761
  misc_feature (1)..(1272): Ortholog of  Ceres SEQ ID NO 13597295 as cited in SEQ ID NO 63743
  misc_feature (1)..(1272): Ortholog of  Ceres SEQ ID NO 12617090 as cited in SEQ ID NO 64005
  misc_feature (1)..(1272): Ortholog of  Ceres SEQ ID NO 15226458 as cited in SEQ ID NO 64042
  misc_feature (1)..(1272): Ortholog of  Ceres SEQ ID NO 13597439 as cited in SEQ ID NO 64081
  misc_feature (1)..(1272): Ortholog of  Ceres SEQ ID NO 13597233 as cited in SEQ ID NO 64370
  misc_feature (1)..(1272): Ortholog of  Ceres SEQ ID NO 14302844 as cited in SEQ ID NO 65379
  misc_feature (1)..(1272): Ortholog of  Ceres SEQ ID NO 13598327 as cited in SEQ ID NO 68040
  misc_feature (1)..(1272): Ortholog of  Ceres SEQ ID NO 13599438 as cited in SEQ ID NO 0
accatctacaactttcattcttccactacatttctctccttgagtatcttcttatcctattttccaaattccaaaacaattcacaaaatggctacatgctggcctgagccgattgtttccgtgcaatccttgtcccaaaccggtgtaccaactgtaccaaaccgctatgtgaagccggctcatcagagaccggtctttaacaccacccaatccgatgctgggatagaaatccctgttctagacatgaacgacgtttgggggaaaccagaggggctaaggctcgtgaggagcgcgtgtgaggagtggggtttcttccaaatggtgaaccatggtgtgacccactcgttgatggagagagtgagaggagcgtggcgagagttcttcgagctaccgctagaggagaaacggaagtatgcaaactcaccggacacgtacgagggatatggaagccgccttggggttgtgaaagatgctaaattagattggagtgattatttcttcctcaattacttgccttcttccataagaaacccttccaagtggccatctcagcctcctaagatcagagaattgatcgaaaagtacggagaagaagtgagaaaactgtgcgaaaggctaacagagacgttgtcagagagtttaggtttaaaaccaaacaagctcatgcaggctttaggaggaggcgacaaagtcggagcttctctgaggacaaacttctacccaaaatgccctcagccgcagctcactttaggtctctcttctcattctgaccctggaggcatcaccattcttctcccggacgagaaggtcgctggccttcaggtccgtcgtggtgatggctgggtcaccattaaatcagtccctaatgctttgatcgttaacattggagatcaacttcagatacttagcaatggaatttacaaaagcgtggaacatcaagtgatcgttaattccggtatggaacgagtctctttggcattcttctataacccgagaagtgatatcccggttggaccaatcgaagaactagtaactgcaaaccgacctgctctttataaaccaatcaggttcgacgagtaccgttctctgataaggcaaaagggtccttgtggaaaaaaccaagtcgactcactgttattaactagataataattgataaacattccaagtattatctgttattcctatgtccttgatatagtcgttactaaataatatgtaaaccgtatcttcactttttcttattatattgctgctctctcttgaggtttg

SEQ ID NO: 36857 - protein, 382 aa, Arabidopsis thaliana
  peptide (1)..(382): Ceres Seq. ID no. 13491033
TIYNFHSSTTFLSLSIFLSYFPNSKTIHKMATCWPEPIVSVQSLSQTGVPTVPNRYVKPAHQRPVFNTTQSDAGIEIPVLDMNDVWGKPEGLRLVRSACEEWGFFQMVNHGVTHSLMERVRGAWREFFELPLEEKRKYANSPDTYEGYGSRLGVVKDAKLDWSDYFFLNYLPSSIRNPSKWPSQPPKIRELIEKYGEEVRKLCERLTETLSESLGLKPNKLMQALGGGDKVGASLRTNFYPKCPQPQLTLGLSSHSDPGGITILLPDEKVAGLQVRRGDGWVTIKSVPNALIVNIGDQLQILSNGIYKSVEHQVIVNSGMERVSLAFFYNPRSDIPVGPIEELVTANRPALYKPIRFDEYRSLIRQKGPCGKNQVDSLLLTR

SEQ ID NO: 36858 - protein, 353 aa, Arabidopsis thaliana
  peptide (1)..(353): Ceres Seq. ID no. 13491034
MATCWPEPIVSVQSLSQTGVPTVPNRYVKPAHQRPVFNTTQSDAGIEIPVLDMNDVWGKPEGLRLVRSACEEWGFFQMVNHGVTHSLMERVRGAWREFFELPLEEKRKYANSPDTYEGYGSRLGVVKDAKLDWSDYFFLNYLPSSIRNPSKWPSQPPKIRELIEKYGEEVRKLCERLTETLSESLGLKPNKLMQALGGGDKVGASLRTNFYPKCPQPQLTLGLSSHSDPGGITILLPDEKVAGLQVRRGDGWVTIKSVPNALIVNIGDQLQILSNGIYKSVEHQVIVNSGMERVSLAFFYNPRSDIPVGPIEELVTANRPALYKPIRFDEYRSLIRQKGPCGKNQVDSLLLTR

SEQ ID NO: 36859 - protein, 301 aa, Arabidopsis thaliana
  peptide (1)..(301): Ceres Seq. ID no. 13491035
MNDVWGKPEGLRLVRSACEEWGFFQMVNHGVTHSLMERVRGAWREFFELPLEEKRKYANSPDTYEGYGSRLGVVKDAKLDWSDYFFLNYLPSSIRNPSKWPSQPPKIRELIEKYGEEVRKLCERLTETLSESLGLKPNKLMQALGGGDKVGASLRTNFYPKCPQPQLTLGLSSHSDPGGITILLPDEKVAGLQVRRGDGWVTIKSVPNALIVNIGDQLQILSNGIYKSVEHQVIVNSGMERVSLAFFYNPRSDIPVGPIEELVTANRPALYKPIRFDEYRSLIRQKGPCGKNQVDSLLLTR

SEQ ID NO: 36860 - DNA, 1333 bp, Arabidopsis thaliana
  misc_feature (1)..(1333): Ceres Seq. ID no. 13493836
  misc_feature (1)..(1333): Ortholog of  Ceres SEQ ID NO 14311463 as cited in SEQ ID NO 51400
gatctgccaatcacaaattaacagaaaacacaactaaattgcgatttgaatttattaaatcgtaaaactgagatcttctctgagatttttctcctcctaaagtttgaaactttgaacataaaaattgtattttttttttttttttgaagtttccagcaaaaaaaaaattgaaactttcagtgattggaattttaatttgtgttttagtttggtgggtttctttatcgggatcgttgtcgtggatttttgtttgtagcagcttgaaagacgatgtcgtcgtcgccggacattgccggaatcttagataatacgaaggagcttgatcggttaagaaaagaacaagaggaagttcttgtggagattaataagatgcataagaagcttcaagctacgccggagatagttgagaagcctggtgatatttcattgtcaaagcttaaaaatttgtacattcaagcaaaagagctttcagaaagtgaagtaaccgtttcaaatattctgcttactcagttggattctctgcttccatctggaccaactgggcaacaacgcagaaaattagtggcagaaggcaacgaacagaagagaaagagaatgaaagtagatacagatgtaacaagagtttctccttccatgagaaatcaaatcgaggcatatgctagtctaaagggtgaacaggttgctgcaagagtcacagctgaagatgccgagaaggatgaatggtttgtggtgaaagttattcacttcgacagagaaacaaaagaagttgaagtacttgatgaagaaccaggagatgatgaagaaggaggtggccagaggacgtataaactatcaatgtcatgtattttaccgtttccaaaacggaatgatccttcaagcacacaagagtttataccagggaaacacgtcttagctgtatatccaggaaccacagccctctacaaggcaactgttataagtaccccacgaaagaggaaatctgacgagtacttgctagaatttgatgatgatgaagaagacggagcattacctcaaagaacagtgccattccacaaagtggtagctttaccagaaggccatcgccagtaattttagatggatacaatgaaataagagacgatttctttgggccagagtgtaagttaagagttgttgcctttgtttgtgatgatgactttgaagaataaaaaggtatgttttaactttttattatttcaatttgtggcaaaactactctagcaacatttgtaacatttaaatgtgtatatatgaatggaaccatgggtatgtatatcatattgagacacaatttaaaaaaaaattacatttttct

SEQ ID NO: 36861 - protein, 272 aa, Arabidopsis thaliana
  peptide (1)..(272): Ceres Seq. ID no. 13493837
MSSSPDIAGILDNTKELDRLRKEQEEVLVEINKMHKKLQATPEIVEKPGDISLSKLKNLYIQAKELSESEVTVSNILLTQLDSLLPSGPTGQQRRKLVAEGNEQKRKRMKVDTDVTRVSPSMRNQIEAYASLKGEQVAARVTAEDAEKDEWFVVKVIHFDRETKEVEVLDEEPGDDEEGGGQRTYKLSMSCILPFPKRNDPSSTQEFIPGKHVLAVYPGTTALYKATVISTPRKRKSDEYLLEFDDDEEDGALPQRTVPFHKVVALPEGHRQ

SEQ ID NO: 36862 - protein, 239 aa, Arabidopsis thaliana
  peptide (1)..(239): Ceres Seq. ID no. 13493838
MHKKLQATPEIVEKPGDISLSKLKNLYIQAKELSESEVTVSNILLTQLDSLLPSGPTGQQRRKLVAEGNEQKRKRMKVDTDVTRVSPSMRNQIEAYASLKGEQVAARVTAEDAEKDEWFVVKVIHFDRETKEVEVLDEEPGDDEEGGGQRTYKLSMSCILPFPKRNDPSSTQEFIPGKHVLAVYPGTTALYKATVISTPRKRKSDEYLLEFDDDEEDGALPQRTVPFHKVVALPEGHRQ

SEQ ID NO: 36863 - protein, 164 aa, Arabidopsis thaliana
  peptide (1)..(164): Ceres Seq. ID no. 13493839
MKVDTDVTRVSPSMRNQIEAYASLKGEQVAARVTAEDAEKDEWFVVKVIHFDRETKEVEVLDEEPGDDEEGGGQRTYKLSMSCILPFPKRNDPSSTQEFIPGKHVLAVYPGTTALYKATVISTPRKRKSDEYLLEFDDDEEDGALPQRTVPFHKVVALPEGHRQ

SEQ ID NO: 36864 - DNA, 1457 bp, Arabidopsis thaliana
  misc_feature (1)..(1457): Ceres Seq. ID no. 12394548
  misc_feature (1)..(1457): Ortholog of  Ceres SEQ ID NO 15177750 as cited in SEQ ID NO 57772
  misc_feature (1)..(1457): Ortholog of  Ceres SEQ ID NO 13596581 as cited in SEQ ID NO 62420
  misc_feature (1)..(1457): Ortholog of  Ceres SEQ ID NO 13591273 as cited in SEQ ID NO 65904
  misc_feature (1)..(1457): Ortholog of  Ceres SEQ ID NO 13623086 as cited in SEQ ID NO 0
acttaagctcaatggtggttggtggtgattcggtgttaggtgaagaacctctgtttcttcctcttcttcttcagggtcggtgttaggtgatgaagctccgttttttcgttttcgtcttcttcttcttcaaggtctcttcgttttgtgcttgaaattagggtttttgattgagaaattctgtagcggcggtggcatggcgtgctggtgagccattggttatggaggaagttgaagtgagtccacctcaaccacttgagatcagaattaaagttgtatgtacatctctctgtcgtagtgatctctctgcttgggaatctcagtctcttttgcctcgaatatttggccatgaagctgcaggtatagtggagagcattggagaaggtgtaactgagtttgaaaaaggagatcatgtgcttgctgtattcactggagaatgtgggtcatgtcggcattgcatatctgggaaaagtaacatgtgtcaggttcttggaatggagaggaaaggtttgatgcatagtgatcagaagacacgcttctccatcaaaggcaaacctgtttaccattactgcgcggtttcaagtttcagcgagtacactgtggttcactctggctgtgctgtcaaagtcgatccactggcacctctgcataaaatttgtcttctaagctgtggagtagctgcaggtcttggtgcagcatggaatgttgctgatgtacaaaaaggttcaagtgttgtgatatttggtcttggaactgtcggtctttctgttgctcaaggtgccaaacttagaggagcagctcaaatacttggggttgatataaatcccgctaaggctgaacaagcaaagacatttggtgtcacggatttcatcaattcaaatgacctctctgaacctataccccaggtgatcaaaagaatgacaggaggaggtgcagatttctcatttgaatgtgttggtgatacaggaatagctacaactgctttacaatcgtgctcggatggatggggaatgacggttactctaggtgtaccgaaagctaagcctgaagtttcagctcattacggacttttcctttctgggaaatctttaaaagggactctttttggtggttggaagcctaaatctgatcttccttcactcattgacaagtacatgaacaaggagattatgatcgatgaatttattacgcataacctgtcatttgatgaaatcaacaaagcttttgttcttatgagagaaggaaaatgtttgcgttgtgttcttcacatgccaaagtaatgtctcggaaaacacatgtcacagattcaagaaagattaacgagagctctgtatattctacagctgagttgttgtataaaacaaaagtgatggttttctatagagttatgagacttttttttttcttttggtttgttgtgaagtgatcgttcatacattataaagatggattctcacatg

SEQ ID NO: 36865 - protein, 352 aa, Arabidopsis thaliana
  peptide (1)..(352): Ceres Seq. ID no. 12394549
MEEVEVSPPQPLEIRIKVVCTSLCRSDLSAWESQSLLPRIFGHEAAGIVESIGEGVTEFEKGDHVLAVFTGECGSCRHCISGKSNMCQVLGMERKGLMHSDQKTRFSIKGKPVYHYCAVSSFSEYTVVHSGCAVKVDPLAPLHKICLLSCGVAAGLGAAWNVADVQKGSSVVIFGLGTVGLSVAQGAKLRGAAQILGVDINPAKAEQAKTFGVTDFINSNDLSEPIPQVIKRMTGGGADFSFECVGDTGIATTALQSCSDGWGMTVTLGVPKAKPEVSAHYGLFLSGKSLKGTLFGGWKPKSDLPSLIDKYMNKEIMIDEFITHNLSFDEINKAFVLMREGKCLRCVLHMPK

SEQ ID NO: 36866 - protein, 267 aa, Arabidopsis thaliana
  peptide (1)..(267): Ceres Seq. ID no. 12394550
MCQVLGMERKGLMHSDQKTRFSIKGKPVYHYCAVSSFSEYTVVHSGCAVKVDPLAPLHKICLLSCGVAAGLGAAWNVADVQKGSSVVIFGLGTVGLSVAQGAKLRGAAQILGVDINPAKAEQAKTFGVTDFINSNDLSEPIPQVIKRMTGGGADFSFECVGDTGIATTALQSCSDGWGMTVTLGVPKAKPEVSAHYGLFLSGKSLKGTLFGGWKPKSDLPSLIDKYMNKEIMIDEFITHNLSFDEINKAFVLMREGKCLRCVLHMPK

SEQ ID NO: 36867 - protein, 261 aa, Arabidopsis thaliana
  peptide (1)..(261): Ceres Seq. ID no. 12394551
MERKGLMHSDQKTRFSIKGKPVYHYCAVSSFSEYTVVHSGCAVKVDPLAPLHKICLLSCGVAAGLGAAWNVADVQKGSSVVIFGLGTVGLSVAQGAKLRGAAQILGVDINPAKAEQAKTFGVTDFINSNDLSEPIPQVIKRMTGGGADFSFECVGDTGIATTALQSCSDGWGMTVTLGVPKAKPEVSAHYGLFLSGKSLKGTLFGGWKPKSDLPSLIDKYMNKEIMIDEFITHNLSFDEINKAFVLMREGKCLRCVLHMPK

SEQ ID NO: 36868 - DNA, 1397 bp, Arabidopsis thaliana; identical to SEQ ID NO: 22801
  misc_feature (1)..(1397): Ceres Seq. ID no. 12562342
  misc_feature (1)..(1397): Ortholog of  Ceres SEQ ID NO 13596048 as cited in SEQ ID NO 68476
  misc_feature (1)..(1397): Ortholog of  Ceres SEQ ID NO 12589137 as cited in SEQ ID NO 0

SEQ ID NO: 36869 - protein, 360 aa, Arabidopsis thaliana; identical to SEQ ID NO: 22802
  peptide (1)..(360): Ceres Seq. ID no. 12562343

SEQ ID NO: 36870 - protein, 241 aa, Arabidopsis thaliana; identical to SEQ ID NO: 22803
  peptide (1)..(241): Ceres Seq. ID no. 12562344

SEQ ID NO: 36871 - protein, 186 aa, Arabidopsis thaliana; identical to SEQ ID NO: 22804
  peptide (1)..(186): Ceres Seq. ID no. 12562345

SEQ ID NO: 36872 - DNA, 1502 bp, Arabidopsis thaliana
  misc_feature (1)..(1502): Ceres Seq. ID no. 12562346
  misc_feature (1)..(1502): Ortholog of  Ceres SEQ ID NO 13596803 as cited in SEQ ID NO 62267
gtacctttttttgttgtaatttttccatacacccaatttcccgtggaagaaaaggagtcagctttttcgtttgctttaaagcttgaatctttacatagttccagttactttctatagagcttcataatccctagttgcccaaaaggattctgggttttgtgagaatgatgacgtcatgtcggaatatagatttaggtacgatgatgatggcatgtggttgtggccgtcgtcagtttccttcattagcgaagactgtttgtaagtttactagcagcaatagaagctatggcggtctggtggggagttgcaaagcggtgccaacgaaatcaaaggagatctctttgctcaatggtattggtcaatctcaaacagtgagttttgatttgaaacaagagtcaaaacagcctatttcgttggtgactctgtttgagctagtagctgttgatctgcagactttgaatgacaatcttttatcgattgttggtgcggaaaatccggttttgatatctgcggctgagcagattttcggagctggtggtaaaagaatgagaccgggtttggtattccttgtatcacatgccacggcggaattagcaggcctaaaggaactaacaacagaacaccggcgtttggctgagatcatcgagatgatacacactgcaagcttgatacacgacgatgtgttagacgagagtgacatgcgaagaggaaaggaaacagttcatgagcttttcggcacaagagtagcggtgctagctggagatttcatgtttgctcaagcgtcatggtacttagcaaatctcgagaatcttgaagttattaagctcatcagtcaggtgatcaaagactttgcaagcggagagataaagcaggcgtccagcttatttgactgcgacaccaagctcgacgagtacttactcaaaagtttctacaagacagcctctttagtggctgcgagcaccaaaggagctgccattttcagcagagttgagcctgatgtgacagaacaaatgtacgagtttgggaagaatctcggtctctctttccagatagttgatgatattttggatttcactcagtcgacagagcagctcgggaagccagcagggagtgatttggctaaaggtaacttaacagcacctgtgattttcgctctggagagggagccaaggctaagagagatcattgagtcagagttttgtgaggcgggttctctggaagaagcgattgaagcggtgacaaaaggtggggggattaagagagcacaagaattggctagggagaaagctgatgacgctataaagaatctacagtgtctacctcgaagtggcttcaggtcggctctagaagatatggtgttgtataacctcgaaagaattgattagctttccaaaagaagttggaaacactgagacatgcttatagacttatagtacagtaaaacacacacaaaagaggaatgattgtaactcctatttcaaaagtaataacacatgatttcg

SEQ ID NO: 36873 - protein, 406 aa, Arabidopsis thaliana
  peptide (1)..(406): Ceres Seq. ID no. 12562347
MMTSCRNIDLGTMMMACGCGRRQFPSLAKTVCKFTSSNRSYGGLVGSCKAVPTKSKEISLLNGIGQSQTVSFDLKQESKQPISLVTLFELVAVDLQTLNDNLLSIVGAENPVLISAAEQIFGAGGKRMRPGLVFLVSHATAELAGLKELTTEHRRLAEIIEMIHTASLIHDDVLDESDMRRGKETVHELFGTRVAVLAGDFMFAQASWYLANLENLEVIKLISQVIKDFASGEIKQASSLFDCDTKLDEYLLKSFYKTASLVAASTKGAAIFSRVEPDVTEQMYEFGKNLGLSFQIVDDILDFTQSTEQLGKPAGSDLAKGNLTAPVIFALEREPRLREIIESEFCEAGSLEEAIEAVTKGGGIKRAQELAREKADDAIKNLQCLPRSGFRSALEDMVLYNLERID

SEQ ID NO: 36874 - protein, 405 aa, Arabidopsis thaliana
  peptide (1)..(405): Ceres Seq. ID no. 12562348
MTSCRNIDLGTMMMACGCGRRQFPSLAKTVCKFTSSNRSYGGLVGSCKAVPTKSKEISLLNGIGQSQTVSFDLKQESKQPISLVTLFELVAVDLQTLNDNLLSIVGAENPVLISAAEQIFGAGGKRMRPGLVFLVSHATAELAGLKELTTEHRRLAEIIEMIHTASLIHDDVLDESDMRRGKETVHELFGTRVAVLAGDFMFAQASWYLANLENLEVIKLISQVIKDFASGEIKQASSLFDCDTKLDEYLLKSFYKTASLVAASTKGAAIFSRVEPDVTEQMYEFGKNLGLSFQIVDDILDFTQSTEQLGKPAGSDLAKGNLTAPVIFALEREPRLREIIESEFCEAGSLEEAIEAVTKGGGIKRAQELAREKADDAIKNLQCLPRSGFRSALEDMVLYNLERID

SEQ ID NO: 36875 - protein, 394 aa, Arabidopsis thaliana
  peptide (1)..(394): Ceres Seq. ID no. 12562349
MMMACGCGRRQFPSLAKTVCKFTSSNRSYGGLVGSCKAVPTKSKEISLLNGIGQSQTVSFDLKQESKQPISLVTLFELVAVDLQTLNDNLLSIVGAENPVLISAAEQIFGAGGKRMRPGLVFLVSHATAELAGLKELTTEHRRLAEIIEMIHTASLIHDDVLDESDMRRGKETVHELFGTRVAVLAGDFMFAQASWYLANLENLEVIKLISQVIKDFASGEIKQASSLFDCDTKLDEYLLKSFYKTASLVAASTKGAAIFSRVEPDVTEQMYEFGKNLGLSFQIVDDILDFTQSTEQLGKPAGSDLAKGNLTAPVIFALEREPRLREIIESEFCEAGSLEEAIEAVTKGGGIKRAQELAREKADDAIKNLQCLPRSGFRSALEDMVLYNLERID

SEQ ID NO: 36876 - DNA, 1121 bp, Arabidopsis thaliana
  misc_feature (1)..(1121): Ceres Seq. ID no. 13592128
  misc_feature (1)..(1121): Ortholog of  Ceres SEQ ID NO 15169849 as cited in SEQ ID NO 53636
  misc_feature (1)..(1121): Ortholog of  Ceres SEQ ID NO 14307300 as cited in SEQ ID NO 54107
aaatgaaaagccagtgaattagggctttctctcacttgttgaagccgcttcttcttcttcctcactgtagctcgtcgtcgctacaccatctagaagacccttaaccatggctgtcgggaagaacaagaggatttcaaagggtaggaaaggaggaaagaagaaggctgttgatcccttctccaagaaggattggtatgacgtgaaggctcctggttctttcacgaacaggaatgttgggaagactcttgtttccaggactcagggtaccaagattgcctctgagggactgaaacacagggtgtttgaggtttctcttgctgatctacaaaatgatgaggataatgcctacaggaagatccgtcttagagctgaagatgttcagggaaggaatgtgttgacccagttctggggtatggatttcacaaccgacaagctaaggtcattggtgaagaagtggcagactttgattgaagcccatgtcgatgtgaaaaccacagacggctacaccttgaggatgttctgcatcgccttcacaaagagacgtgctaaccaagtgaagcgtacctgttacgctcaatccagccaaatccgtcagatccgcagaaagatgagtgagattatggtgaaggaggcttcatcttgtgacctcaaggagctagtggccaagttcatcccagaggccattggaagagagattgagaaggcaacacagggcatctacccgttgcagaatgtgttcatccgtaaagtgaagatcctaaaggctcccaagtttgaccttggaaagctcatggaggtgcatggagattacacagcagaggatgttggtgtgaaggtagacaggccagctgatgagacaatggttgaggagccaacagaaatcatcggagcttaggggattatagatttgtttgttttttcgctggcaaaaaaaaaaaagaacctaatgttatgtcgccattggtgtgactggttttggactcgtttttgatggatgatctttattgtttatcatgttttaccttttttattatatgtcttagttcttcacttcttcttttcatttttggaatctggatttgctctctcttcaaatatttaaatggacaagattaggattt

SEQ ID NO: 36877 - protein, 262 aa, Arabidopsis thaliana [sequence omitted]

SEQ ID NO: 36878 - protein, 160 aa, Arabidopsis thaliana
  peptide (1)..(160): Ceres Seq. ID no. 13592130
MDFTTDKLRSLVKKWQTLIEAHVDVKTTDGYTLRMFCIAFTKRRANQVKRTCYAQSSQIRQIRRKMSEIMVKEASSCDLKELVAKFIPEAIGREIEKATQGIYPLQNVFIRKVKILKAPKFDLGKLMEVHGDYTAEDVGVKVDRPADETMVEEPTEIIGA

SEQ ID NO: 36879 - DNA, 732 bp, Arabidopsis thaliana
  misc_feature (1)..(732): Ceres Seq. ID no. 13580657
  misc_feature (1)..(732): Ortholog of  Ceres SEQ ID NO 12388689 as cited in SEQ ID NO 0
agaacatcctaatcaaaaaataaaaagtagtactcgtatcttactcgtgccagccactcgcatttctccagattttattatccttcctcgaaacaagagcttagctaagatgacgaagaactacccaaccgtgagcgaagattacaagaaggctgttgagaagtgcaggaggaagctcagaggtttgatcgctgagaagaactgtgcacccatcatggtccgactcgcatggcactctgctggaactttcgattgtcaatcaaggactggaggtccattcggaacaatgaggtttgacgctgagcaagctcatggagccaacagtggtatccacattgctcttaggttgttggaccccatcagggagcaattccctaccatctcttttgctgatttccatcagcttgctggtgttgtggccgttgaagttactggtggccctgacattcctttccaccctggaagagaggacaagccccaaccacctccagagggtcgtcttcctgatgcttaagctgtgacgtatgctctgtgtgtgtgtgtgtgtctccccgagagtcatggctgtttttggttgggggctggaggggtcgcattgcatttgaactttgtcatatgattgcttaatgtactctcggatttacgtatctgtttttttcggtgggttgtgatttgaacacatccgttgcgcttttgctgcttagacacattaataaaattaatttctctcgc

SEQ ID NO: 36880 - protein, 170 aa, Arabidopsis thaliana
  peptide (1)..(170): Ceres Seq. ID no. 13580658
EHPNQKIKSSTRILLVPATRISPDFIILPRNKSLAKMTKNYPTVSEDYKKAVEKCRRKLRGLIAEKNCAPIMVRLAWHSAGTFDCQSRTGGPFGTMRFDAEQAHGANSGIHIALRLLDPIREQFPTISFADFHQLAGVVAVEVTGGPDIPFHPGREDKPQPPPEGRLPDA

SEQ ID NO: 36881 - protein, 134 aa, Arabidopsis thaliana
  peptide (1)..(134): Ceres Seq. ID no. 13580659
MTKNYPTVSEDYKKAVEKCRRKLRGLIAEKNCAPIMVRLAWHSAGTFDCQSRTGGPFGTMRFDAEQAHGANSGIHIALRLLDPIREQFPTISFADFHQLAGVVAVEVTGGPDIPFHPGREDKPQPPPEGRLPDA

SEQ ID NO: 36882 - protein, 99 aa, Arabidopsis thaliana
  peptide (1)..(99): Ceres Seq. ID no. 13580660
MVRLAWHSAGTFDCQSRTGGPFGTMRFDAEQAHGANSGIHIALRLLDPIREQFPTISFADFHQLAGVVAVEVTGGPDIPFHPGREDKPQPPPEGRLPDA

SEQ ID NO: 36883 - DNA, 739 bp, Arabidopsis thaliana
  misc_feature (1)..(739): Ceres Seq. ID no. 13592931
  misc_feature (1)..(739): Ortholog of  Ceres SEQ ID NO 12556956 as cited in SEQ ID NO 78
agaacatcctaatcgaaaaatagtttcgagtttcttcgacagtggcaatgttttcatcttcgattaggttaatcgtatctgggttccaccggactcaacccctaaaatcgccggtaaattctccgagcgtcttcatctccgtacctaaattcttcaactctgagtcaaaatcgacgggaactggttcaagatccgtagcaatgagcagcgtcgagaaaaccgggtcggattctggagcaatagagaatcgagcgagcaggatgagagagaagcttcaaaaagagctcgaaccagtggagttagtgatcgaagatgtttcgtatcagcacgctggtcacgccggaatgaaaggtagaaccgacgatgagacgcatttcaatgtgaagatcgtttctaaaggattcgagggaatgaatttggtgaagagacacaggttggtctatcatttgctccgggaagagttggatactggattgcacgctctttctatcgtctccaagacgccgtctgagtctccttctaaagactagtgtactggtactgtttaatgtatcttctgtttctgttatcagagtttctcatcaaactctgttcgattcaaagattgaatttttaccatcaaagtgctctgttttggaatttattgcggagccaaagtcttcatttttacatacgcttgaggttgtgtgttggtgtttctggaattgtgtgttggaacaaagacacttgcttttagtcc

SEQ ID NO: 36884 - protein, 160 aa, Arabidopsis thaliana
  peptide (1)..(160): Ceres Seq. ID no. 13592932
MFSSSIRLIVSGFHRTQPLKSPVNSPSVFISVPKFFNSESKSTGTGSRSVAMSSVEKTGSDSGAIENRASRMREKLQKELEPVELVIEDVSYQHAGHAGMKGRTDDETHFNVKIVSKGFEGMNLVKRHRLVYHLLREELDTGLHALSIVSKTPSESPSKD

SEQ ID NO: 36885 - protein, 109 aa, Arabidopsis thaliana
  peptide (1)..(109): Ceres Seq. ID no. 13592933
MSSVEKTGSDSGAIENRASRMREKLQKELEPVELVIEDVSYQHAGHAGMKGRTDDETHFNVKIVSKGFEGMNLVKRHRLVYHLLREELDTGLHALSIVSKTPSESPSKD

SEQ ID NO: 36886 - protein, 89 aa, Arabidopsis thaliana
  peptide (1)..(89): Ceres Seq. ID no. 13592934
MREKLQKELEPVELVIEDVSYQHAGHAGMKGRTDDETHFNVKIVSKGFEGMNLVKRHRLVYHLLREELDTGLHALSIVSKTPSESPSKD

SEQ ID NO: 36887 - DNA, 1601 bp, Arabidopsis thaliana
  misc_feature (1)..(1601): Ceres Seq. ID no. 13592957
  misc_feature (1)..(1601): Ortholog of  Ceres SEQ ID NO 12593058 as cited in SEQ ID NO 63090
actttaagctcttcttcactcacactctctcaaaaatcaccaaacgaaactcttcactctctccaacaatggccaagaagatgagttctctcatcatcatcttcaacattctccttctcctcacaactcaaacccacgcgcacaacgtcacgcgcctcctagcaaaccacccatcattctcttccttcagccatttcctaacacaaacacacctcgccgacgaaatcaaccggagaagaaccataaccgtttgcgcagtagataacgccgccatgtcagcattaacctctaaaggctatacactctcaactctcaaaaacattctctccctccacgtccttttagattacttcggaaccaaaaaactccaccagatccgtgacggctctgctctcgccgctactctgtttcaagccaccggagctgctcctggaacctcaggattcgttaacataacggatctgagaggtggtaaagttgggtttggtcctgacggtggagatctgtcttctttctttgttaaatctattgaagaagttccgtataacatctccattattcagatcagtagagttttaccgtcggagactgcggcggctccgactcctgctccggcggagatgaatcttaccggaataatgtcggctcatggatgcaaagtgtttgctgagactcttctcactaaccctggagcttcaaaaacctatcaggagagtttagaaggaggcatgacagtgttctgtccaggagatgatgcaatgaaaggtttcttgcccaaatacaagaacttgacagctccaaagaaagaagcatttctcgatttcctcgctgtcccgacatattactcaatggcgatgctcaaatccaacaatggtccgatgaacacacttgcgacagatggagctaacaagtttgagcttactgtacagaacgatggagagaaggttaccctcaagacaaggatcaacactgtcaagatcgttgatactcttattgatgagcagcctttagctatatatgcgactgataaggttttgttgcctaaagagttgtttaaggcttcggctgttgaagctccggctcctgctccggcaccagaggatggtgatgttgcggattctccaaaagcggctaaagggaaagcgaaaggaaagaagaagaaggctgcaccgtcgccagataatgatccttttggtgactcggattcgcctgccgaagggcctgacggagaggccgatgatgcgacggcagatgatgcttgtgcggttaggatcatcggaggagctaaggctggtttggtggtgagcttgctctgcttgtttgcttcttcttggcttctatagtttcacttcttgtttcttcgattcttccatgttttttttttttttgtgaatcttttatttatggtttttgggggagagtaaatgaggattatttatttccctctattgttgagtttttttatttatttaaaagttggttgtcgaattaaatagtcggtagtttatatatttgtgtgttcttgtttcacgtgtttgtttagttgatgatgtaaacaagtcctgattttggtgatcttgtcatatttttcttgtttttgt

SEQ ID NO: 36888 - protein, 446 aa, Arabidopsis thaliana
  peptide (1)..(446): Ceres Seq. ID no. 13592958
FKLFFTHTLSKITKRNSSLSPTMAKKMSSLIIIFNILLLLTTQTHAHNVTRLLANHPSFSSFSHFLTQTHLADEINRRRTITVCAVDNAAMSALTSKGYTLSTLKNILSLHVLLDYFGTKKLHQIRDGSALAATLFQATGAAPGTSGFVNITDLRGGKVGFGPDGGDLSSFFVKSIEEVPYNISIIQISRVLPSETAAAPTPAPAEMNLTGIMSAHGCKVFAETLLTNPGASKTYQESLEGGMTVFCPGDDAMKGFLPKYKNLTAPKKEAFLDFLAVPTYYSMAMLKSNNGPMNTLATDGANKFELTVQNDGEKVTLKTRINTVKIVDTLIDEQPLAIYATDKVLLPKELFKASAVEAPAPAPAPEDGDVADSPKAAKGKAKGKKKKAAPSPDNDPFGDSDSPAEGPDGEADDATADDACAVRIIGGAKAGLVVSLLCLFASSWLL

SEQ ID NO: 36889 - protein, 424 aa, Arabidopsis thaliana
  peptide (1)..(424): Ceres Seq. ID no. 13592959
MAKKMSSLIIIFNILLLLTTQTHAHNVTRLLANHPSFSSFSHFLTQTHLADEINRRRTITVCAVDNAAMSALTSKGYTLSTLKNILSLHVLLDYFGTKKLHQIRDGSALAATLFQATGAAPGTSGFVNITDLRGGKVGFGPDGGDLSSFFVKSIEEVPYNISIIQISRVLPSETAAAPTPAPAEMNLTGIMSAHGCKVFAETLLTNPGASKTYQESLEGGMTVFCPGDDAMKGFLPKYKNLTAPKKEAFLDFLAVPTYYSMAMLKSNNGPMNTLATDGANKFELTVQNDGEKVTLKTRINTVKIVDTLIDEQPLAIYATDKVLLPKELFKASAVEAPAPAPAPEDGDVADSPKAAKGKAKGKKKKAAPSPDNDPFGDSDSPAEGPDGEADDATADDACAVRIIGGAKAGLVVSLLCLFASSWLL

SEQ ID NO: 36890 - protein, 420 aa, Arabidopsis thaliana
  peptide (1)..(420): Ceres Seq. ID no. 13592960
MSSLIIIFNILLLLTTQTHAHNVTRLLANHPSFSSFSHFLTQTHLADEINRRRTITVCAVDNAAMSALTSKGYTLSTLKNILSLHVLLDYFGTKKLHQIRDGSALAATLFQATGAAPGTSGFVNITDLRGGKVGFGPDGGDLSSFFVKSIEEVPYNISIIQISRVLPSETAAAPTPAPAEMNLTGIMSAHGCKVFAETLLTNPGASKTYQESLEGGMTVFCPGDDAMKGFLPKYKNLTAPKKEAFLDFLAVPTYYSMAMLKSNNGPMNTLATDGANKFELTVQNDGEKVTLKTRINTVKIVDTLIDEQPLAIYATDKVLLPKELFKASAVEAPAPAPAPEDGDVADSPKAAKGKAKGKKKKAAPSPDNDPFGDSDSPAEGPDGEADDATADDACAVRIIGGAKAGLVVSLLCLFASSWLL

SEQ ID NO: 36891 - DNA, 1668 bp, Arabidopsis thaliana
  misc_feature (1)..(1668): Ceres Seq. ID no. 12558667
  misc_feature (1)..(1668): Ortholog of  Ceres SEQ ID NO 13597407 as cited in SEQ ID NO 64106
atctattttctctctctattttatctatcttgtcctctcctctgtttataatcagcaagatttctttttgtttattagaagatttttggaaaattaatatataaagagaggagaaattaagcgtaagagtggtggcgggggaaaataaaagcatggaagaaggacttcttcggcatgaaaacgacagagatgatcgtcgtatcacagcttgtgttatcctcagcacttttgttgctgtttgtagttccttcagctatggatgtgctaatggttatacttccggcgctgaaactgcaatcatgaaagagttagacctttctatggcacaattttcagcgtttggttcctttttgaacttgggaggtgcggtgggagctttgtttagcggtcaattagcagtcatccttggcagaagacgaacgttgtgggcatgcgatttgttctgcatttttggttggctctccattgcttttgcaaagaatgtcttgtggctggacttgggaagaatttctttaggcatcggagtgggcttgactagctacgtggtccctgtctatattgcggaaatcactcctaaacatgttcgtggcgcattttctgcttcaaccctgcttcttcaaaacagtggaatttctctgatttattttttcggaactgtaattaattggcgggttctggctgttataggtgctcttccatgtttcattccagtgatcggtatatatttcataccggaatcaccaagatggttggctaaaatcggttcagttaaagaagtagaaaactctctgcatcgccttagagggaaagatgctgatgtttcagatgaagccgctgaaattcaggttatgacaaaaatgcttgaagaagattcaaagtccagtttttgtgacatgtttcagaagaagtatagacgaactctagtggttggaattggtttaatgttgatacaacaattatctggagctagcggtatcacatattattcaaatgccatatttagaaaagctggcttttcagagagacttggatcaatgatatttggtgtgttcgtgatcccaaaagctttggttggtctgattcttgtggatagatggggaagacgaccactcctattggcttctgctgttggaatgtctatcggatccttgcttattggggttagcttcacgttacaggaaatgaatctgtttcctgaatttattccagttttcgtcttcataaatattctggtctactttggattttttgcaatcggtataggagggctaccttggatcattatgtctgagatatttccgataaatataaaagtttcagcagggtcaatcgttgcattaacatcgtggaccactgggtggttcgttagttatggtttcaactttatgtttgaatggagcgcacaaggaaccttttacatatttgcgatggtggggggattgtcattgctttttatatggatgctcgtgccggaaaccaaaggacagtcgcttgaagaattgcaagcatcccttacggggacaacctaaatacacatttacatctattggcagtgtctttgcaaacattatttacataataaagtacacaacctgctcttcatagtgattgatgtgtaaaccttttccttgcgaacattgtcgtatatatcctagctatattttttcc

SEQ ID NO: 36892 - protein, 458 aa, Arabidopsis thaliana
  peptide (1)..(458): Ceres Seq. ID no. 12558668
MEEGLLRHENDRDDRRITACVILSTFVAVCSSFSYGCANGYTSGAETAIMKELDLSMAQFSAFGSFLNLGGAVGALFSGQLAVILGRRRTLWACDLFCIFGWLSIAFAKNVLWLDLGRISLGIGVGLTSYVVPVYIAEITPKHVRGAFSASTLLLQNSGISLIYFFGTVINWRVLAVIGALPCFIPVIGIYFIPESPRWLAKIGSVKEVENSLHRLRGKDADVSDEAAEIQVMTKMLEEDSKSSFCDMFQKKYRRTLVVGIGLMLIQQLSGASGITYYSNAIFRKAGFSERLGSMIFGVFVIPKALVGLILVDRWGRRPLLLASAVGMSIGSLLIGVSFTLQEMNLFPEFIPVFVFINILVYFGFFAIGIGGLPWIIMSEIFPINIKVSAGSIVALTSWTTGWFVSYGFNFMFEWSAQGTFYIFAMVGGLSLLFIWMLVPETKGQSLEELQASLTGTT

SEQ ID NO: 36893 - protein, 409 aa, Arabidopsis thaliana
  peptide (1)..(409): Ceres Seq. ID no. 12558669
MKELDLSMAQFSAFGSFLNLGGAVGALFSGQLAVILGRRRTLWACDLFCIFGWLSIAFAKNVLWLDLGRISLGIGVGLTSYVVPVYIAEITPKHVRGAFSASTLLLQNSGISLIYFFGTVINWRVLAVIGALPCFIPVIGIYFIPESPRWLAKIGSVKEVENSLHRLRGKDADVSDEAAEIQVMTKMLEEDSKSSFCDMFQKKYRRTLVVGIGLMLIQQLSGASGITYYSNAIFRKAGFSERLGSMIFGVFVIPKALVGLILVDRWGRRPLLLASAVGMSIGSLLIGVSFTLQEMNLFPEFIPVFVFINILVYFGFFAIGIGGLPWIIMSEIFPINIKVSAGSIVALTSWTTGWFVSYGFNFMFEWSAQGTFYIFAMVGGLSLLFIWMLVPETKGQSLEELQASLTGTT

SEQ ID NO: 36894 - protein, 402 aa, Arabidopsis thaliana
  peptide (1)..(402): Ceres Seq. ID no. 12558670
MAQFSAFGSFLNLGGAVGALFSGQLAVILGRRRTLWACDLFCIFGWLSIAFAKNVLWLDLGRISLGIGVGLTSYVVPVYIAEITPKHVRGAFSASTLLLQNSGISLIYFFGTVINWRVLAVIGALPCFIPVIGIYFIPESPRWLAKIGSVKEVENSLHRLRGKDADVSDEAAEIQVMTKMLEEDSKSSFCDMFQKKYRRTLVVGIGLMLIQQLSGASGITYYSNAIFRKAGFSERLGSMIFGVFVIPKALVGLILVDRWGRRPLLLASAVGMSIGSLLIGVSFTLQEMNLFPEFIPVFVFINILVYFGFFAIGIGGLPWIIMSEIFPINIKVSAGSIVALTSWTTGWFVSYGFNFMFEWSAQGTFYIFAMVGGLSLLFIWMLVPETKGQSLEELQASLTGTT

SEQ ID NO: 36895 - DNA, 1003 bp, Arabidopsis thaliana
  misc_feature (1)..(1003): Ceres Seq. ID no. 13576663
  misc_feature (1)..(1003): Ortholog of  Ceres SEQ ID NO 13656286 as cited in SEQ ID NO 69168
  misc_feature (1)..(1003): Ortholog of  Ceres SEQ ID NO 15174351 as cited in SEQ ID NO 0
attttttatcaatcgtgctccgtaatcattacctttcttcttcatcttcatcttcacgcagcgacttctttgattctctctttttattctcagctccaatttcaacctgcatttctctcttctcaattttgggtttctttttttgatatctcatttgatcagatcgacgaagagaggaagaaggtttgagctgagagatctttggaggtagaaagaagatctcaaaaacgatgtcgtttacaggaactcagcagaaatgcagggcgtgcgagaagacagtgtaccctgtggagcttctctcagctgatggaatctcttatcacaaggcttgcttcaaatgctctcactgcaaaagcagacttcaactgagcaattattcatcaatggaaggagtggtgtattgtaggcctcattttgagcagcttttcaaggagtctggtagtttcagcaagaactttcagtcacctgcaaagccattgactgataagccaaccccggagctgaataggacacctagtcgacttgctggtatgttctctggaacgcaagacaaatgcgctacttgcactaaaaccgtgtatcctatcgaaaaggtaactgtggaaagccagtgttaccataaatcttgcttcaagtgttctcatggaggctgtccgatatctccatcgaactatgcagctctagagggaatattgtactgcaagcaccatttcgctcagcttttcaaggagaaaggaagttacaatcatctcatcaaatctgcttccatcaaacgcgctactgctgctgctaccgcagctgctgcagctgtagcagccgttcccgaatcttgaattcaaattctctttatttttgtgtatgtgctgtgttgtttacatgtattcgatatgattcatgttctttgtcttccataattgaaccaggcataaaattctcccagttttctctgagtttcttgtttgtgatactactacatctataataaccgaggacttttggcttt

SEQ ID NO: 36896 - protein, 200 aa, Arabidopsis thaliana
  peptide (1)..(200): Ceres Seq. ID no. 13576664
MSFTGTQQKCRACEKTVYPVELLSADGISYHKACFKCSHCKSRLQLSNYSSMEGVVYCRPHFEQLFKESGSFSKNFQSPAKPLTDKPTPELNRTPSRLAGMFSGTQDKCATCTKTVYPIEKVTVESQCYHKSCFKCSHGGCPISPSNYAALEGILYCKHHFAQLFKEKGSYNHLIKSASIKRATAAATAAAAAVAAVPES

SEQ ID NO: 36897 - protein, 149 aa, Arabidopsis thaliana
  peptide (1)..(149): Ceres Seq. ID no. 13576665
MEGVVYCRPHFEQLFKESGSFSKNFQSPAKPLTDKPTPELNRTPSRLAGMFSGTQDKCATCTKTVYPIEKVTVESQCYHKSCFKCSHGGCPISPSNYAALEGILYCKHHFAQLFKEKGSYNHLIKSASIKRATAAATAAAAAVAAVPES

SEQ ID NO: 36898 - protein, 100 aa, Arabidopsis thaliana
  peptide (1)..(100): Ceres Seq. ID no. 13576666
MFSGTQDKCATCTKTVYPIEKVTVESQCYHKSCFKCSHGGCPISPSNYAALEGILYCKHHFAQLFKEKGSYNHLIKSASIKRATAAATAAAAAVAAVPES

SEQ ID NO: 36899 - DNA, 957 bp, Arabidopsis thaliana
  misc_feature (1)..(957): Ceres Seq. ID no. 13580523
  misc_feature (1)..(957): Ortholog of  Ceres SEQ ID NO 15169419 as cited in SEQ ID NO 58491
aattttgaaaattggttaactctgaatcaagctttttgtctaagatacctcaaagcataacatatacaagcttatatcgtcattttctctttctttcatcaggtaattattgtttggactaaattttcaagagaaatgagtgtatttcgaagatttgttggctggatcaaccagaacctacaacaacagcctcttaaggatgagtccaagagatctgagaatgttgactctaattcagcgacagagaatgatactaataaacgggcattttattatgacaaagctgaggctaagaagcaaggaaaactttggagagctgcagagaagaagaaaccatggtatgatgctcctcctaaggtcaaggtgacaacaaaaaagggtctttgccacatgcacatagagttgacagtaggattgcctccggaaggggtctatgatttgttcgctaatccgaacgactttccattcttcaggatcgacaacgagactgggcgcgaacttttggaaaacaaatcaagaaaggttttgatgaaagatggaccgaggcagagcgcgcggttggagaaagctctgacctgggacgttctttggtggtgtggagcttttccatttactctaattgttgatgaaaaccaaaaaaactttagaggaagatatatgaaagagaaaatgaagtttatgaaatattttgagggtaaatggaaaatagagccactatacgtagattcagaacgcttgtgcaaggacagaaagccgaagagtcgagaagaatacaaaagatgtagcggcggagaaggaaaggttgcatcgaaagtgacaatggaccaatacttccaaccttattttcttcttaatctaccaccactttcttggtacattcgtgggatcaccatcaaaaccaccaaaaatctgctcatattgattcaaaatgcaagtatcatgttccgagacgcttga

SEQ ID NO: 36900 - protein, 273 aa, Arabidopsis thaliana
  peptide (1)..(273): Ceres Seq. ID no. 13580524
MSVFRRFVGWINQNLQQQPLKDESKRSENVDSNSATENDTNKRAFYYDKAEAKKQGKLWRAAEKKKPWYDAPPKVKVTTKKGLCHMHIELTVGLPPEGVYDLFANPNDFPFFRIDNETGRELLENKSRKVLMKDGPRQSARLEKALTWDVLWWCGAFPFTLIVDENQKNFRGRYMKEKMKFMKYFEGKWKIEPLYVDSERLCKDRKPKSREEYKRCSGGEGKVASKVTMDQYFQPYFLLNLPPLSWYIRGITIKTTKNLLILIQNASIMFRDA

SEQ ID NO: 36901 - protein, 188 aa, Arabidopsis thaliana
  peptide (1)..(188): Ceres Seq. ID no. 13580525
MHIELTVGLPPEGVYDLFANPNDFPFFRIDNETGRELLENKSRKVLMKDGPRQSARLEKALTWDVLWWCGAFPFTLIVDENQKNFRGRYMKEKMKFMKYFEGKWKIEPLYVDSERLCKDRKPKSREEYKRCSGGEGKVASKVTMDQYFQPYFLLNLPPLSWYIRGITIKTTKNLLILIQNASIMFRDA

SEQ ID NO: 36902 - protein, 142 aa, Arabidopsis thaliana
  peptide (1)..(142): Ceres Seq. ID no. 13580526
MKDGPRQSARLEKALTWDVLWWCGAFPFTLIVDENQKNFRGRYMKEKMKFMKYFEGKWKIEPLYVDSERLCKDRKPKSREEYKRCSGGEGKVASKVTMDQYFQPYFLLNLPPLSWYIRGITIKTTKNLLILIQNASIMFRDA

SEQ ID NO: 36903 - DNA, 794 bp, Arabidopsis thaliana
  misc_feature (1)..(794): Ceres Seq. ID no. 12329461
  misc_feature (1)..(794): Ortholog of  Ceres SEQ ID NO 12635883 as cited in SEQ ID NO 0
aatcgaaaaatacttctttggtaggctcttaagaatcttaggtgtatctctttagtttgaaggttagattcagaatctctgtagattcattagtagctttttctgtgtgatctttgtgttgtatatatatagatcgaattgattttagctggtgaaaggtgaagttgtggtatgaatatgaagaaacagattatggatgagtctgtaaagtcattgatgctgcctcctcctccaccgcttcttcctccatctcagggatatggatcaagaaagatcgatggagacagcataaccaataaacagatcaagaagttctggagacagaagcagatcattgaagaggatcatctctattctgctattaaggctgcagctcgtgtcagagctcgtaatctctctgatgaggattataaacggtttgaagaaagcttggacatggaggacctggaaaccgaagatcatcagggattgaaagactggtggacaaagagcaaatacgcgtacttgaaccagcctgctcttggatctgcagattcactgaagagaaagaggttttcgacttatacaccaaactgtttctcgttcaagccttgcaatcctctctacgcaacttcgctcaatgtcttttgaaccatgagcagcaaactctgcaagatcaatcgtcttgcatatatgtatatatttgttcgtgtgtgtctctgtacatgtcatgtgttattgcttctatattaatggatgtggattttggtgtggttgttgatttgtaactgttgaataaaatctttctatggaac

SEQ ID NO: 36904 - protein, 152 aa, Arabidopsis thaliana; identical to SEQ ID NO: 25888
  peptide (1)..(152): Ceres Seq. ID no. 12329462

SEQ ID NO: 36905 - protein, 150 aa, Arabidopsis thaliana; identical to SEQ ID NO: 25889
  peptide (1)..(150): Ceres Seq. ID no. 12329463

SEQ ID NO: 36906 - protein, 145 aa, Arabidopsis thaliana; identical to SEQ ID NO: 25890
  peptide (1)..(145): Ceres Seq. ID no. 12329464

SEQ ID NO: 36907 - DNA, 5147 bp, Arabidopsis thaliana
  misc_feature (1)..(5147): Ceres Seq. ID no. 13489117
  misc_feature (1)..(5147): Ortholog of  Ceres SEQ ID NO 14311731 as cited in SEQ ID NO 51632
atggcaacttcttctcgttcggagcgatttccgataacgccgagtacggcggctactaatagattgacgattacgcctaattctagggttttgaaaagccctctcactgaagaaatcatgtggaagcggctcaaagatgctgggtttgatgaacaatcgatcaagaatagggataaagctgccttaatcgcttacatcgccaagctagaatctgaggtttatgattaccaacacaacatgggtcttctccttttggagaaaaacgaattgtcttcgcagtatgaagagattaaggcctctgtggatgagtctgacctaacacatatgcgagagaaatcagcatatgtctcggctctagctgaagcaaagaaacgagaagagagtttgaagaaggatgtagggattgcgaaggagtgcatttctagtttggagaagactctgcatgagatgcgcgcagaatgtgccgaaacaaaagtttctgctgggagtactatgtcggaagcacatgttatgatcgaggatgcgctgaagaaacttgcagatgctgaagcaaaaatgcgcgcagcagaggctttacaagcagaagctaaccggtatcaccgaattgcagagagaaagttgaaagaagttgaaagtcgtgaagatgatcttactcggcgtcttgcatctttcaagtctgagtgtgaaacgaaagagaacgaaatggttattgagcgacagactttaaatgagaggcggaagagcttgcagcaagagcatgaaagattattggatgcacaagtttcactaaatcaaagagaagatcacatttttgctagatcccaagaattagctgaacttgaaaaggggttagatactgcaaagaccacatttgaggaggaacgcaaagccttcgaagacaaaaaatccaacttggagattgcgttagccttgtgtgctaaaagagaagaggtcatcaaaaaaatttctgggagacaagatagtaatgttttcatgttttttttttttttttgcaaaaaacaggctgtctctgaaagggaatcttcgctacttaagaaggagcaagaactgcttgttgctgaagaaaaaattgccagcaaggaatctgaactaattcagaacgtcttagcgaatcaagaagttatcctgaggaaaagaaaatctgatgtggaagctgaattggaatgtaagagcaaatcggtggaagttgaaattgagagcaagagacgggcttgggaattaagggaggttgatatcaagcagagggaagacctagttggtgaaaaagaacatgacttggaagttcaatcaagagcattggcagagaaagaaaaagatataacagagaagtcttttaaccttgatgagaaagagaagaatttggttgctacagaggaagatattaaccgtaagactactatgctggaggatgagaaggaacggcttagaaaattggacctggagctgcagcagtctttgacgtcattagaagacaagagaaaacgggttgattctgcaacacaaaaacttgaagccttgaagagtgagacaagcgaattatctactctggagatgaaacttaaggaggaattagatgatttgagggcccaaaagcttgaaatgctggctgaagctgatagattgaaggtggagaaagctaaatttgaggctgagtgggaacacattgatgtgaaaagggaagagttaagaaaagaagcagagtatataactcggcaaagagaggctttttcaatgtatctcaaggacgagcgtgataacatcaaagaggaaagagatgcattgagaaatcagcacaaaaacgatgtggagtcgctaaaccgagagcgtgaagaattcatgaataagatggtggaggaacattctgaatggcttagcaagatacagcgtgagcgtgctgacttcttgttgggcattgagatgcagaaacgagagttggagtattgcatcgaaaacaaacgagaagaattggaaaattcttcaagggatagagaaaaggcttttgagcaagagaagaagttagaagaggagcgtatacagtcgcttaaggaaatggcagagaaagagttagaacatgtccaagtggaactaaagaggttggatgctgagaggttggagatcaaattggatcgtgaaagaagagagagggagtgggcagagttaaaggattcggttgaggagctaaaggtgcaacgagaaaaactagagacgcaaaggcatatgcttcgtgctgaaagagatgaaatccgacatgagattgaagaactgaagaaattagagaatctgaaagttgcattagatgatatgtccatggctaaaatgcagctgtccaatttagagcgtagctgggaaaaggtttctgctttgaagcagaaggttgtgtctcgggatgatgaacttgacctgcaaaatggagtcagcactgtgagtaatagcgaagatggctacaactcttcaatggaaagacagaacggcttaaccccttcatctgccactccattttcatggataaaacgatgtactaatctgattttcaagacttctccagagaaatccaccctaatgcatcattatgaagaagaaggaggagtgccttcagaaaagttgaagctagaatcgtcgagaagagaagaaaaggcttacactgagggactgtctattgcggttgaaagacttgaagcaggaaggaaaagaagaggtaacacatctggagatgagactagcgaaccaagcaataacaaaaagaggaaacatgatgttacccaaaaatattctgatgaagctgatacccagagtgtcatatcaagcccgcaaaatgtgcctgaggacaaacatgaactaccatcaagccaaacccagacgccaagtggtatggtagtcatcagtgaaaccgttaagatcacaagagtaacgtgtgagacagaggtgaccaacaaagtcacaacccttgactgctcagaaagtccttcggaagcagggagaaagatgggagaggagacagaagatggtgattgcaatcagactgggataaacgcgtctgaaacagtgattcataatgaagctgcaacagaagatatatgcacataagaaactctatgaatccttttgggcttggtttctagagaagataaggatttcgagtgagtagtgttggttagttaaggtagggtagggaaaaatcgttggcttctagtgtgttgcagtgtgtgtatttgagaatatatgatttgtgagactaaaaagccgaaatcattatcggggtttattgtttcttctacttgtaatgatgttgatgattgatgtcttttagctcatcggttagtaagtgtcaacagcaagagtgttcggctggactaccgtggcccattctgtagatttctttctagcccggcccacaacttccattgggctagatatgtttttctcacgtaaaagatatctgactgtcgatattgaagtaacttcttaaaacatttagatttaattgataatttaaatgtcacttttggttttttagatgacgattaaaatccttttcataacccaaaatattagttttgccgatattagaaatccgaagaaaatgacagaaaataggattaatcaatttagggtttaataaaaaatagtgagtgagagagaggctacagtgctccacattgacatcaacaaggttgaagaagaacaacatcattcaacatcagcatcacgaatattttcgagtcatggagagaagcgccgttgcctcaggttttcatagaaattacatcctctgtgcttcacgcgccgccacttccacgacgcgcctccactctttgtcctccctcagaaactttccctcttcctctctcaggattcgtcactgtccttctcccatctcttccaatttcatcgttagtgaagtttcccgaaaccgacgatgcgacgccgtttcttccagcaccaccgatgtgactgaattagccgaaattgattgggacaagattgattttgggcttaaaccaacggattacatgtacgccatgaaatgtagccgtgatggtgaattctctcaaggtcaattgcaaccttttggtaacattgacattaacccagcagctggtgttctcaactatggacaaggtttgtttgaaggtctaaaagcttacagaaaacaagatgggaatattctactcttccgtcctgaggagaatgcgatccgaatgagaaatggcgctgaaagaatgtgtatgccttctccaaccgttgaacagtttgttgaggctgtgaaaactactgtattagctaacaaacgctggattccacctccaggtaaaggatcattatacataaggccattgctaatgggaactggagctgttcttggtcttgctcctgctcctgaatacactttccttatctttgtttcacctgtcgggaactacttcaaggaaggtgttgcgccgatcaacttaattgttgaaactgaattccatcgtgcaactcccggcggtactggaggtgttaaaaccatcggtaattatgctgcagtcttgaaggctcagtcgattgcgaaagctaaagggtattctgatgttttataccttgattgccttcacaaaagatatcttgaggaggtttcatcgtgcaatattttcattgtgaaggataatgtgatatctactcctgaaattaaaggaaccatcttgcctggaattacccggaagagtatcatcgaagtagctcgtagccaaggtttcaaggtggaggaacgaaatgtgacagttgatgaattggtagaagcagacgaggttttctgcacaggaaccgccgttgttttatctccggttggaagcatcacttacaaaagccaaaggttttcttatggagaagatggctttggaacagtctcgaaacaactctacacttccttgacgagcctgcaaatgggtctgagcgaagataacatgaactggactgttcaattgagttaaaaccagtcacgaacatatcaatattatacatatggatgtgttagtagatacagaagatatattagaattccatgcttctgatgcttcaagattctgatacttgaaactataaacaataatctgtctttaaaataactaaaacggggaataaaaagc

SEQ ID NO: 36908 - protein, 1034 aa, Arabidopsis thaliana
  peptide (1)..(1034): Ceres Seq. ID no. 13489118
MATSSRSERFPITPSTAATNRLTITPNSRVLKSPLTEEIMWKRLKDAGFDEQSIKNRDKAALIAYIAKLESEVYDYQHNMGLLLLEKNELSSQYEEIKASVDESDLTHMREKSAYVSALAEAKKREESLKKDVGIAKECISSLEKTLHEMRAECAETKVSAGSTMSEAHVMIEDALKKLADAEAKMRAAEALQAEANRYHRIAERKLKEVESREDDLTRRLASFKSECETKENEMVIERQTLNERRKSLQQEHERLLDAQVSLNQREDHIFARSQELAELEKGLDTAKTTFEEERKAFEDKKSNLEIALALCAKREEVIKKISGRQDSNVFMFFFFFCKKQAVSERESSLLKKEQELLVAEEKIASKESELIQNVLANQEVILRKRKSDVEAELECKSKSVEVEIESKRRAWELREVDIKQREDLVGEKEHDLEVQSRALAEKEKDITEKSFNLDEKEKNLVATEEDINRKTTMLEDEKERLRKLDLELQQSLTSLEDKRKRVDSATQKLEALKSETSELSTLEMKLKEELDDLRAQKLEMLAEADRLKVEKAKFEAEWEHIDVKREELRKEAEYITRQREAFSMYLKDERDNIKEERDALRNQHKNDVESLNREREEFMNKMVEEHSEWLSKIQRERADFLLGIEMQKRELEYCIENKREELENSSRDREKAFEQEKKLEEERIQSLKEMAEKELEHVQVELKRLDAERLEIKLDRERREREWAELKDSVEELKVQREKLETQRHMLRAERDEIRHEIEELKKLENLKVALDDMSMAKMQLSNLERSWEKVSALKQKVVSRDDELDLQNGVSTVSNSEDGYNSSMERQNGLTPSSATPFSWIKRCTNLIFKTSPEKSTLMHHYEEEGGVPSEKLKLESSRREEKAYTEGLSIAVERLEAGRKRRGNTSGDETSEPSNNKKRKHDVTQKYSDEADTQSVISSPQNVPEDKHELPSSQTQTPSGMVVISETVKITRVTCETEVTNKVTTLDCSESPSEAGRKMGEETEDGDCNQTGINASETVIHNEAATEDICT

SEQ ID NO: 36909 - protein, 995 aa, Arabidopsis thaliana
  peptide (1)..(995): Ceres Seq. ID no. 13489119
MWKRLKDAGFDEQSIKNRDKAALIAYIAKLESEVYDYQHNMGLLLLEKNELSSQYEEIKASVDESDLTHMREKSAYVSALAEAKKREESLKKDVGIAKECISSLEKTLHEMRAECAETKVSAGSTMSEAHVMIEDALKKLADAEAKMRAAEALQAEANRYHRIAERKLKEVESREDDLTRRLASFKSECETKENEMVIERQTLNERRKSLQQEHERLLDAQVSLNQREDHIFARSQELAELEKGLDTAKTTFEEERKAFEDKKSNLEIALALCAKREEVIKKISGRQDSNVFMFFFFFCKKQAVSERESSLLKKEQELLVAEEKIASKESELIQNVLANQEVILRKRKSDVEAELECKSKSVEVEIESKRRAWELREVDIKQREDLVGEKEHDLEVQSRALAEKEKDITEKSFNLDEKEKNLVATEEDINRKTTMLEDEKERLRKLDLELQQSLTSLEDKRKRVDSATQKLEALKSETSELSTLEMKLKEELDDLRAQKLEMLAEADRLKVEKAKFEAEWEHIDVKREELRKEAEYITRQREAFSMYLKDERDNIKEERDALRNQHKNDVESLNREREEFMNKMVEEHSEWLSKIQRERADFLLGIEMQKRELEYCIENKREELENSSRDREKAFEQEKKLEEERIQSLKEMAEKELEHVQVELKRLDAERLEIKLDRERREREWAELKDSVEELKVQREKLETQRHMLRAERDEIRHEIEELKKLENLKVALDDMSMAKMQLSNLERSWEKVSALKQKVVSRDDELDLQNGVSTVSNSEDGYNSSMERQNGLTPSSATPFSWIKRCTNLIFKTSPEKSTLMHHYEEEGGVPSEKLKLESSRREEKAYTEGLSIAVERLEAGRKRRGNTSGDETSEPSNNKKRKHDVTQKYSDEADTQSVISSPQNVPEDKHELPSSQTQTPSGMVVISETVKITRVTCETEVTNKVTTLDCSESPSEAGRKMGEETEDGDCNQTGINASETVIHNEAATEDICT

SEQ ID NO: 36910 - protein, 955 aa, Arabidopsis thaliana
  peptide (1)..(955): Ceres Seq. ID no. 13489120
MGLLLLEKNELSSQYEEIKASVDESDLTHMREKSAYVSALAEAKKREESLKKDVGIAKECISSLEKTLHEMRAECAETKVSAGSTMSEAHVMIEDALKKLADAEAKMRAAEALQAEANRYHRIAERKLKEVESREDDLTRRLASFKSECETKENEMVIERQTLNERRKSLQQEHERLLDAQVSLNQREDHIFARSQELAELEKGLDTAKTTFEEERKAFEDKKSNLEIALALCAKREEVIKKISGRQDSNVFMFFFFFCKKQAVSERESSLLKKEQELLVAEEKIASKESELIQNVLANQEVILRKRKSDVEAELECKSKSVEVEIESKRRAWELREVDIKQREDLVGEKEHDLEVQSRALAEKEKDITEKSFNLDEKEKNLVATEEDINRKTTMLEDEKERLRKLDLELQQSLTSLEDKRKRVDSATQKLEALKSETSELSTLEMKLKEELDDLRAQKLEMLAEADRLKVEKAKFEAEWEHIDVKREELRKEAEYITRQREAFSMYLKDERDNIKEERDALRNQHKNDVESLNREREEFMNKMVEEHSEWLSKIQRERADFLLGIEMQKRELEYCIENKREELENSSRDREKAFEQEKKLEEERIQSLKEMAEKELEHVQVELKRLDAERLEIKLDRERREREWAELKDSVEELKVQREKLETQRHMLRAERDEIRHEIEELKKLENLKVALDDMSMAKMQLSNLERSWEKVSALKQKVVSRDDELDLQNGVSTVSNSEDGYNSSMERQNGLTPSSATPFSWIKRCTNLIFKTSPEKSTLMHHYEEEGGVPSEKLKLESSRREEKAYTEGLSIAVERLEAGRKRRGNTSGDETSEPSNNKKRKHDVTQKYSDEADTQSVISSPQNVPEDKHELPSSQTQTPSGMVVISETVKITRVTCETEVTNKVTTLDCSESPSEAGRKMGEETEDGDCNQTGINASETVIHNEAATEDICT

SEQ ID NO: 36911 - DNA, 2078 bp, Arabidopsis thaliana
  misc_feature (1)..(2078): Ceres Seq. ID no. 12558671
  misc_feature (1)..(2078): Ortholog of  Ceres SEQ ID NO 12613725 as cited in SEQ ID NO 68196
  misc_feature (1)..(2078): Ortholog of  Ceres SEQ ID NO 14301486 as cited in SEQ ID NO 69222
gaagagcagagtcattcttaaccatagagacagaagagataagaatcataacaacaacaacaccaatcattacacacaggttgatactatggagagaaagcctcttgaggttgagccatctactacgacgactaacaccgatgtggtcgattctttcgaggaagagcagagaaaaatcgtttatagaggatggaaagtcatgccttttatcattggtaatgagacatttgagaagcttgggatcatagggacattatcaaaccttcttgtgtacctaacttctgtattcaaccttaagagctacacagctgcaactatcatcaatgcctttagtggtacaatcaatttcgggacttttattgctgcctttctttgcgacacttactttggtcgctacaagactctcagtgtcgctgtcatcgcttgttttctgggatcgtttgtgatactacttactgctgcaattccgtcgttgcaccccgttgcttgcggaaacaaaatctcgtgcgaagggccaagtgtgggacagatactgtttctgctcatgggtttaggctttcttgtggtaggcgctggtggtatcagaccgtgtaatttagcgtttggtgctgatcagttcaaccccaaatccgaatcaggaaagaaagggatcaacagtttcttcaactggtatttcttcactttcacgttcgcgcagatcatctcgctcacagcagttgtgtatatccagtcaaatgtgagttggacaatcggtttgatcattccggtggctcttatgttcttggcgtgtgtgattttctttgctggcgatagattgtatgtaaaagtgaaagcctcgggtagtccattggctggtattgctcgtgttatagcagccgcgatcaagaaacgaggtttgaagccggttaagcagccttgggtcaatctttacaaccatatcccgtctaactatgcaaatactactctaaaatacaccgaccagttcagatttctagacaaagcagcaattatgacccccgaggagaagttgaactccgatggaacggcttccgatccatggaaactatgcacgttgcagcaagtggaagaagtgaaatgcattgtaagagtgattccaatctggtttgcatccacgatatactaccttgcaataactatacaaatgacttatccggtcttccaagcgctccagagcgaccgacgattaggttctggtggcttcaggattcctgcggccacctatgtagtgttcttgatgactggcatgacagttttcatcatattctacgaccgtgtacttgtcccgtcgctcagaagagtgaccgggttagaaaccggtatatcactcttacaaagaatcggagctgggtttacatttgcgataatgagtttattagtttccgggtttatagaggaaaggagaagaaactttgcattgaccaaaccgacactcgggatggcgcctcggacaggagaaatctcatcaatgtcagcgttgtggctgattccgcagcttacacttgcaggcatagcagaagcttttgctgccattggacaaatggagttttactacaagcagtttcctgaaaacatgaagagcttcgcgggttctatcttttatgtcggtgcaggggtttcgagctacctcgctagcttcttgatatcaactgttcatcgaacaaccgcgcattcaccttcagggaattggttagctgaggatctgaacaaagcgaaattggattacttctacttcatgctcacaggactcatggttgttaacatggcttacttcttgttgatggctagatggtatagatacaaaggaggtaatgatgaagacatcactgagattgagaccaatgaagaagaaaccaagcaacagcagctacaagacaagaactctgtctgatctggaaacttatatatttttggtattctacttcaatctccgtagtttttcttcacccgaaatcaaccttgttgtacttttatagattaattgaagaagaaaatcacttcatctttgtagacatgtattgtaaaataagttttttgttgctaatttcaacctccgtacg

SEQ ID NO: 36912 - protein, 635 aa, Arabidopsis thaliana
  peptide (1)..(635): Ceres Seq. ID no. 12558672
KSRVILNHRDRRDKNHNNNNTNHYTQVDTMERKPLEVEPSTTTTNTDVVDSFEEEQRKIVYRGWKVMPFIIGNETFEKLGIIGTLSNLLVYLTSVFNLKSYTAATIINAFSGTINFGTFIAAFLCDTYFGRYKTLSVAVIACFLGSFVILLTAAIPSLHPVACGNKISCEGPSVGQILFLLMGLGFLVVGAGGIRPCNLAFGADQFNPKSESGKKGINSFFNWYFFTFTFAQIISLTAVVYIQSNVSWTIGLIIPVALMFLACVIFFAGDRLYVKVKASGSPLAGIARVIAAAIKKRGLKPVKQPWVNLYNHIPSNYANTTLKYTDQFRFLDKAAIMTPEEKLNSDGTASDPWKLCTLQQVEEVKCIVRVIPIWFASTIYYLAITIQMTYPVFQALQSDRRLGSGGFRIPAATYVVFLMTGMTVFIIFYDRVLVPSLRRVTGLETGISLLQRIGAGFTFAIMSLLVSGFIEERRRNFALTKPTLGMAPRTGEISSMSALWLIPQLTLAGIAEAFAAIGQMEFYYKQFPENMKSFAGSIFYVGAGVSSYLASFLISTVHRTTAHSPSGNWLAEDLNKAKLDYFYFMLTGLMVVNMAYFLLMARWYRYKGGNDEDITEIETNEEETKQQQLQDKNSV

SEQ ID NO: 36913 - protein, 606 aa, Arabidopsis thaliana
  peptide (1)..(606): Ceres Seq. ID no. 12558673
MERKPLEVEPSTTTTNTDVVDSFEEEQRKIVYRGWKVMPFIIGNETFEKLGIIGTLSNLLVYLTSVFNLKSYTAATIINAFSGTINFGTFIAAFLCDTYFGRYKTLSVAVIACFLGSFVILLTAAIPSLHPVACGNKISCEGPSVGQILFLLMGLGFLVVGAGGIRPCNLAFGADQFNPKSESGKKGINSFFNWYFFTFTFAQIISLTAVVYIQSNVSWTIGLIIPVALMFLACVIFFAGDRLYVKVKASGSPLAGIARVIAAAIKKRGLKPVKQPWVNLYNHIPSNYANTTLKYTDQFRFLDKAAIMTPEEKLNSDGTASDPWKLCTLQQVEEVKCIVRVIPIWFASTIYYLAITIQMTYPVFQALQSDRRLGSGGFRIPAATYVVFLMTGMTVFIIFYDRVLVPSLRRVTGLETGISLLQRIGAGFTFAIMSLLVSGFIEERRRNFALTKPTLGMAPRTGEISSMSALWLIPQLTLAGIAEAFAAIGQMEFYYKQFPENMKSFAGSIFYVGAGVSSYLASFLISTVHRTTAHSPSGNWLAEDLNKAKLDYFYFMLTGLMVVNMAYFLLMARWYRYKGGNDEDITEIETNEEETKQQQLQDKNSV

SEQ ID NO: 36914 - protein, 569 aa, Arabidopsis thaliana
  peptide (1)..(569): Ceres Seq. ID no. 12558674
MPFIIGNETFEKLGIIGTLSNLLVYLTSVFNLKSYTAATIINAFSGTINFGTFIAAFLCDTYFGRYKTLSVAVIACFLGSFVILLTAAIPSLHPVACGNKISCEGPSVGQILFLLMGLGFLVVGAGGIRPCNLAFGADQFNPKSESGKKGINSFFNWYFFTFTFAQIISLTAVVYIQSNVSWTIGLIIPVALMFLACVIFFAGDRLYVKVKASGSPLAGIARVIAAAIKKRGLKPVKQPWVNLYNHIPSNYANTTLKYTDQFRFLDKAAIMTPEEKLNSDGTASDPWKLCTLQQVEEVKCIVRVIPIWFASTIYYLAITIQMTYPVFQALQSDRRLGSGGFRIPAATYVVFLMTGMTVFIIFYDRVLVPSLRRVTGLETGISLLQRIGAGFTFAIMSLLVSGFIEERRRNFALTKPTLGMAPRTGEISSMSALWLIPQLTLAGIAEAFAAIGQMEFYYKQFPENMKSFAGSIFYVGAGVSSYLASFLISTVHRTTAHSPSGNWLAEDLNKAKLDYFYFMLTGLMVVNMAYFLLMARWYRYKGGNDEDITEIETNEEETKQQQLQDKNSV

SEQ ID NO: 36915 - DNA, 4723 bp, Arabidopsis thaliana
  misc_feature (1)..(4723): Ceres Seq. ID no. 13491071
  misc_feature (1)..(4723): Ortholog of  Ceres SEQ ID NO 15174740 as cited in SEQ ID NO 52905
ctctctctctctctatctctatctctcgatttgggggagttccgtcacggtggactagtacgtctcgttgccgttggtggcgtagtcggaattaatttcctcggcgttgagattcacatggtctagaattctagctaagtggttgttgttgttgttacgatttccgatttctcgagtttttttttttatatttagcttctgtttcgtttatccctcccggagacactccttggtcgaatctctcatgctgaggtgttttggacacttgttgtcaagaagaaaccagttttggttctgattaatcgttggttggaaaatatactcaattccaggccatgccttcacttcaactattgcagttaactgagcggggtcggggtcttgtagcgtcaagacggaaatctatactgcttgcggctgggattgtagctgctggtggaactgctgtttacctgaaatcaagggtcgcttcccggaggcctgattcttcgcgtctttgcaatggtcagagtgatgatgatgagactttggaaaagctgactgcaactgatcaaaatgcaaagataaccacgaaaaagaagaaaggaggaggattgaagtctcttcaggttctgactgctattcttctctctcagatgggaaaaatgggtgccagggatcttttggcactagtcgccaccgtggttttcagaacagctttgagcaatagattggcaaaagtgcaaggtttccttttccgtgctgctttcttaaggcgtgcgccactgtttctacggctcatctccgagaatattatgttgtgtttcatgctatcaacattgcactctacttcaaagtacataactggggcattgagtttgcgattcagaaagatattgaccaagattatccattcacactattttgagaatatggtatattacaaaatatcacacgtggatggtcggattacgcaccctgaacaaagaattgccagcgatgtaccaagattctcctcagagttgagcgatcttatactggatgatttgacggcggttactgatggaattttgtatgcatggcgcctgtgttcatatgctagtccaaaatacatcttctggatactggcctatgtactgggggctgggacggcgataagaaacttttctccttcttttgggaaattgatgtccaaggaacagcagttagaaggagagtaccggcaacttcattcacgcttaaggactcattcggaaagcatagcattctatggtggggaaaccagggaagaatctcatatacaacaaaagttcaagaatcttgttagccatatgagtcacgtgcttcatgatcactggtggtttggtatgatccaagattttctgctgaagtatcttggggccacagttgcagttattctgattatcgaaccattcttctctgggcatctaagacctgacgactcgaccttaggaagagctgagatgcttagcaatataagatatcacactagtgtcattatatctctctttcaggcgttgggaacactttctataagttccaggcggctcaaccgactcagtggttatgctgaccgaatccatgagttgatggctgtctcaagagaactcagtggtgatgataaatcgtctttccagagaaatagaagcagaaattatctaagtgaagctaattatgtagagttttccgatgtcaaggttgttactccaaccggaaatgttttggtggaggatctcacccttcgagttgagcaagggtctaatcttctgattacaggtcctaatggaagtggcaagagttcccttttccgagtattaggaggtctatggcccctggtgtctggacatattgtgaagccaggagttggttctgatcttaacaaggagatcttctatgtgccgcaacggccttatatggcagtaggaacacttcgtgaccagttaatatatcctcttacttctggccaagagagtgaactgctcactgagattggaatggtggagctattgaaaaatgttgatctagaatatttattggatcgctaccaacctgaaaaagaggttaattggggtgatgaattatctcttggagagcaacagagattgggtatggccagactattctaccacaaacccaaatttgcaattctagatgaatgcacaagtgctgtcacaactgatatggaagaacgctttgccgctaaggttcgagctatgggaacttcttgcataacaatctcccatcgtccagcgcttgttgcattccatgatgttgttctgtcattagacggtgaaggaggatggagtgttcattacaagagggatgactctgcccttctgacggatgctgaaattgattcagtgaaaagttcagatacagatcggcaaaatgatgcgatggttgttcaacgagcgtttgctgcagctagaaaggaatctgctactaattcaaaggctcagtcgtaccagacacagttaattgcaagatcacctgttgtagataaaagtgtagtgttgcctcgttttcctcaacctcaaacatcccaaagggctttaccatcaagagtagctgcaatgttaaacgtgttgatacccactatatttgacaagcaaggagctcaactgcttgctgttgcttgccttgtcgtctcaagaacgctgatctctgaccgaatagcctctttgaatgggaccactgtgaagtatgtcttggagcaagataaggcagcctttgttcgtttgattggtttgagtgttctccaaagtggtgcatcttctataattgctccttcactaaggcatttaacgcaaaggctagcgttagggtggaggattcgtttgactcaacatctgctaaggaactatttgagaaataatgcgttttacaaggttttccacatgtcaggcaatagtattgatgcggaccagagactcactcgtgacctggaaaagttaaccgctgacttgtctggacttcttactggaatggtaaagccatcggttgacattctctggttcacctggaggatgaagttactgactggtcagaggggagttgccatactttacacatatatgttacttggtcttggttttctgagacgtgttgctcccgatttcggtgatctagccggtgaagaacagcagcttgaagggaagtttcggtttatgcacgagaggctgaacactcatgctgaatctattgcattctttggaggtggagctcgagaaaaggctatggttgacaaaaaattcagggccctactggatcattctctcatgctcttgaggaagaaatggttgtatggcatacttgatgattttgtgacaaagcaacttcccaataatgtgacgtggggattgagtttattgtatgccctagaacacaagggagacagagcacttgtctccactcaaggtgaattggcacatgcattgcggtatctagcttctgttgtctcccaaagctttatggcttttggcgatattcttgaactacacaagaagttcctggagctctctggtggtattaacagaatttttgagctcgatgagtttttggatgcttctcagtcaggtgttacctcagaaaatcaaacaagtcgtttggattctcaagatctactttccttttcggaggtggatatcattacccctgctcagaaattgatggctagcaagttgtcgtgtgaaatagtttcagggaaaagcctgctcgtcacaggtccaaatggtagtggaaagacttcagtatttagagtccttagagatatctggcccactgtatgtggaagacttaccaaaccatcattggatatcaaagaacttgggtcagggaatggcatgttttttgtcccgcagcgaccttatacatgtttagggacactgagagatcaaattatataccctctatctaaagaagaagcagagaaaagggcagcaaagttgtacaccagtggagagagctcaacagaagctggaagcattctggattctcatttgaaaaccattctggagaatgttcggttagtttatctcttggaaagagacgtaggtggttgggatgctactaccaattgggaagacatattatctcttggagagcaacagagattaggcatggcacgtttattctttcacaggccgaagtttggagtccttgatgaatgcacaaatgcgacgagtgttgatgttgaggaacagctctatagagttgcacgagacatgggagtcactttcataacctcatcacaacggccggctctgatcccattccattccttggagctaaggctgattgatggagaaggaaactgggagctccgttcgatcgaacagacaacagagtgaactcagcaaaacatttttagaaaggtctatatagttgttaaagaaaaaagtaataaagttaaagccattagacgatgcaagctatatggtatgtagtatatggattcttcctcgatcgcaaggagtggaagagaatgcgtcgatgctagtgcttttgttagaattggaggatttgatttgattctagatatatataaatgtaggcgattgaattggtggagcattttgagttctcctatggagtatggtcttagctttgaacaaacaaagaatatagtgatcactcaaataatgtacagttcgtttcaatttcctttgttgggattagtttttctatcttataattaaaagaatgaaattgaagtggttgaatc

SEQ ID NO: 36916 - protein, 1337 aa, Arabidopsis thaliana
  peptide (1)..(1337): Ceres Seq. ID no. 13491072
MPSLQLLQLTERGRGLVASRRKSILLAAGIVAAGGTAVYLKSRVASRRPDSSRLCNGQSDDDETLEKLTATDQNAKITTKKKKGGGLKSLQVLTAILLSQMGKMGARDLLALVATVVFRTALSNRLAKVQGFLFRAAFLRRAPLFLRLISENIMLCFMLSTLHSTSKYITGALSLRFRKILTKIIHSHYFENMVYYKISHVDGRITHPEQRIASDVPRFSSELSDLILDDLTAVTDGILYAWRLCSYASPKYIFWILAYVLGAGTAIRNFSPSFGKLMSKEQQLEGEYRQLHSRLRTHSESIAFYGGETREESHIQQKFKNLVSHMSHVLHDHWWFGMIQDFLLKYLGATVAVILIIEPFFSGHLRPDDSTLGRAEMLSNIRYHTSVIISLFQALGTLSISSRRLNRLSGYADRIHELMAVSRELSGDDKSSFQRNRSRNYLSEANYVEFSDVKVVTPTGNVLVEDLTLRVEQGSNLLITGPNGSGKSSLFRVLGGLWPLVSGHIVKPGVGSDLNKEIFYVPQRPYMAVGTLRDQLIYPLTSGQESELLTEIGMVELLKNVDLEYLLDRYQPEKEVNWGDELSLGEQQRLGMARLFYHKPKFAILDECTSAVTTDMEERFAAKVRAMGTSCITISHRPALVAFHDVVLSLDGEGGWSVHYKRDDSALLTDAEIDSVKSSDTDRQNDAMVVQRAFAAARKESATNSKAQSYQTQLIARSPVVDKSVVLPRFPQPQTSQRALPSRVAAMLNVLIPTIFDKQGAQLLAVACLVVSRTLISDRIASLNGTTVKYVLEQDKAAFVRLIGLSVLQSGASSIIAPSLRHLTQRLALGWRIRLTQHLLRNYLRNNAFYKVFHMSGNSIDADQRLTRDLEKLTADLSGLLTGMVKPSVDILWFTWRMKLLTGQRGVAILYTYMLLGLGFLRRVAPDFGDLAGEEQQLEGKFRFMHERLNTHAESIAFFGGGAREKAMVDKKFRALLDHSLMLLRKKWLYGILDDFVTKQLPNNVTWGLSLLYALEHKGDRALVSTQGELAHALRYLASVVSQSFMAFGDILELHKKFLELSGGINRIFELDEFLDASQSGVTSENQTSRLDSQDLLSFSEVDIITPAQKLMASKLSCEIVSGKSLLVTGPNGSGKTSVFRVLRDIWPTVCGRLTKPSLDIKELGSGNGMFFVPQRPYTCLGTLRDQIIYPLSKEEAEKRAAKLYTSGESSTEAGSILDSHLKTILENVRLVYLLERDVGGWDATTNWEDILSLGEQQRLGMARLFFHRPKFGVLDECTNATSVDVEEQLYRVARDMGVTFITSSQRPALIPFHSLELRLIDGEGNWELRSIEQTTE

SEQ ID NO: 36917 - protein, 1237 aa, Arabidopsis thaliana
  peptide (1)..(1237): Ceres Seq. ID no. 13491073
MGKMGARDLLALVATVVFRTALSNRLAKVQGFLFRAAFLRRAPLFLRLISENIMLCFMLSTLHSTSKYITGALSLRFRKILTKIIHSHYFENMVYYKISHVDGRITHPEQRIASDVPRFSSELSDLILDDLTAVTDGILYAWRLCSYASPKYIFWILAYVLGAGTAIRNFSPSFGKLMSKEQQLEGEYRQLHSRLRTHSESIAFYGGETREESHIQQKFKNLVSHMSHVLHDHWWFGMIQDFLLKYLGATVAVILIIEPFFSGHLRPDDSTLGRAEMLSNIRYHTSVIISLFQALGTLSISSRRLNRLSGYADRIHELMAVSRELSGDDKSSFQRNRSRNYLSEANYVEFSDVKVVTPTGNVLVEDLTLRVEQGSNLLITGPNGSGKSSLFRVLGGLWPLVSGHIVKPGVGSDLNKEIFYVPQRPYMAVGTLRDQLIYPLTSGQESELLTEIGMVELLKNVDLEYLLDRYQPEKEVNWGDELSLGEQQRLGMARLFYHKPKFAILDECTSAVTTDMEERFAAKVRAMGTSCITISHRPALVAFHDVVLSLDGEGGWSVHYKRDDSALLTDAEIDSVKSSDTDRQNDAMVVQRAFAAARKESATNSKAQSYQTQLIARSPVVDKSVVLPRFPQPQTSQRALPSRVAAMLNVLIPTIFDKQGAQLLAVACLVVSRTLISDRIASLNGTTVKYVLEQDKAAFVRLIGLSVLQSGASSIIAPSLRHLTQRLALGWRIRLTQHLLRNYLRNNAFYKVFHMSGNSIDADQRLTRDLEKLTADLSGLLTGMVKPSVDILWFTWRMKLLTGQRGVAILYTYMLLGLGFLRRVAPDFGDLAGEEQQLEGKFRFMHERLNTHAESIAFFGGGAREKAMVDKKFRALLDHSLMLLRKKWLYGILDDFVTKQLPNNVTWGLSLLYALEHKGDRALVSTQGELAHALRYLASVVSQSFMAFGDILELHKKFLELSGGINRIFELDEFLDASQSGVTSENQTSRLDSQDLLSFSEVDIITPAQKLMASKLSCEIVSGKSLLVTGPNGSGKTSVFRVLRDIWPTVCGRLTKPSLDIKELGSGNGMFFVPQRPYTCLGTLRDQIIYPLSKEEAEKRAAKLYTSGESSTEAGSILDSHLKTILENVRLVYLLERDVGGWDATTNWEDILSLGEQQRLGMARLFFHRPKFGVLDECTNATSVDVEEQLYRVARDMGVTFITSSQRPALIPFHSLELRLIDGEGNWELRSIEQTTE

SEQ ID NO: 36918 - protein, 1234 aa, Arabidopsis thaliana
  peptide (1)..(1234): Ceres Seq. ID no. 13491074
MGARDLLALVATVVFRTALSNRLAKVQGFLFRAAFLRRAPLFLRLISENIMLCFMLSTLHSTSKYITGALSLRFRKILTKIIHSHYFENMVYYKISHVDGRITHPEQRIASDVPRFSSELSDLILDDLTAVTDGILYAWRLCSYASPKYIFWILAYVLGAGTAIRNFSPSFGKLMSKEQQLEGEYRQLHSRLRTHSESIAFYGGETREESHIQQKFKNLVSHMSHVLHDHWWFGMIQDFLLKYLGATVAVILIIEPFFSGHLRPDDSTLGRAEMLSNIRYHTSVIISLFQALGTLSISSRRLNRLSGYADRIHELMAVSRELSGDDKSSFQRNRSRNYLSEANYVEFSDVKVVTPTGNVLVEDLTLRVEQGSNLLITGPNGSGKSSLFRVLGGLWPLVSGHIVKPGVGSDLNKEIFYVPQRPYMAVGTLRDQLIYPLTSGQESELLTEIGMVELLKNVDLEYLLDRYQPEKEVNWGDELSLGEQQRLGMARLFYHKPKFAILDECTSAVTTDMEERFAAKVRAMGTSCITISHRPALVAFHDVVLSLDGEGGWSVHYKRDDSALLTDAEIDSVKSSDTDRQNDAMVVQRAFAAARKESATNSKAQSYQTQLIARSPVVDKSVVLPRFPQPQTSQRALPSRVAAMLNVLIPTIFDKQGAQLLAVACLVVSRTLISDRIASLNGTTVKYVLEQDKAAFVRLIGLSVLQSGASSIIAPSLRHLTQRLALGWRIRLTQHLLRNYLRNNAFYKVFHMSGNSIDADQRLTRDLEKLTADLSGLLTGMVKPSVDILWFTWRMKLLTGQRGVAILYTYMLLGLGFLRRVAPDFGDLAGEEQQLEGKFRFMHERLNTHAESIAFFGGGAREKAMVDKKFRALLDHSLMLLRKKWLYGILDDFVTKQLPNNVTWGLSLLYALEHKGDRALVSTQGELAHALRYLASVVSQSFMAFGDILELHKKFLELSGGINRIFELDEFLDASQSGVTSENQTSRLDSQDLLSFSEVDIITPAQKLMASKLSCEIVSGKSLLVTGPNGSGKTSVFRVLRDIWPTVCGRLTKPSLDIKELGSGNGMFFVPQRPYTCLGTLRDQIIYPLSKEEAEKRAAKLYTSGESSTEAGSILDSHLKTILENVRLVYLLERDVGGWDATTNWEDILSLGEQQRLGMARLFFHRPKFGVLDECTNATSVDVEEQLYRVARDMGVTFITSSQRPALIPFHSLELRLIDGEGNWELRSIEQTTE

SEQ ID NO: 36919 - DNA, 1250 bp, Arabidopsis thaliana
  misc_feature (1)..(1250): Ceres Seq. ID no. 13491036
  misc_feature (1)..(1250): Ortholog of  Ceres SEQ ID NO 13657142 as cited in SEQ ID NO 65931
ctctctctctctctctcttctcgcttctcttctcctctccgatcttctctgtgaccctcttcttcttcgatttcctttgggtttcttctccgaatcgccggagaaaaaaacccttctttgaatctaaagagactgtttttttgaagctattgactgattgattgataaggaagaataagcattgatcgatctgaattttgggtacaagatgtcgagattcagagacaggacggaggatttcaaggattctgttcggaattccgctgtttcgataggttataatgagtctaaagtggcatcaacaatggcgtcttttattatacataagccaaaggagagatcgcctttcacgaaagctgctttcaaaacgcttgatagcatcaaggagttggaactgtttatgttgaagcatcgaaaggattatgttgatctgcaccggactacagaacaggaaaaggatagtattgaacaagaagttgctgcttttattaaagcttgcaaagaacagatcgatattctcataaacagtattagaaatgaagaagcaaactccaaaggatggcttggcctccccgcagataacttcaatgctgattctatagcacacaaacatggagtggttttgattctgagtgagaaacttcattcagtcactgcccagtttgatcagcttagagctactcgtttccaagatattataaacagagctatgccgagaagaaaacctaagagggtcataaaggaagctaccccaattaatacaactctgggaaattcggagtccatagaaccggatgaaatccaggcccaacctcgtagattacaacaacaacaacttctagacgatgaaacacaagcccttcaggtagagctaagtaatcttttagatggtgctaggcagacagaaactaagatggtggagatgtctgcattaaaccacttgatggcaactcatgttctgcagcaagcccaacagatagagtttctttatgaccaggcagttgaggcaacaaagaacgtggagcttggaaacaaagagctttctcaagcaatccaacgaaacagcagcagcagaacctttctcttactgtttttcttcgtccttactttctccgtcttgttcttggattggtacagttaaaaaaccattctccaacaacaacttcacacagtttttgtagattttgattgttaactataaattatgaaaatttggaaatgggtttaaatgttaaaacaaaaataatgag

SEQ ID NO: 36920 - protein, 310 aa, Arabidopsis thaliana
  peptide (1)..(310): Ceres Seq. ID no. 13491037
MSRFRDRTEDFKDSVRNSAVSIGYNESKVASTMASFIIHKPKERSPFTKAAFKTLDSIKELELFMLKHRKDYVDLHRTTEQEKDSIEQEVAAFIKACKEQIDILINSIRNEEANSKGWLGLPADNFNADSIAHKHGVVLILSEKLHSVTAQFDQLRATRFQDIINRAMPRRKPKRVIKEATPINTTLGNSESIEPDEIQAQPRRLQQQQLLDDETQALQVELSNLLDGARQTETKMVEMSALNHLMATHVLQQAQQIEFLYDQAVEATKNVELGNKELSQAIQRNSSSRTFLLLFFFVLTFSVLFLDWYS

SEQ ID NO: 36921 - protein, 278 aa, Arabidopsis thaliana
  peptide (1)..(278): Ceres Seq. ID no. 13491038
MASFIIHKPKERSPFTKAAFKTLDSIKELELFMLKHRKDYVDLHRTTEQEKDSIEQEVAAFIKACKEQIDILINSIRNEEANSKGWLGLPADNFNADSIAHKHGVVLILSEKLHSVTAQFDQLRATRFQDIINRAMPRRKPKRVIKEATPINTTLGNSESIEPDEIQAQPRRLQQQQLLDDETQALQVELSNLLDGARQTETKMVEMSALNHLMATHVLQQAQQIEFLYDQAVEATKNVELGNKELSQAIQRNSSSRTFLLLFFFVLTFSVLFLDWYS

SEQ ID NO: 36922 - protein, 246 aa, Arabidopsis thaliana
  peptide (1)..(246): Ceres Seq. ID no. 13491039
MLKHRKDYVDLHRTTEQEKDSIEQEVAAFIKACKEQIDILINSIRNEEANSKGWLGLPADNFNADSIAHKHGVVLILSEKLHSVTAQFDQLRATRFQDIINRAMPRRKPKRVIKEATPINTTLGNSESIEPDEIQAQPRRLQQQQLLDDETQALQVELSNLLDGARQTETKMVEMSALNHLMATHVLQQAQQIEFLYDQAVEATKNVELGNKELSQAIQRNSSSRTFLLLFFFVLTFSVLFLDWYS

SEQ ID NO: 36923 - DNA, 915 bp, Arabidopsis thaliana
  misc_feature (1)..(915): Ceres Seq. ID no. 13592911
  misc_feature (1)..(915): Ortholog of  Ceres SEQ ID NO 12619999 as cited in SEQ ID NO 66123
  misc_feature (1)..(915): Ortholog of  Ceres SEQ ID NO 13656436 as cited in SEQ ID NO 69154
aacctctctttatttttgtttcttatattatagagaaaaagagctttttcccggaaagttgttctcatcttggaaaatcaaatctcggaaacgcagtcttcagctaaatcatgagcaacgagtacgattatctgttcaagcttttgttgatcggtgactcctctgttggaaaatcgtgtcttcttctccgattcgctgatgatgcttacattgacagctacataagcaccattggtgttgacttcaaaattaggacgattgagcaggatgggaagacgattaagctgcaaatttgggatactgctggacaggagcgtttcaggaccatcactagcagctattacagaggagctcatggaatcattattgtttatgactgtactgagatggaaagcttcaacaatgtgaagcagtggttgagtgagatcgatagatatgccaatgagagtgtttgcaagcttttaatcggtaacaagaatgatatggttgaaagcaaagttgtttccaccgaaactggaagggccttagcagatgagcttggaattccctttcttgagaccagtgccaaggattctattaacgttgaacaggcattcttaactattgctggcgagatcaaaaagaaaatgggaagccaaacgaatgcaaacaagacatctggtcctggaactgtccaaatgaaaggtcagccaatccaacagaacaatggcggttgctgcggtcagtagtttaaaaaatgttttaatcaaaactatctgagactctttttttacttcctttttaactaagtgttgtgaaaaccaatggctgtttaaaacaactaagaaatgtaatattccatgtcgctgtgtcttgaataagctatggtgttagttgcaagatacttcactttaatatagttcagtcttgactttg

SEQ ID NO: 36924 - protein, 205 aa, Arabidopsis thaliana
  peptide (1)..(205): Ceres Seq. ID no. 13592912
MSNEYDYLFKLLLIGDSSVGKSCLLLRFADDAYIDSYISTIGVDFKIRTIEQDGKTIKLQIWDTAGQERFRTITSSYYRGAHGIIIVYDCTEMESFNNVKQWLSEIDRYANESVCKLLIGNKNDMVESKVVSTETGRALADELGIPFLETSAKDSINVEQAFLTIAGEIKKKMGSQTNANKTSGPGTVQMKGQPIQQNNGGCCGQ

SEQ ID NO: 36925 - protein, 113 aa, Arabidopsis thaliana
  peptide (1)..(113): Ceres Seq. ID no. 13592913
MESFNNVKQWLSEIDRYANESVCKLLIGNKNDMVESKVVSTETGRALADELGIPFLETSAKDSINVEQAFLTIAGEIKKKMGSQTNANKTSGPGTVQMKGQPIQQNNGGCCGQ

SEQ ID NO: 36926 - DNA, 986 bp, Arabidopsis thaliana
  misc_feature (1)..(986): Ceres Seq. ID no. 12393802
  misc_feature (1)..(986): Ortholog of  Ceres SEQ ID NO 13598455 as cited in SEQ ID NO 62908
aatcggcaaaattttctgctcctgagaaacaagtagagatactaaagatggaatctttgaactaaattcgaaaccttttaatgggtaccgagtcgggttcggatccagaatcgagctcaaacgggtggagccgtgctcgtggtctagttgtcaagactctggttttaattggcggtgctcttctcatcaagcgtctcactaaatccaccactcgtagagatcacgcccgtgtcgtctctcgttctctcaccggagagaagtttacgagggagcaagcgtcaagagatcctgataattacttcaacataagaatgctgagttgtccagctgctgaaatggtggatggttcagaggttttgtatctcgaacaggcattttggaggactcctcagaaaccgtttcgacaaagattatatatggtgaaaccgtgtccaaaagagctaaaatgtgatgttgaggtaagttcatatgcgatcagagatgctgaggaatacaaaaatttctgtgaccggcctaaggaccaacgcccacttcctgaagaagttattggtgacattggagagcatttgacgactatacacctgaattgttgtgaccgtgggaaacgttgcttgtacgaaggctcaacttcacctggtggatttccaaattcatggaacggggctagctattgtacttcagatcttgcagttctgaaaaacaatgagatacacctctgggatcgcggctttgatgagaatcgaaaccaggtttggggaccaaaggaaggtccgtacgagttcaagccagcgacatcatcgagcatcaacgaaaacttgtctgctttgaacatcctttatcaatcttctatcgataaaccaatccaagggtccctcatcttgcaagactagccaatttgcacccccttttctattgtctgatcttctctgtatcacacttagcctctttattcatctcatctcagccactttcaatatagttttggt

SEQ ID NO: 36927 - protein, 269 aa, Arabidopsis thaliana
  peptide (1)..(269): Ceres Seq. ID no. 12393803
MGTESGSDPESSSNGWSRARGLVVKTLVLIGGALLIKRLTKSTTRRDHARVVSRSLTGEKFTREQASRDPDNYFNIRMLSCPAAEMVDGSEVLYLEQAFWRTPQKPFRQRLYMVKPCPKELKCDVEVSSYAIRDAEEYKNFCDRPKDQRPLPEEVIGDIGEHLTTIHLNCCDRGKRCLYEGSTSPGGFPNSWNGASYCTSDLAVLKNNEIHLWDRGFDENRNQVWGPKEGPYEFKPATSSSINENLSALNILYQSSIDKPIQGSLILQD

SEQ ID NO: 36928 - protein, 192 aa, Arabidopsis thaliana
  peptide (1)..(192): Ceres Seq. ID no. 12393804
MLSCPAAEMVDGSEVLYLEQAFWRTPQKPFRQRLYMVKPCPKELKCDVEVSSYAIRDAEEYKNFCDRPKDQRPLPEEVIGDIGEHLTTIHLNCCDRGKRCLYEGSTSPGGFPNSWNGASYCTSDLAVLKNNEIHLWDRGFDENRNQVWGPKEGPYEFKPATSSSINENLSALNILYQSSIDKPIQGSLILQD

SEQ ID NO: 36929 - protein, 184 aa, Arabidopsis thaliana
  peptide (1)..(184): Ceres Seq. ID no. 12393805
MVDGSEVLYLEQAFWRTPQKPFRQRLYMVKPCPKELKCDVEVSSYAIRDAEEYKNFCDRPKDQRPLPEEVIGDIGEHLTTIHLNCCDRGKRCLYEGSTSPGGFPNSWNGASYCTSDLAVLKNNEIHLWDRGFDENRNQVWGPKEGPYEFKPATSSSINENLSALNILYQSSIDKPIQGSLILQD

SEQ ID NO: 36930 - DNA, 717 bp, Arabidopsis thaliana
  misc_feature (1)..(717): Ceres Seq. ID no. 12420495
  misc_feature (1)..(717): Ortholog of  Ceres SEQ ID NO 12563124 as cited in SEQ ID NO 57104
  misc_feature (1)..(717): Ortholog of  Ceres SEQ ID NO 12584664 as cited in SEQ ID NO 62232
  misc_feature (1)..(717): Ortholog of  Ceres SEQ ID NO 12617639 as cited in SEQ ID NO 65219
  misc_feature (1)..(717): Ortholog of  Ceres SEQ ID NO 15179982 as cited in SEQ ID NO 0
ataagtctctctcttacattttgaaaccctaatttctcaaaaaaaatgtctgaagttgagtaccggtgctttgtcggcggccttgcctgggccaccaatgatgaagatcttcaaaggacgttctcacagttcggcgacgttgtcgattctaagatcattaacgaccgagagagtggaagatcaaggggattcggattcgtcaccttcaaggacgagaaagccatgagggatgcgattgaagagatgaacggtaaagagctcgatggacgtgtcatcaccgtgaacgaggctcagtcgagaggtagcggcggtggcggaggaggccgtggtggaagcggtggtggttaccgcagcggaggcggtggtggatactcaggaggcggtggtggttacgagagacgtagcggaggttacggatctggtggaggcggtggtggccgaggatacggtggtggtggacgccgtgagggaggtggctacggaggcggtgatggtggaagttacggcggcggtggtggcggctggtaatcaaagatagagttttttgcgtgctgctgctctgtttttggtttagatttggatttgtgtcaccacttctggtttggttatcgttcgtttggtttacttttttgatgaaacagtttcgtttaagtcttctttgtctggatcgaaatgttaattcgcgtgttgtttactaaatttataacgtttcctttt

SEQ ID NO: 36931 - protein, 160 aa, Arabidopsis thaliana
  peptide (1)..(160): Ceres Seq. ID no. 12420496
MSEVEYRCFVGGLAWATNDEDLQRTFSQFGDVVDSKIINDRESGRSRGFGFVTFKDEKAMRDAIEEMNGKELDGRVITVNEAQSRGSGGGGGGRGGSGGGYRSGGGGGYSGGGGGYERRSGGYGSGGGGGGRGYGGGGRREGGGYGGGDGGSYGGGGGGW

SEQ ID NO: 36932 - protein, 101 aa, Arabidopsis thaliana
  peptide (1)..(101): Ceres Seq. ID no. 12420497
MRDAIEEMNGKELDGRVITVNEAQSRGSGGGGGGRGGSGGGYRSGGGGGYSGGGGGYERRSGGYGSGGGGGGRGYGGGGRREGGGYGGGDGGSYGGGGGGW

SEQ ID NO: 36933 - protein, 94 aa, Arabidopsis thaliana
  peptide (1)..(94): Ceres Seq. ID no. 12420498
MNGKELDGRVITVNEAQSRGSGGGGGGRGGSGGGYRSGGGGGYSGGGGGYERRSGGYGSGGGGGGRGYGGGGRREGGGYGGGDGGSYGGGGGGW

SEQ ID NO: 36934 - DNA, 955 bp, Arabidopsis thaliana
  misc_feature (1)..(955): Ceres Seq. ID no. 12688284
  misc_feature (1)..(955): Ortholog of  Ceres SEQ ID NO 15176511 as cited in SEQ ID NO 1054
  misc_feature (1)..(955): Ortholog of  Ceres SEQ ID NO 14305178 as cited in SEQ ID NO 0
aacctcaaaaaatccaaacttgagctttgtattccgacaaaaaaatggcgactgcgtctctagttccgacatctaaaatcttctctgtctctccgaaatcctcagcttcgattaaagcaaggagcagagtagttgttgcatcgtcgcaacaacaacaacaaccaagaaggagagagcttctgctgaaatcggcggtggcgattccggcgattctgcaattgaaggaagctccgatatcagcggcgcgtgaggtggaagttggatcgtacttacctctgtctccgtctgatccttctttcgtcctgtttaaagccaaaccttcagatactcctgctctccgcgcaggaaatgttcagccctatcagtttgttctaccgccgaattggaaacagttgcgaatagccaatattttgtcaggtaattactgtcaaccgaaatgtgcagagccatggatcgaagtgaagtttgagaacgagaagcaaggcaaggttcaagtagttgcatctcctttaatccgcttaaccaacaaaccaaatgcaactattgaagatctcggtgagcctgagaaagtgattgcttctcttggtccttttgtcaccggaaactcttatgactctgatgaacttttgaagacttcaatcgaaaaaattggagatcaaacgtactataagtatgtgttggagacgccatttgcgctcacgggaagtcacaatcttgcaaaagcgacagcaaagggaagcacggttgttttgtttgttgtaagtgctactgaaaagcaatggcagagctcacagaagactcttgaagccattcttgattcttttcaactgtaaatcagagtttttgttatgactctggacttgagaaactaaagagcaaacagtttatgctaaggagtgtctgtgcgtagtaacattaactcattcttttctactgtaaattcgagctatgactc

SEQ ID NO: 36935 - protein, 262 aa, Arabidopsis thaliana
  peptide (1)..(262): Ceres Seq. ID no. 12688285
MATASLVPTSKIFSVSPKSSASIKARSRVVVASSQQQQQPRRRELLLKSAVAIPAILQLKEAPISAAREVEVGSYLPLSPSDPSFVLFKAKPSDTPALRAGNVQPYQFVLPPNWKQLRIANILSGNYCQPKCAEPWIEVKFENEKQGKVQVVASPLIRLTNKPNATIEDLGEPEKVIASLGPFVTGNSYDSDELLKTSIEKIGDQTYYKYVLETPFALTGSHNLAKATAKGSTVVLFVVSATEKQWQSSQKTLEAILDSFQL

SEQ ID NO: 36936 - DNA, 1237 bp, Arabidopsis thaliana; identical to SEQ ID NO: 29928
  misc_feature (1)..(1237): Ceres Seq. ID no. 13580595
  misc_feature (1)..(1237): Ortholog of  Ceres SEQ ID NO 14311044 as cited in SEQ ID NO 53643

SEQ ID NO: 36937 - protein, 165 aa, Arabidopsis thaliana; identical to SEQ ID NO: 29929
  peptide (1)..(165): Ceres Seq. ID no. 13580596

SEQ ID NO: 36938 - protein, 151 aa, Arabidopsis thaliana; identical to SEQ ID NO: 23095
  peptide (1)..(151): Ceres Seq. ID no. 13580597

SEQ ID NO: 36939 - protein, 126 aa, Arabidopsis thaliana; identical to SEQ ID NO: 29931
  peptide (1)..(126): Ceres Seq. ID no. 13580598

SEQ ID NO: 36940 - DNA, 683 bp, Arabidopsis thaliana
  misc_feature (1)..(683): Ceres Seq. ID no. 12393828
  misc_feature (1)..(683): Ortholog of  Ceres SEQ ID NO 12608513 as cited in SEQ ID NO 58090
aatacacaaaaccctttcactaataacaatctccaaatggctaaatcatttgcacctctcatcgctgtgttatgcgttttggttctcccacttgcggccatggcggttggaacgccattccacattgaaggaagtgtttactgcgacacttgccgctttggattcgagacaatcgccacccaatatatccgcggggcaagagtgagaatagtatgcaaagacagagtgacactaaaatcggagttggttggggtggcggtgacgggacctgatgggaaatacaaagtcgccgtcagaggagaccgacaggaccagcaatgtctggcggagcttgttcacagtccactgtcccgctgccaagaggctgatcctggcagaagcaccgctaccgtgatcctcacgcgctccaacggagccgcctctactcgtcactacgccaacgccatgggtttcttcagggacgaaccgctccgtggctgcgccgctctccgcaaacgctacctcgcagacggcgataaccgggctatttgagtcatcttatgttcttgatgaaacagaacacaaaaatttatttagagtttttatttatttctattttattgtattgttgagtctctaaagatggtgagactatttagacatatctaagataaaccatataaaataaagtatttgcaacctcc

SEQ ID NO: 36941 - protein, 176 aa, Arabidopsis thaliana
  peptide (1)..(176): Ceres Seq. ID no. 12393829
NTQNPFTNNNLQMAKSFAPLIAVLCVLVLPLAAMAVGTPFHIEGSVYCDTCRFGFETIATQYIRGARVRIVCKDRVTLKSELVGVAVTGPDGKYKVAVRGDRQDQQCLAELVHSPLSRCQEADPGRSTATVILTRSNGAASTRHYANAMGFFRDEPLRGCAALRKRYLADGDNRAI

SEQ ID NO: 36942 - protein, 164 aa, Arabidopsis thaliana
  peptide (1)..(164): Ceres Seq. ID no. 12393830
MAKSFAPLIAVLCVLVLPLAAMAVGTPFHIEGSVYCDTCRFGFETIATQYIRGARVRIVCKDRVTLKSELVGVAVTGPDGKYKVAVRGDRQDQQCLAELVHSPLSRCQEADPGRSTATVILTRSNGAASTRHYANAMGFFRDEPLRGCAALRKRYLADGDNRAI

SEQ ID NO: 36943 - protein, 143 aa, Arabidopsis thaliana
  peptide (1)..(143): Ceres Seq. ID no. 12393831
MAVGTPFHIEGSVYCDTCRFGFETIATQYIRGARVRIVCKDRVTLKSELVGVAVTGPDGKYKVAVRGDRQDQQCLAELVHSPLSRCQEADPGRSTATVILTRSNGAASTRHYANAMGFFRDEPLRGCAALRKRYLADGDNRAI

SEQ ID NO: 36944 - DNA, 1565 bp, Arabidopsis thaliana
  misc_feature (1)..(1565): Ceres Seq. ID no. 13491778
  misc_feature (1)..(1565): Ortholog of  Ceres SEQ ID NO 12593464 as cited in SEQ ID NO 69039
cttcatcatcatcgtattcaccgttgtcctttctttcattgacacttgccagtttacatcgacaaacaaaagaaatcagaatggatttctcagggagcttctttgtcatcttcgttaccttcttctttctccctcctctgtcttcagctgggagctacgattctggttcgggtctcgagtcactcgctcgcgggatgcttcattcagccaaggatcctgagttcttcgagtggatgagaggaattaggagaaagattcatgagaacccagagacagggtttcaggagttcaaaacgagtcaactcgttcgagacgagcttgactcgcttggagtgaagtataagtatcctgtggcgaagactggcgtcgtcgcttggatcggatcctgttcgaaacctgttttcggacttagagccgacatggacgcacttccgttacaggaattagtggaatgggaatcgaaaagtaaagtagatggaaagatgcatgcttgtggtcatgatactcatgttgctatgcttcttggtgctgctaagcttcttcaaaccacaaaacacctcatcaaggggacagtaaaacttgtgtttcaaccaggcgaggaaggttatgcaggtgcttatgaaatgctaaaagacgagattctagacgacttagatgggatactcagtgttcatgtctttccatcgatcccatcaggtggtattggttctaggcctgggaccgttcttgcaggtgcaggattgtttacagtcacggttcacggtcaaggtagccacgcagctacaccgcacttctctaaagacccggttcttgcagcttcttccgctgttgttgccttgcaacagattgtttcgcgggaactggatccactcgaagctggtgtggttacagttggatatattgaaggaggtcatgctcaaaacgtaataccgcagagtgcgaaatttggaggtactttcagaagcttaagcaacgatgggcttctatttatccaaagacggatcaaagagatttcagaggcacaagcatcggtataccgatgcaaagcagaagtaaacttcgaagagaaaaagccgtcgcttcacccggtaatgaataacgacgagggcttatacgagcacggtaaaaaagtagcggaagcgatgattggaaagaataacttccatgatttcccggtgacaatgggaggagaggatttcagcttcttcactcaaaagactaaggctgcgattttcgtgctgggggtaaagaatgagacgctaggcgctggtaagccgcttcactcgccttacttctttgttgatgaagaagctcttcctgttggggctgctcttcacgcagctatggccgtttcttatttggacgaacatggtcatagccatgaagaagaggttaagagtgaattatagaaggtgttgggagaaaatcagcttatattagtcatcatctatttgtatttgaacttgaaagttaggtgaggttaggtttcgggttgggaagaatgtttgttaatagtcacgagaaaccaaccacttctattaaaataaatttgatgtaagagtttt

SEQ ID NO: 36945 - protein, 468 aa, Arabidopsis thaliana
  peptide (1)..(468): Ceres Seq. ID no. 13491779
SSSSYSPLSFLSLTLASLHRQTKEIRMDFSGSFFVIFVTFFFLPPLSSAGSYDSGSGLESLARGMLHSAKDPEFFEWMRGIRRKIHENPETGFQEFKTSQLVRDELDSLGVKYKYPVAKTGVVAWIGSCSKPVFGLRADMDALPLQELVEWESKSKVDGKMHACGHDTHVAMLLGAAKLLQTTKHLIKGTVKLVFQPGEEGYAGAYEMLKDEILDDLDGILSVHVFPSIPSGGIGSRPGTVLAGAGLFTVTVHGQGSHAATPHFSKDPVLAASSAVVALQQIVSRELDPLEAGVVTVGYIEGGHAQNVIPQSAKFGGTFRSLSNDGLLFIQRRIKEISEAQASVYRCKAEVNFEEKKPSLHPVMNNDEGLYEHGKKVAEAMIGKNNFHDFPVTMGGEDFSFFTQKTKAAIFVLGVKNETLGAGKPLHSPYFFVDEEALPVGAALHAAMAVSYLDEHGHSHEEEVKSEL

SEQ ID NO: 36946 - protein, 442 aa, Arabidopsis thaliana
  peptide (1)..(442): Ceres Seq. ID no. 13491780
MDFSGSFFVIFVTFFFLPPLSSAGSYDSGSGLESLARGMLHSAKDPEFFEWMRGIRRKIHENPETGFQEFKTSQLVRDELDSLGVKYKYPVAKTGVVAWIGSCSKPVFGLRADMDALPLQELVEWESKSKVDGKMHACGHDTHVAMLLGAAKLLQTTKHLIKGTVKLVFQPGEEGYAGAYEMLKDEILDDLDGILSVHVFPSIPSGGIGSRPGTVLAGAGLFTVTVHGQGSHAATPHFSKDPVLAASSAVVALQQIVSRELDPLEAGVVTVGYIEGGHAQNVIPQSAKFGGTFRSLSNDGLLFIQRRIKEISEAQASVYRCKAEVNFEEKKPSLHPVMNNDEGLYEHGKKVAEAMIGKNNFHDFPVTMGGEDFSFFTQKTKAAIFVLGVKNETLGAGKPLHSPYFFVDEEALPVGAALHAAMAVSYLDEHGHSHEEEVKSEL

SEQ ID NO: 36947 - protein, 404 aa, Arabidopsis thaliana
  peptide (1)..(404): Ceres Seq. ID no. 13491781
MLHSAKDPEFFEWMRGIRRKIHENPETGFQEFKTSQLVRDELDSLGVKYKYPVAKTGVVAWIGSCSKPVFGLRADMDALPLQELVEWESKSKVDGKMHACGHDTHVAMLLGAAKLLQTTKHLIKGTVKLVFQPGEEGYAGAYEMLKDEILDDLDGILSVHVFPSIPSGGIGSRPGTVLAGAGLFTVTVHGQGSHAATPHFSKDPVLAASSAVVALQQIVSRELDPLEAGVVTVGYIEGGHAQNVIPQSAKFGGTFRSLSNDGLLFIQRRIKEISEAQASVYRCKAEVNFEEKKPSLHPVMNNDEGLYEHGKKVAEAMIGKNNFHDFPVTMGGEDFSFFTQKTKAAIFVLGVKNETLGAGKPLHSPYFFVDEEALPVGAALHAAMAVSYLDEHGHSHEEEVKSEL

SEQ ID NO: 36948 - DNA, 1977 bp, Arabidopsis thaliana
  misc_feature (1)..(1977): Ceres Seq. ID no. 12604873
  misc_feature (1)..(1977): Ortholog of  Ceres SEQ ID NO 12586556 as cited in SEQ ID NO 64667
  misc_feature (1)..(1977): Ortholog of  Ceres SEQ ID NO 13660894 as cited in SEQ ID NO 67475
atgacgtcatcactacctgttcgagctccttcctgggtctcttcccggagaattttcgaagagagactccaagaccttcccaaatgcgctaatctaaaccaagtgaaacagcttcacgctcagataatccgacgaaaccttcatgaagatctacacatagcaccgaagctaatctctgctctttctctctgtcgtcaaacgaatttagctgttagggtttttaatcaggttcaagaaccaaatgttcatctttgcaattctctgattagagctcatgcccagaactctcagccttatcaagctttcttcgttttctcagagatgcaaagatttggtctttttgctgataatttcacttacccgtttcttcttaaagcttgttctggtcaatcatggttacctgtggtgaagatgatgcataatcatatagaaaaattggggctttcttctgatatttatgtacccaatgctctcattgattgttattctagatgtggtggtttgggtgttagagatgctatgaagttgtttgagaagatgagtgaaagagatactgtgtcttggaattcgatgcttggtgggttagtgaaagctggggaattgagagatgcacggagactgttcgatgaaatgcctcagagggatttgattagttggaatactatgttggatggttatgctaggtgtagagagatgagtaaagcgtttgagttgtttgagaagatgcctgagagaaatactgtgtcttggtcgacgatggttatgggttatagtaaagctggggatatggaaatggctagagttatgtttgataaaatgccattgcctgctaaaaatgttgtcacttggacgataattattgctgggtatgcggagaaggggcttttgaaggaggctgatagattagttgaccaaatggtggcttcaggattgaaatttgatgctgcggctgtgattagtatcttggctgcttgtactgagtctggtttgctcagtttaggaatgaggattcactccatactgaaaaggtctaatctcggttcgaatgcttatgtgttgaatgcactacttgatatgtatgcaaaatgtggtaacctaaagaaagcgtttgatgtgtttaacgatatacccaagaaggatctcgtgtcttggaacactatgcttcatggtcttggcgttcatggccacggaaaggaagcaatcgagcttttttcgagaatgagaagggaagggattcggcctgataaagtcacgtttattgctgttttgtgttcctgtaatcacgcgggtctcattgatgaaggaatagattacttctactcaatggagaaagtatatgatcttgttccacaagttgaacactatggttgtcttgttgacctattaggtcgagtagggcggttaaaggaagcgataaaggttgtccaaacaatgccaatggagcccaatgttgttatttggggtgctcttcttggagcgtgcaggatgcataacgaggtggatattgctaaggaagttctggataatctggttaaattagacccttgtgatcctggaaactattcgcttctgtcaaatatttatgcagcagcagaggattgggaaggagttgctgacataagatcaaagatgaagagtatgggagtagagaaaccatctggagctagttcggttgaattggaggatgggatacatgaatttacagtgttcgacaaatcacacccaaaatctgatcaaatatatcagatgcttggtagtttaattgaacctccagatcctggtgagctggttgctgttcgataatctgcttagtttatgtccagatcattaggtattatatcgattataggctgtgagcatcagcactgtggcctaggccaaaaatttgtagttcattttccaaaggaacacaaagatggttttatccttgtaacgagttcgagtactgtatatagagcataatttataaatcttgag

SEQ ID NO: 36949 - protein, 600 aa, Arabidopsis thaliana
  peptide (1)..(600): Ceres Seq. ID no. 12604874
MTSSLPVRAPSWVSSRRIFEERLQDLPKCANLNQVKQLHAQIIRRNLHEDLHIAPKLISALSLCRQTNLAVRVFNQVQEPNVHLCNSLIRAHAQNSQPYQAFFVFSEMQRFGLFADNFTYPFLLKACSGQSWLPVVKMMHNHIEKLGLSSDIYVPNALIDCYSRCGGLGVRDAMKLFEKMSERDTVSWNSMLGGLVKAGELRDARRLFDEMPQRDLISWNTMLDGYARCREMSKAFELFEKMPERNTVSWSTMVMGYSKAGDMEMARVMFDKMPLPAKNVVTWTIIIAGYAEKGLLKEADRLVDQMVASGLKFDAAAVISILAACTESGLLSLGMRIHSILKRSNLGSNAYVLNALLDMYAKCGNLKKAFDVFNDIPKKDLVSWNTMLHGLGVHGHGKEAIELFSRMRREGIRPDKVTFIAVLCSCNHAGLIDEGIDYFYSMEKVYDLVPQVEHYGCLVDLLGRVGRLKEAIKVVQTMPMEPNVVIWGALLGACRMHNEVDIAKEVLDNLVKLDPCDPGNYSLLSNIYAAAEDWEGVADIRSKMKSMGVEKPSGASSVELEDGIHEFTVFDKSHPKSDQIYQMLGSLIEPPDPGELVAVR

SEQ ID NO: 36950 - protein, 493 aa, Arabidopsis thaliana
  peptide (1)..(493): Ceres Seq. ID no. 12604875
MQRFGLFADNFTYPFLLKACSGQSWLPVVKMMHNHIEKLGLSSDIYVPNALIDCYSRCGGLGVRDAMKLFEKMSERDTVSWNSMLGGLVKAGELRDARRLFDEMPQRDLISWNTMLDGYARCREMSKAFELFEKMPERNTVSWSTMVMGYSKAGDMEMARVMFDKMPLPAKNVVTWTIIIAGYAEKGLLKEADRLVDQMVASGLKFDAAAVISILAACTESGLLSLGMRIHSILKRSNLGSNAYVLNALLDMYAKCGNLKKAFDVFNDIPKKDLVSWNTMLHGLGVHGHGKEAIELFSRMRREGIRPDKVTFIAVLCSCNHAGLIDEGIDYFYSMEKVYDLVPQVEHYGCLVDLLGRVGRLKEAIKVVQTMPMEPNVVIWGALLGACRMHNEVDIAKEVLDNLVKLDPCDPGNYSLLSNIYAAAEDWEGVADIRSKMKSMGVEKPSGASSVELEDGIHEFTVFDKSHPKSDQIYQMLGSLIEPPDPGELVAVR

SEQ ID NO: 36951 - protein, 463 aa, Arabidopsis thaliana
  peptide (1)..(463): Ceres Seq. ID no. 12604876
MMHNHIEKLGLSSDIYVPNALIDCYSRCGGLGVRDAMKLFEKMSERDTVSWNSMLGGLVKAGELRDARRLFDEMPQRDLISWNTMLDGYARCREMSKAFELFEKMPERNTVSWSTMVMGYSKAGDMEMARVMFDKMPLPAKNVVTWTIIIAGYAEKGLLKEADRLVDQMVASGLKFDAAAVISILAACTESGLLSLGMRIHSILKRSNLGSNAYVLNALLDMYAKCGNLKKAFDVFNDIPKKDLVSWNTMLHGLGVHGHGKEAIELFSRMRREGIRPDKVTFIAVLCSCNHAGLIDEGIDYFYSMEKVYDLVPQVEHYGCLVDLLGRVGRLKEAIKVVQTMPMEPNVVIWGALLGACRMHNEVDIAKEVLDNLVKLDPCDPGNYSLLSNIYAAAEDWEGVADIRSKMKSMGVEKPSGASSVELEDGIHEFTVFDKSHPKSDQIYQMLGSLIEPPDPGELVAVR

SEQ ID NO: 36952 - DNA, 561 bp, Arabidopsis thaliana
  misc_feature (1)..(561): Ceres Seq. ID no. 12393836
  misc_feature (1)..(561): Ortholog of  Ceres SEQ ID NO 14309497 as cited in SEQ ID NO 0
  misc_feature (1)..(561): Ortholog of  Ceres SEQ ID NO 15180320 as cited in SEQ ID NO 0
aaaaacacagaacaacggaaaaggcaaatcgggatcagccaccggcgatgaaggaagacatggataagatggtggcggtagggctcgtatggggagccaccaatgctctgatccgtcgtggcgctcttgcctgggataaaacaaagtcttcttcgacaacagaatctcattctcctcctcttcagatccgccgcaaaatcatgattgctctccgcgactggatcaatctcctcctcttctggcaatactcaattcctttcctcataaacctctccgcctccgccacattcttcgcccttctcagtcacgctcccatctctcttgccgttccggtgactaacgccacaacctttgccgcaaccgccgcttttgggatccttttaggggaagaaactcaaatcggacttgctttgttaggtacgagctttattgtatttggaatttggctttgtgttctgtgaaattcgaattttgtaaaaccgtgactctgtttctgtgagatctattttgccaaagaactatttgtgtaccatcttttgagaattttagctaactctctgc

SEQ ID NO: 36953 - protein, 152 aa, Arabidopsis thaliana
  peptide (1)..(152): Ceres Seq. ID no. 12393837
KHRTTEKANRDQPPAMKEDMDKMVAVGLVWGATNALIRRGALAWDKTKSSSTTESHSPPLQIRRKIMIALRDWINLLLFWQYSIPFLINLSASATFFALLSHAPISLAVPVTNATTFAATAAFGILLGEETQIGLALLGTSFIVFGIWLCVL

SEQ ID NO: 36954 - protein, 137 aa, Arabidopsis thaliana
  peptide (1)..(137): Ceres Seq. ID no. 12393838
MKEDMDKMVAVGLVWGATNALIRRGALAWDKTKSSSTTESHSPPLQIRRKIMIALRDWINLLLFWQYSIPFLINLSASATFFALLSHAPISLAVPVTNATTFAATAAFGILLGEETQIGLALLGTSFIVFGIWLCVL

SEQ ID NO: 36955 - protein, 133 aa, Arabidopsis thaliana
  peptide (1)..(133): Ceres Seq. ID no. 12393839
MDKMVAVGLVWGATNALIRRGALAWDKTKSSSTTESHSPPLQIRRKIMIALRDWINLLLFWQYSIPFLINLSASATFFALLSHAPISLAVPVTNATTFAATAAFGILLGEETQIGLALLGTSFIVFGIWLCVL

SEQ ID NO: 36956 - DNA, 1883 bp, Arabidopsis thaliana
  misc_feature (1)..(1883): Ceres Seq. ID no. 13503035
  misc_feature (1)..(1883): Ortholog of  Ceres SEQ ID NO 15177221 as cited in SEQ ID NO 53046
  misc_feature (1)..(1883): Ortholog of  Ceres SEQ ID NO 15170209 as cited in SEQ ID NO 58562
  misc_feature (1)..(1883): Ortholog of  Ceres SEQ ID NO 14315134 as cited in SEQ ID NO 59476
  misc_feature (1)..(1883): Ortholog of  Ceres SEQ ID NO 12616332 as cited in SEQ ID NO 63449
  misc_feature (1)..(1883): Ortholog of  Ceres SEQ ID NO 13597498 as cited in SEQ ID NO 64648
  misc_feature (1)..(1883): Ortholog of  Ceres SEQ ID NO 14308053 as cited in SEQ ID NO 67790
aagaagtcgttctgatttcgtctttcttctctgtaaagtcgtttctctctccaatttttttgttttcctgcgaaaatcaaagagactaacacagagagcttattcaattttctttcgatctgtgaaatctcagattttgatttggaaagttgtggagatttcagctgttcttctttgttgttgggtctatttctgggtttcttcgagctgatttatagagtttggttctccgatgatagagctaatctgcttgagatagctactgtattgagagttcttctgaggatctttatttttctttacatcttgtgaggaaaatgtctgcgaagatcaaaggagagtattcttctagaagcttcgtatcgagaaaatggacgatattactctgcttaggaagcttctgcgtcggaatgttcttcaccaatcggatgtggaatattccggaatctaaaggcatgtctcatccatctgtaaccgaagctgagagattgaagctggtctctgaaggctgcaatccaaaagctaaagaagtcaaaagagatcctcaggctttgtttggagaagtagccaatacacatattgcattacagacattggataagaccatttcaagcttagagatggagttagctgcagcaaggtcagttcaggaatctttacaaaacggtgctcctttatcagatgatatggggaagaagcaacctcaggaacagagacggtttttgatggtcgttgggattaatacagcttttagtagcagaaagagaagagattctattcgagcaacttggatgcctcaaggtgaaaaaaggaagagactagaagaggagaaggggattatcatccggtttgtcattggtcacagtgccacgaccgggggaattctagatcgagctatagaagctgaggacaggaagcatggagatttcttgagactggaccatgttgaagggtacctagagttgtcaggcaagacgaaaacttacttttctacagcattttcgatgtgggatgcagatttctatgtcaaagtagatgatgatgttcatgtcaatatagcaactcttggggaaactcttgttagacaccggaaaaaaccacgggtctatattggttgcatgaaatctggccctgtcctctctcaaaaaggggtgaggtaccatgagccagagtactggaagtttggtgaaaatgggaacaaatacttccgtcatgctactggacagttatacgccatttcaagggacttggcttcttatatatcaatcaatcagcatgttcttcacaagtatgcgaacgaagatgtttcgctaggagcttggtttatcgggattgatgttaaacacattgatgatagaagattatgctgcggaactcctcctgattgcgaatggaaagcacaagctggaaacatctgtgtagcatcattcgactggagctgcagcggaatctgcagatccgcagatcgcatcaaagaggttcatagacgttgcggtgaaggtgaaaaggctctttggagtgccacgttttgacatataaacagaggaatggtaaaaacataacggttttgctcagcccccaaaaacagctcaaagatcagaggaaggtcgtccagatatacaattccaagagatatccacttttgtattcataggtacatagaatagaagaggcaggaaggattagagataagtgtgaaaacctctggcaagaatcgcaattgcgtattgtgattgtggcgtttccattttggtataaggaaactgaacactacagtgaacacccctgctgctttgttcgttttgggtggcttgaaaatgaagcaacttgtggatttttacatcaaatacaaaacactatgccctgattcttttggatccata

SEQ ID NO: 36957 - protein, 404 aa, Arabidopsis thaliana
  peptide (1)..(404): Ceres Seq. ID no. 13503036
MSAKIKGEYSSRSFVSRKWTILLCLGSFCVGMFFTNRMWNIPESKGMSHPSVTEAERLKLVSEGCNPKAKEVKRDPQALFGEVANTHIALQTLDKTISSLEMELAAARSVQESLQNGAPLSDDMGKKQPQEQRRFLMVVGINTAFSSRKRRDSIRATWMPQGEKRKRLEEEKGIIIRFVIGHSATTGGILDRAIEAEDRKHGDFLRLDHVEGYLELSGKTKTYFSTAFSMWDADFYVKVDDDVHVNIATLGETLVRHRKKPRVYIGCMKSGPVLSQKGVRYHEPEYWKFGENGNKYFRHATGQLYAISRDLASYISINQHVLHKYANEDVSLGAWFIGIDVKHIDDRRLCCGTPPDCEWKAQAGNICVASFDWSCSGICRSADRIKEVHRRCGEGEKALWSATF

SEQ ID NO: 36958 - protein, 373 aa, Arabidopsis thaliana
  peptide (1)..(373): Ceres Seq. ID no. 13503037
MFFTNRMWNIPESKGMSHPSVTEAERLKLVSEGCNPKAKEVKRDPQALFGEVANTHIALQTLDKTISSLEMELAAARSVQESLQNGAPLSDDMGKKQPQEQRRFLMVVGINTAFSSRKRRDSIRATWMPQGEKRKRLEEEKGIIIRFVIGHSATTGGILDRAIEAEDRKHGDFLRLDHVEGYLELSGKTKTYFSTAFSMWDADFYVKVDDDVHVNIATLGETLVRHRKKPRVYIGCMKSGPVLSQKGVRYHEPEYWKFGENGNKYFRHATGQLYAISRDLASYISINQHVLHKYANEDVSLGAWFIGIDVKHIDDRRLCCGTPPDCEWKAQAGNICVASFDWSCSGICRSADRIKEVHRRCGEGEKALWSATF

SEQ ID NO: 36959 - protein, 367 aa, Arabidopsis thaliana
  peptide (1)..(367): Ceres Seq. ID no. 13503038
MWNIPESKGMSHPSVTEAERLKLVSEGCNPKAKEVKRDPQALFGEVANTHIALQTLDKTISSLEMELAAARSVQESLQNGAPLSDDMGKKQPQEQRRFLMVVGINTAFSSRKRRDSIRATWMPQGEKRKRLEEEKGIIIRFVIGHSATTGGILDRAIEAEDRKHGDFLRLDHVEGYLELSGKTKTYFSTAFSMWDADFYVKVDDDVHVNIATLGETLVRHRKKPRVYIGCMKSGPVLSQKGVRYHEPEYWKFGENGNKYFRHATGQLYAISRDLASYISINQHVLHKYANEDVSLGAWFIGIDVKHIDDRRLCCGTPPDCEWKAQAGNICVASFDWSCSGICRSADRIKEVHRRCGEGEKALWSATF

SEQ ID NO: 36960 - DNA, 1275 bp, Arabidopsis thaliana
  misc_feature (1)..(1275): Ceres Seq. ID no. 13575189
  misc_feature (1)..(1275): Ortholog of  Ceres SEQ ID NO 14314300 as cited in SEQ ID NO 57386
  misc_feature (1)..(1275): Ortholog of  Ceres SEQ ID NO 13596509 as cited in SEQ ID NO 62004
  misc_feature (1)..(1275): Ortholog of  Ceres SEQ ID NO 13500385 as cited in SEQ ID NO 67583
aaactattacttaaataataaaaaaataagagccatcgtgacttcgagagaagaagccagcaaggaacgatggagattattacggcatcatcatcatcatcatcatcatttggaaattaggcttgttgtttgatttcgctacgagaaaatggacaagtacgagcttgttaaagacatcggtgctgggaattttggagtggcgaggctcatgagagtcaaaaactccaaggaactcgttgctatgaagtacatcgagcgtggacctaagattgatgagaacgtggcgagagagattattaaccacagatcacttcgtcatcccaatattatccggtttaaggaggtggttttgacaccaacgcacatcgccattgctatggaatatgctgctggcggtgagctatttgagcgtatatgtagcgctggaagattcagtgaggatgaggcaagatactttttccagcagcttatctcaggagtcagctattgtcatgctatgcaaatatgccacagagatctgaagcttgaaaataccctcttagatggaagtcctgctccacgcctgaagatctgtgattttggttattccaagtcctcactgttgcactctatgcccaaatcaactgttggaactccagcatatattgcacctgaggttctttctcgcggagagtatgatggcaagatggctgatgtatggtcttgtggtgtgactctttatgtcatgctggtgggagcatacccatttgaagaccaagaggatcccaaaaacttcaaaaaaacaatacaaagaataatggctgtcaagtacaagatcccggactatgtccatatctcacaagattgcaaacatctcctctcccgtatatttgtcaccaactcgaataagaggattacgataggtgacatcaagaaacatccatggttcctaaagaacctgccaagggaacttacagaaatagctcaagctgcatacttcaggaaagagaacccgacattctcactccaaagcgtcgaagagataatgaagattgtggaagaggcaaaaactccagctcgtgtttctcggtcgattggagcatttgggtggggaggaggagaagatgccgagggcaaggaggaagatgcagaggaagaagttgaggaagtagaagaagaagaagacgaagaagatgagtatgataagacggtgaagcaagtgcatgctagcatgggagaagtccgagtcagttaaaaaaaaagattgattttcttttcacgaaagtattctaaaac

SEQ ID NO: 36961 - protein, 361 aa, Arabidopsis thaliana
  peptide (1)..(361): Ceres Seq. ID no. 13575190
MDKYELVKDIGAGNFGVARLMRVKNSKELVAMKYIERGPKIDENVAREIINHRSLRHPNIIRFKEVVLTPTHIAIAMEYAAGGELFERICSAGRFSEDEARYFFQQLISGVSYCHAMQICHRDLKLENTLLDGSPAPRLKICDFGYSKSSLLHSMPKSTVGTPAYIAPEVLSRGEYDGKMADVWSCGVTLYVMLVGAYPFEDQEDPKNFKKTIQRIMAVKYKIPDYVHISQDCKHLLSRIFVTNSNKRITIGDIKKHPWFLKNLPRELTEIAQAAYFRKENPTFSLQSVEEIMKIVEEAKTPARVSRSIGAFGWGGGEDAEGKEEDAEEEVEEVEEEEDEEDEYDKTVKQVHASMGEVRVS

SEQ ID NO: 36962 - protein, 341 aa, Arabidopsis thaliana
  peptide (1)..(341): Ceres Seq. ID no. 13575191
MRVKNSKELVAMKYIERGPKIDENVAREIINHRSLRHPNIIRFKEVVLTPTHIAIAMEYAAGGELFERICSAGRFSEDEARYFFQQLISGVSYCHAMQICHRDLKLENTLLDGSPAPRLKICDFGYSKSSLLHSMPKSTVGTPAYIAPEVLSRGEYDGKMADVWSCGVTLYVMLVGAYPFEDQEDPKNFKKTIQRIMAVKYKIPDYVHISQDCKHLLSRIFVTNSNKRITIGDIKKHPWFLKNLPRELTEIAQAAYFRKENPTFSLQSVEEIMKIVEEAKTPARVSRSIGAFGWGGGEDAEGKEEDAEEEVEEVEEEEDEEDEYDKTVKQVHASMGEVRVS

SEQ ID NO: 36963 - protein, 330 aa, Arabidopsis thaliana
  peptide (1)..(330): Ceres Seq. ID no. 13575192
MKYIERGPKIDENVAREIINHRSLRHPNIIRFKEVVLTPTHIAIAMEYAAGGELFERICSAGRFSEDEARYFFQQLISGVSYCHAMQICHRDLKLENTLLDGSPAPRLKICDFGYSKSSLLHSMPKSTVGTPAYIAPEVLSRGEYDGKMADVWSCGVTLYVMLVGAYPFEDQEDPKNFKKTIQRIMAVKYKIPDYVHISQDCKHLLSRIFVTNSNKRITIGDIKKHPWFLKNLPRELTEIAQAAYFRKENPTFSLQSVEEIMKIVEEAKTPARVSRSIGAFGWGGGEDAEGKEEDAEEEVEEVEEEEDEEDEYDKTVKQVHASMGEVRVS

SEQ ID NO: 36964 - DNA, 1241 bp, Arabidopsis thaliana
  misc_feature (1)..(1241): Ceres Seq. ID no. 12337172
  misc_feature (1)..(1241): Ortholog of  Ceres SEQ ID NO 12333459 as cited in SEQ ID NO 20477
  misc_feature (1)..(1241): Ortholog of  Ceres SEQ ID NO 15176155 as cited in SEQ ID NO 0
acatcaacacgccctaaaaccgctctcgagagacgaatcgctctcagcttcttctagaaccttctccttctccttcgacgcatcgtcgccttcaagatcacactacctcgcacaacaatggagttctggggtgttgaagttaagaatggcaaaccacttcacctagatcctgggctagacaggctcgtgcacatctctcaggttgctttgggagagagtaagaacaatgtaaccgaaccaatccagctttacgtgactgttggatcggataagcttctcattggaacgctatctcatgagaagtttcctcagctgtctacggagattgtcttggaaaggaactttgcgctgtctcatacttggaagaatgggagcgttttcttctctggttacaaagttgatgcatctgatcccgagcctgaggatttgattgatgatcaacttgaggctgctggtttcaaagctgctccgaaatctgctgcgaaacaggtgaactttcagttgccaaatgaagatgtcaaagccaagcaagatgatgacgctgacggtagtgaagaagattcttcagatgatgatgatagtgaaaactctggagacgaggaggaagagaaggttactgctgaatctgacagtgaggaagatgactcatcagacgacgaagaagatgactcctcagaagaggaaaccccaaagaagcctgaagaacccaagaagaggtctgcagaacccaactcctccaagaaccctgcgtccaacaagaaggctaagtttgtaactcctcagaaaacagattcgaagaaaccgcatgtccatgttgcaactcctcatccctcaaaacaggcgggtaagaattctggtggaggcagcactggagagacatcgaagcagcagcagacaccgaagtctgcaggagcgtttgggtgcaagtcgtgcaccagaacctttacttcggaaatgggattgcagtctcacacaaaggccaaacacagtgcagctgcttgagaagaagaagcagcatgatgactactctctataatatctactctagaactttgatgtcttttggtacttaaatctggaacttgcgagtgagccagttttagttggtcttttttttcaggcatttcttcctgtttaactttatcgttttggtagctgaaactgtgctaaacctttgtttgtgtttagtggtatggatattaagtctttttgtagacttttctagtgaaaatctacatttg

SEQ ID NO: 36965 - protein, 294 aa, Arabidopsis thaliana
  peptide (1)..(294): Ceres Seq. ID no. 12337173
MEFWGVEVKNGKPLHLDPGLDRLVHISQVALGESKNNVTEPIQLYVTVGSDKLLIGTLSHEKFPQLSTEIVLERNFALSHTWKNGSVFFSGYKVDASDPEPEDLIDDQLEAAGFKAAPKSAAKQVNFQLPNEDVKAKQDDDADGSEEDSSDDDDSENSGDEEEEKVTAESDSEEDDSSDDEEDDSSEEETPKKPEEPKKRSAEPNSSKNPASNKKAKFVTPQKTDSKKPHVHVATPHPSKQAGKNSGGGSTGETSKQQQTPKSAGAFGCKSCTRTFTSEMGLQSHTKAKHSAAA

SEQ ID NO: 36966 - DNA, 1394 bp, Arabidopsis thaliana
  misc_feature (1)..(1394): Ceres Seq. ID no. 13495730
  misc_feature (1)..(1394): Ortholog of  Ceres SEQ ID NO 14315418 as cited in SEQ ID NO 57506
tgagacgagaggcacacaaaaagagatacaaaaccaaaactttcaagcaaagcaattcaatttcaatcaaaaaccaaatcgaagatctttgaaagtttcctttttttccgaaatctgagcttgggtattgttggataagcttctcggagattgagattgaggattttgataggtgaggagattgaaagatttggatttttgggcggcaaaaatggtgatgcagacggaagctagggttggtgtgagctcaggacatggcgtagcttcgtcttctcatcgtttaacgcaggaccagagatcacatatcgaatcggcgtcgcagctcttagccggaggactcgctggtgcttttagcaagacttgtactgctcctctatctcgtctcaccattctcttccaggtgcaaggtatgcacacaaatgctgcagctttaagaaagccaagcatattacacgaggcttcacggatattgaatgaagaaggattgaaagctttttggaaagggaatctagttactattgctcaccggcttccatattcttctgttaatttctacgcatatgaacactacaagaagttcatgtatatggttactgggatggaaaatcacaaggagggtataagttcaaacctttttgtacattttgtagccggtggtttggctggaatcacagctgcttctgccacttatccacttgatcttgttagaactcgtcttgctgctcagacaaaagtaatctactactcgggtatctggcatactctgcgctctattacaaccgatgaaggtatcttgggcctctacaagggactaggaacaacgcttgtgggtgttgggcctagtattgccattagcttttctgtgtatgaatcattgagatcttattggaggtcaactaggccccatgattcccctatcatggtcagtctagcttgtggaagtctttcaggaatagcatcttcaacagctacgtttccattggatctggtgagaagaaggaagcagctggaaggaataggcgggcgagcggtagtgtacaagacaggtttgttaggcacattaaagcgtattgttcaaacggaaggagcgagaggcctgtacagaggaattcttccagagtactacaaagtggtacctggtgtagggatttgcttcatgacctacgagacactcaagctttacttcaaggatctttcttcgaatctataacggtttaaaaggttggtagatttgtttaggtctatttttggtgagaggaaaaaaactgtaaaaaccaaacagcggaaaatgataatgtatacgaaatgtagaattatatatgtagttgttggatgtagcttatacgagattaacatttgtattggtacaatccttttccattgttacatggctt

SEQ ID NO: 36967 - protein, 332 aa, Arabidopsis thaliana
  peptide (1)..(332): Ceres Seq. ID no. 13495731
MVMQTEARVGVSSGHGVASSSHRLTQDQRSHIESASQLLAGGLAGAFSKTCTAPLSRLTILFQVQGMHTNAAALRKPSILHEASRILNEEGLKAFWKGNLVTIAHRLPYSSVNFYAYEHYKKFMYMVTGMENHKEGISSNLFVHFVAGGLAGITAASATYPLDLVRTRLAAQTKVIYYSGIWHTLRSITTDEGILGLYKGLGTTLVGVGPSIAISFSVYESLRSYWRSTRPHDSPIMVSLACGSLSGIASSTATFPLDLVRRRKQLEGIGGRAVVYKTGLLGTLKRIVQTEGARGLYRGILPEYYKVVPGVGICFMTYETLKLYFKDLSSNL

SEQ ID NO: 36968 - protein, 330 aa, Arabidopsis thaliana
  peptide (1)..(330): Ceres Seq. ID no. 13495732
MQTEARVGVSSGHGVASSSHRLTQDQRSHIESASQLLAGGLAGAFSKTCTAPLSRLTILFQVQGMHTNAAALRKPSILHEASRILNEEGLKAFWKGNLVTIAHRLPYSSVNFYAYEHYKKFMYMVTGMENHKEGISSNLFVHFVAGGLAGITAASATYPLDLVRTRLAAQTKVIYYSGIWHTLRSITTDEGILGLYKGLGTTLVGVGPSIAISFSVYESLRSYWRSTRPHDSPIMVSLACGSLSGIASSTATFPLDLVRRRKQLEGIGGRAVVYKTGLLGTLKRIVQTEGARGLYRGILPEYYKVVPGVGICFMTYETLKLYFKDLSSNL

SEQ ID NO: 36969 - protein, 266 aa, Arabidopsis thaliana
  peptide (1)..(266): Ceres Seq. ID no. 13495733
MHTNAAALRKPSILHEASRILNEEGLKAFWKGNLVTIAHRLPYSSVNFYAYEHYKKFMYMVTGMENHKEGISSNLFVHFVAGGLAGITAASATYPLDLVRTRLAAQTKVIYYSGIWHTLRSITTDEGILGLYKGLGTTLVGVGPSIAISFSVYESLRSYWRSTRPHDSPIMVSLACGSLSGIASSTATFPLDLVRRRKQLEGIGGRAVVYKTGLLGTLKRIVQTEGARGLYRGILPEYYKVVPGVGICFMTYETLKLYFKDLSSNL

SEQ ID NO: 36970 - DNA, 932 bp, Arabidopsis thaliana
  misc_feature (1)..(932): Ceres Seq. ID no. 13646128
  misc_feature (1)..(932): Ortholog of  Ceres SEQ ID NO 14304536 as cited in SEQ ID NO 53436
gtgttatgtctgctcaaagacagcctttgtaaccaaaaccaaagtgtctctcttttcttcttcctaaatttctttccacgagaattgatttgggtttgtgttgtttttttctttcttttttgggtttttgtaattgggttggtgaataatcctgcaaaagtgttcgatgattttctccagagaagaattttgaagtttctctttttagagattttttttgttgttggggttttttgttttctgggggaaattgaaaagagatggcaggtgaagaagattggatagaactaaagtttagactagcagatggtacagacataggtccaagcaagtataatcaatctatgactgtttcttctcttaaagagaaactcatttctcaatggcctaaagataaagaaaatactccaaaaactgtaaatgatatgaagctcatcaatgccgggaaaatactggagaacaataggacacttgctgaatccaggcttcctgtttgtgaacttcctggaatgatcattactatgcatattgttcttcgccttcctacgttagacaaaaagagcgaaaaactgcagaatgatccaccgatgaagaatcgctgcgtgtgcaccattttgtagctgcaagtaaattggatcatagagatttatatccgtcatgatcatggcactagatgatgctccacggaacaacttccatggcatcaaacaagctttgagaagttccttcagtacagaatgattggcataggcatgaaaacaaaagatcttcattacagaatttggttccatgtgtgtggttgttaattattattttttaaaaatcaaaatggcttgagaaaatgtactatgattcttgaaggttggttcttttataaatatatacaatatgttcaatacaacagtaaataacaagaatggtattgtccttac

SEQ ID NO: 36971 - protein, 119 aa, Arabidopsis thaliana
  peptide (1)..(119): Ceres Seq. ID no. 13646129
MAGEEDWIELKFRLADGTDIGPSKYNQSMTVSSLKEKLISQWPKDKENTPKTVNDMKLINAGKILENNRTLAESRLPVCELPGMIITMHIVLRLPTLDKKSEKLQNDPPMKNRCVCTIL

SEQ ID NO: 36972 - protein, 94 aa, Arabidopsis thaliana
  peptide (1)..(94): Ceres Seq. ID no. 13646130
VLCLLKDSLCNQNQSVSLFFFLNFFPRELIWVCVVFFFLFWVFVIGLVNNPAKVFDDFLQRRILKFLFLEIFFVVGVFCFLGEIEKRWQVKKIG

SEQ ID NO: 36973 - protein, 91 aa, Arabidopsis thaliana
  peptide (1)..(91): Ceres Seq. ID no. 13646131
MTVSSLKEKLISQWPKDKENTPKTVNDMKLINAGKILENNRTLAESRLPVCELPGMIITMHIVLRLPTLDKKSEKLQNDPPMKNRCVCTIL

SEQ ID NO: 36974 - DNA, 810 bp, Arabidopsis thaliana
  misc_feature (1)..(810): Ceres Seq. ID no. 13592949
  misc_feature (1)..(810): Ortholog of  Ceres SEQ ID NO 13594974 as cited in SEQ ID NO 56010
  misc_feature (1)..(810): Ortholog of  Ceres SEQ ID NO 13661512 as cited in SEQ ID NO 61464
caattctctttaacattctccttgatttctgacactaccctcatcgggtctccaagaggccaagaaagacctctttctcggcttctaggagtctcatcattctcttttttcacatttgcttcctccacacgcaacctccaaaaagccctaaatttattaaaacaaatggattccacggagctgaaccgtgtgttccaaatgttcgacaaggacggagacgggaagatcactacgaaggagctgaacgagtcattcaagaacctcggtatcataatacccgaagacgaactaacacaaattatccaaaagatcgatgttaatggtgacggttgtgttgacattgaagagtttggagagctctacaagacgataatggtagaagatgaggacgaggtaggagaagaagatatgaaggaagcgttcaacgtatttgatcggaacggagatgggtttataacggtggatgaattgaaagcggttttatcttccttgggactcaagcaaggtaagaccttggaggaatgtaggaagatgataatgcaagtggatgttgatggtgatggtagggttaattacatggagtttagacaaatgatgaaaaagggtcgcttttttagctctttgagctgataataactttttttcttctttttttaccttctcttgtttttaattttggttatttgcttaaccattttctcttgcggtctaaatggaaaatacatgatcatagactaattattttatcttcaagacatgcgagagcacattgtaaaaaaaaaaaaaaaaaagcttatcgataccgtcgac

SEQ ID NO: 36975 - protein, 209 aa, Arabidopsis thaliana
  peptide (1)..(209): Ceres Seq. ID no. 13592950
QFSLTFSLISDTTLIGSPRGQERPLSRLLGVSSFSFFTFASSTRNLQKALNLLKQMDSTELNRVFQMFDKDGDGKITTKELNESFKNLGIIIPEDELTQIIQKIDVNGDGCVDIEEFGELYKTIMVEDEDEVGEEDMKEAFNVFDRNGDGFITVDELKAVLSSLGLKQGKTLEECRKMIMQVDVDGDGRVNYMEFRQMMKKGRFFSSLS

SEQ ID NO: 36976 - protein, 154 aa, Arabidopsis thaliana
  peptide (1)..(154): Ceres Seq. ID no. 13592951
MDSTELNRVFQMFDKDGDGKITTKELNESFKNLGIIIPEDELTQIIQKIDVNGDGCVDIEEFGELYKTIMVEDEDEVGEEDMKEAFNVFDRNGDGFITVDELKAVLSSLGLKQGKTLEECRKMIMQVDVDGDGRVNYMEFRQMMKKGRFFSSLS

SEQ ID NO: 36977 - protein, 143 aa, Arabidopsis thaliana
  peptide (1)..(143): Ceres Seq. ID no. 13592952
MFDKDGDGKITTKELNESFKNLGIIIPEDELTQIIQKIDVNGDGCVDIEEFGELYKTIMVEDEDEVGEEDMKEAFNVFDRNGDGFITVDELKAVLSSLGLKQGKTLEECRKMIMQVDVDGDGRVNYMEFRQMMKKGRFFSSLS

SEQ ID NO: 36978 - DNA, 1505 bp, Arabidopsis thaliana
  misc_feature (1)..(1505): Ceres Seq. ID no. 12394634
  misc_feature (1)..(1505): Ortholog of  Ceres SEQ ID NO 14315193 as cited in SEQ ID NO 57743
attatacaaaaactgtatcatcatcatcatcaagcttgaaatcactctctttcatccttccccgcgcactgtgtctcgctctctctctcccacatttccattatctcctttactttctttctttgagaatgtcttctacaacaatcggcgagcacatcagactccgacgagctagaaaccaaacaatccgtcatctccacgccgccgacgatgatccgccgctaagccacgtcgttcttccgatttcacaacctaatcgcttctgtaactccgcaatgtcttccttctttcccctcccgacttcctcctccaacgaaagcacgaggaagaaaccgtaccaaacgtcgtcgtttcgagggatgggttgctatgccgcagcagcagcagcagctcaagaggtttctgttccctccgtcattcgctactccgcggatttggatgccagaattagaaaagataagaagaagaagaagcataagcataagaaaaagaaaaagaagaataaaggaagctacgaagatggttcgattaggattttaagcgaagaagctagagacgttattgatgtttggtgcagacctggattaggcttctccacggatgctgtaattggtcgatcggttgatcctcctcggggaaggaatattccgtcgtctcgtcgcaaaattgatgtggataacaacaattataatcacacactgggttcttctgttcttcccattcggtttctcaatcaagaaactcattctcatgatatcttcaactctgattctacttttgtgacatcatcacgcgctgaaccaacgatgttgtcaagtagatgtcgtggccatcttccacgctcttaccctgatgatcttaccgagatgaggatgctccagaatggttttgtaatgggaagaataacagattcccgtgataactaccacgaattgaggctcgatgttgatagcatgtcatacgagcaacttcttgagcttggtgatagaattggttatgtgaatactggactaaaagaaagcgagatacatcgttgtcttgggaaaatcaaaccatccgtatcacatactcttgttgatagaaaatgtagcatctgtcaggatgagtatgagagagaggatgaggttggggaattgaactgtggacacagctttcatgtccattgcgtgaaacaatggctttcgaggaagaatgcttgtccggtctgtaagaaggcagcatatggcaagccttaaaagacttttgtatctcgtcgggtttctgatagctcaagatctttcaagccaccttgctgtatagagatctgtatcatctgatacttgattcatatttgttgtttttgcatttagcaatcacaattttttttttttaagatcttatattctttgttgggtctatttatgtgattgaaatcaagagtttgaaatctatgttttctgttgcctaggtagatttaagacaggtagagagtaatttagcatatagcatacacgcacgtaactagg

SEQ ID NO: 36979 - protein, 410 aa, Arabidopsis thaliana
  peptide (1)..(410): Ceres Seq. ID no. 12394635
YTKTVSSSSSSLKSLSFILPRALCLALSLPHFHYLLYFLSLRMSSTTIGEHIRLRRARNQTIRHLHAADDDPPLSHVVLPISQPNRFCNSAMSSFFPLPTSSSNESTRKKPYQTSSFRGMGCYAAAAAAAQEVSVPSVIRYSADLDARIRKDKKKKKHKHKKKKKKNKGSYEDGSIRILSEEARDVIDVWCRPGLGFSTDAVIGRSVDPPRGRNIPSSRRKIDVDNNNYNHTLGSSVLPIRFLNQETHSHDIFNSDSTFVTSSRAEPTMLSSRCRGHLPRSYPDDLTEMRMLQNGFVMGRITDSRDNYHELRLDVDSMSYEQLLELGDRIGYVNTGLKESEIHRCLGKIKPSVSHTLVDRKCSICQDEYEREDEVGELNCGHSFHVHCVKQWLSRKNACPVCKKAAYGKP

SEQ ID NO: 36980 - protein, 368 aa, Arabidopsis thaliana
  peptide (1)..(368): Ceres Seq. ID no. 12394636
MSSTTIGEHIRLRRARNQTIRHLHAADDDPPLSHVVLPISQPNRFCNSAMSSFFPLPTSSSNESTRKKPYQTSSFRGMGCYAAAAAAAQEVSVPSVIRYSADLDARIRKDKKKKKHKHKKKKKKNKGSYEDGSIRILSEEARDVIDVWCRPGLGFSTDAVIGRSVDPPRGRNIPSSRRKIDVDNNNYNHTLGSSVLPIRFLNQETHSHDIFNSDSTFVTSSRAEPTMLSSRCRGHLPRSYPDDLTEMRMLQNGFVMGRITDSRDNYHELRLDVDSMSYEQLLELGDRIGYVNTGLKESEIHRCLGKIKPSVSHTLVDRKCSICQDEYEREDEVGELNCGHSFHVHCVKQWLSRKNACPVCKKAAYGKP

SEQ ID NO: 36981 - protein, 319 aa, Arabidopsis thaliana
  peptide (1)..(319): Ceres Seq. ID no. 12394637
MSSFFPLPTSSSNESTRKKPYQTSSFRGMGCYAAAAAAAQEVSVPSVIRYSADLDARIRKDKKKKKHKHKKKKKKNKGSYEDGSIRILSEEARDVIDVWCRPGLGFSTDAVIGRSVDPPRGRNIPSSRRKIDVDNNNYNHTLGSSVLPIRFLNQETHSHDIFNSDSTFVTSSRAEPTMLSSRCRGHLPRSYPDDLTEMRMLQNGFVMGRITDSRDNYHELRLDVDSMSYEQLLELGDRIGYVNTGLKESEIHRCLGKIKPSVSHTLVDRKCSICQDEYEREDEVGELNCGHSFHVHCVKQWLSRKNACPVCKKAAYGKP

SEQ ID NO: 36982 - DNA, 889 bp, Arabidopsis thaliana
  misc_feature (1)..(889): Ceres Seq. ID no. 13496329
  misc_feature (1)..(889): Ortholog of  Ceres SEQ ID NO 15177100 as cited in SEQ ID NO 51752
  misc_feature (1)..(889): Ortholog of  Ceres SEQ ID NO 14314737 as cited in SEQ ID NO 56852
  misc_feature (1)..(889): Ortholog of  Ceres SEQ ID NO 13595748 as cited in SEQ ID NO 57649
  misc_feature (1)..(889): Ortholog of  Ceres SEQ ID NO 14314651 as cited in SEQ ID NO 59944
aaaaaaagagtattttcctccgaattcgccgacgactaatcacgagatggcgccgccggtgacggagcggtggtgcttagctttgattcttctctttctctccttgttcgtccaatcttcaacggcaatttactgcggtgctgaagattgttatgctcttctcggagtcgctcaagatgcgaacgcatcggatatcaagagatcttattataagctctctcttcaacatcatccagataagaatccggatcctgaatcgaggaaactgtttgttaaaatcgccactgcttatgagattttgaaagataatactactcgggcacaatatgattatgcaattgaacatccagaagaggtattttacaacaccgctcaatattaccgcgcgaaatatggacataaatcggatccccgtgctgttcttgttggtctattggtggttttatctgcatttcaatatctgaacaacgtggcaaggtataatgaggctatagcgacggttaagcgaacacctgcttacaaaaataagctcaaggcattagaactcgaacgcacaggtggagtaagtaacaagaagaagggttcaaagcagattgaccagaaactacaggaagagctaagcaacgaacttgacttacaaatcaaaggagctgaaaaaccatcggtctgggaacttctcggtgttcgattcattctcctaccatacactatcattaagcttctagtatggtacagcagttgggtgtggagatataaggtcaagaaagctccttattcatgggaagacgcatcatacctaacccgaagatcacttagtgtgcctgccgacgcatgggctaatctaggtatccttctattctctaatttccaacctgaaccgacatattga

SEQ ID NO: 36983 - protein, 295 aa, Arabidopsis thaliana
  peptide (1)..(295): Ceres Seq. ID no. 13496330
KKEYFPPNSPTTNHEMAPPVTERWCLALILLFLSLFVQSSTAIYCGAEDCYALLGVAQDANASDIKRSYYKLSLQHHPDKNPDPESRKLFVKIATAYEILKDNTTRAQYDYAIEHPEEVFYNTAQYYRAKYGHKSDPRAVLVGLLVVLSAFQYLNNVARYNEAIATVKRTPAYKNKLKALELERTGGVSNKKKGSKQIDQKLQEELSNELDLQIKGAEKPSVWELLGVRFILLPYTIIKLLVWYSSWVWRYKVKKAPYSWEDASYLTRRSLSVPADAWANLGILLFSNFQPEPTY

SEQ ID NO: 36984 - protein, 280 aa, Arabidopsis thaliana
  peptide (1)..(280): Ceres Seq. ID no. 13496331
MAPPVTERWCLALILLFLSLFVQSSTAIYCGAEDCYALLGVAQDANASDIKRSYYKLSLQHHPDKNPDPESRKLFVKIATAYEILKDNTTRAQYDYAIEHPEEVFYNTAQYYRAKYGHKSDPRAVLVGLLVVLSAFQYLNNVARYNEAIATVKRTPAYKNKLKALELERTGGVSNKKKGSKQIDQKLQEELSNELDLQIKGAEKPSVWELLGVRFILLPYTIIKLLVWYSSWVWRYKVKKAPYSWEDASYLTRRSLSVPADAWANLGILLFSNFQPEPTY

SEQ ID NO: 36985 - DNA, 1183 bp, Arabidopsis thaliana
  misc_feature (1)..(1183): Ceres Seq. ID no. 12482638
  misc_feature (1)..(1183): Ortholog of  Ceres SEQ ID NO 13659033 as cited in SEQ ID NO 66372
  misc_feature (1)..(1183): Ortholog of  Ceres SEQ ID NO 13655724 as cited in SEQ ID NO 68973
  misc_feature (1)..(1183): Ortholog of  Ceres SEQ ID NO 12625899 as cited in SEQ ID NO 69079
tcgatgaacagttcaattgtattaccaacggaagaccagacaaagatttccagaaattgaagtggaaacctaagaaatgtagtttaccaaggttaaatggagctatattgttggagatgcttagaggaagaagacttgtctttgtgggtgattcactaaataggaacatgtgggaatctctggtttgtattctcaaaggatcagtgaaagatgagactaaagtctatgaggctagaggaagacatcatttccgtggggaggctgagtactcattcgtcttccaagattataactgcacggtggagttctttgtttcacccttcttggttcaagagtgggaaattgtagacaagaaaggaacaaagaaggagactttaaggttggatttggttgggaagtcctctgagcagtacaaaggagctgatgttattgtctttaataccggacattggtggactcatgagaaaacatccaaaggggaggattattatcaagaaggaagtaatgtttatcatgaactcgctgttcttgaagcttttcgtaaagctttgactacatggggtcgatgggttgagaagaatgtgaatccggcaaagtccctcgttttctttcggggctattccgcatcccatttcagtggtgggcaatggaactcaggaggagcatgcgatagcgaaacagaaccgatcaagaacgatacatacctaaccccgtacccgtctaaaatgaaagtgcttgagaaagtgttaagaggtatgaaaacacctgtcacttatctaaacatcacgagattaacggactacaggaaggacggtcacccgtcagtataccggaaacagagcttatcggaaaaagagaaaaagtcgccattgctgtaccaagactgcagccattggtgcctccccggggttccagactcttggaatgaaatcctctacgctgagctgatcgtcaaactcaatcagctcagccaaacacaacgaaaaacttaaggttcttccacccccaatacttgtttgatctcaacacttttactttctattttgatggtaattgttgattatagaatgtgtagagtaaaaaagaaagatggaatataatggatcactcgatatctttgttactattggtttgtaaatgcttttgtcacgacgaatacaatatttagctccaaagagaggtt

SEQ ID NO: 36986 - protein, 329 aa, Arabidopsis thaliana
  peptide (1)..(329): Ceres Seq. ID no. 12482639
DEQFNCITNGRPDKDFQKLKWKPKKCSLPRLNGAILLEMLRGRRLVFVGDSLNRNMWESLVCILKGSVKDETKVYEARGRHHFRGEAEYSFVFQDYNCTVEFFVSPFLVQEWEIVDKKGTKKETLRLDLVGKSSEQYKGADVIVFNTGHWWTHEKTSKGEDYYQEGSNVYHELAVLEAFRKALTTWGRWVEKNVNPAKSLVFFRGYSASHFSGGQWNSGGACDSETEPIKNDTYLTPYPSKMKVLEKVLRGMKTPVTYLNITRLTDYRKDGHPSVYRKQSLSEKEKKSPLLYQDCSHWCLPGVPDSWNEILYAELIVKLNQLSQTQRKT

SEQ ID NO: 36987 - protein, 291 aa, Arabidopsis thaliana
  peptide (1)..(291): Ceres Seq. ID no. 12482640
MLRGRRLVFVGDSLNRNMWESLVCILKGSVKDETKVYEARGRHHFRGEAEYSFVFQDYNCTVEFFVSPFLVQEWEIVDKKGTKKETLRLDLVGKSSEQYKGADVIVFNTGHWWTHEKTSKGEDYYQEGSNVYHELAVLEAFRKALTTWGRWVEKNVNPAKSLVFFRGYSASHFSGGQWNSGGACDSETEPIKNDTYLTPYPSKMKVLEKVLRGMKTPVTYLNITRLTDYRKDGHPSVYRKQSLSEKEKKSPLLYQDCSHWCLPGVPDSWNEILYAELIVKLNQLSQTQRKT

SEQ ID NO: 36988 - protein, 274 aa, Arabidopsis thaliana
  peptide (1)..(274): Ceres Seq. ID no. 12482641
MWESLVCILKGSVKDETKVYEARGRHHFRGEAEYSFVFQDYNCTVEFFVSPFLVQEWEIVDKKGTKKETLRLDLVGKSSEQYKGADVIVFNTGHWWTHEKTSKGEDYYQEGSNVYHELAVLEAFRKALTTWGRWVEKNVNPAKSLVFFRGYSASHFSGGQWNSGGACDSETEPIKNDTYLTPYPSKMKVLEKVLRGMKTPVTYLNITRLTDYRKDGHPSVYRKQSLSEKEKKSPLLYQDCSHWCLPGVPDSWNEILYAELIVKLNQLSQTQRKT

SEQ ID NO: 36989 - DNA, 1387 bp, Arabidopsis thaliana
  misc_feature (1)..(1387): Ceres Seq. ID no. 12420491
  misc_feature (1)..(1387): Ortholog of  Ceres SEQ ID NO 13590776 as cited in SEQ ID NO 64877
  misc_feature (1)..(1387): Ortholog of  Ceres SEQ ID NO 12780534 as cited in SEQ ID NO 65670
  misc_feature (1)..(1387): Ortholog of  Ceres SEQ ID NO 13598301 as cited in SEQ ID NO 68281
aactttcatccctagttgctcgggagctttccccttcctgttcctgaagcttccgacatccgaccgcctcctcctcctcgttctactcgccgccccttctagaatcatccagaggcgtgccggtgaagcgcgagagcggtgaggcatggcgatgcagacgggggtcgcgacctccaaggtcctcatcctcgtcggtgcagggatgacgggctcgatcctgctgcggaatggccgcttatctgatgtgttgggagaactccagattatgaagggtgtaaatcaaggaacttcttcgggtccctatgacattgcacttattcaagctcagattcggaatttagcccaagaagtcagagatttgacattgtcaaagcccattaccatactgaatggcaaatctgactcgggaggcagtttatcatcctacatactgccagcagcagcagttggagcaatgggttattgctacatgtggtggaaggggttgtctctctcagatgtcatgtttgtcacaaaacacaacatggcaaatgctgttcagagcatgtcaaagcagttggagcaagtttcatcagcactagctgcaacaaaaagacatctaactcaacggcttgagaatttggatggcaaaatggatgaacaagtagaggtctccaaagctattagaaatgaggtcaatgatgttaaagatgacctgtctcaaattggatttgatgtcgaatcaattcagaaaatggttgctggattggagggaaagatcgagttacttgagaacaaacaggacgtggctaatactggtatctggtatctctgccaagtagcaggcggtttaaaagatggaataaacaccaggtttttccaggaaaccagtgagaagctgaagctctcacattcagctcaacctgaaaacaagccagtgaaggggcttgaatttttttcggaaagcaccatggaacagaaagtagctgactccaaaccaattgcggtgacagtcgacgctgagaagcctgagaaaaccgctgctgtaatgggcaccacagtgcacaggtctatcaggttctcatatcggaatgcaggccttgctttgtgatcaaatcctctccgcttgagatgcacgtggccttcctggttgctttttcttttttggcaacaaccttcctggttgctttgtgtgatggtcagaaaacatagaagaataacctgcaactggagtgacagaatttcttttccccgcagtagacaggtgtgcgttatttggttggaattatctccagtccactatcaatttttttttccttggattttgattcattttatgtttcgatttgttgccttatatactgtaaagtcattggaaagaataaataaaacacgaatgttttttgtc

SEQ ID NO: 36990 - protein, 314 aa, Arabidopsis thaliana
  peptide (1)..(314): Ceres Seq. ID no. 12420492
MAMQTGVATSKVLILVGAGMTGSILLRNGRLSDVLGELQIMKGVNQGTSSGPYDIALIQAQIRNLAQEVRDLTLSKPITILNGKSDSGGSLSSYILPAAAVGAMGYCYMWWKGLSLSDVMFVTKHNMANAVQSMSKQLEQVSSALAATKRHLTQRLENLDGKMDEQVEVSKAIRNEVNDVKDDLSQIGFDVESIQKMVAGLEGKIELLENKQDVANTGIWYLCQVAGGLKDGINTRFFQETSEKLKLSHSAQPENKPVKGLEFFSESTMEQKVADSKPIAVTVDAEKPEKTAAVMGTTVHRSIRFSYRNAGLAL

SEQ ID NO: 36991 - protein, 312 aa, Arabidopsis thaliana
  peptide (1)..(312): Ceres Seq. ID no. 12420493
MQTGVATSKVLILVGAGMTGSILLRNGRLSDVLGELQIMKGVNQGTSSGPYDIALIQAQIRNLAQEVRDLTLSKPITILNGKSDSGGSLSSYILPAAAVGAMGYCYMWWKGLSLSDVMFVTKHNMANAVQSMSKQLEQVSSALAATKRHLTQRLENLDGKMDEQVEVSKAIRNEVNDVKDDLSQIGFDVESIQKMVAGLEGKIELLENKQDVANTGIWYLCQVAGGLKDGINTRFFQETSEKLKLSHSAQPENKPVKGLEFFSESTMEQKVADSKPIAVTVDAEKPEKTAAVMGTTVHRSIRFSYRNAGLAL

SEQ ID NO: 36992 - protein, 295 aa, Arabidopsis thaliana
  peptide (1)..(295): Ceres Seq. ID no. 12420494
MTGSILLRNGRLSDVLGELQIMKGVNQGTSSGPYDIALIQAQIRNLAQEVRDLTLSKPITILNGKSDSGGSLSSYILPAAAVGAMGYCYMWWKGLSLSDVMFVTKHNMANAVQSMSKQLEQVSSALAATKRHLTQRLENLDGKMDEQVEVSKAIRNEVNDVKDDLSQIGFDVESIQKMVAGLEGKIELLENKQDVANTGIWYLCQVAGGLKDGINTRFFQETSEKLKLSHSAQPENKPVKGLEFFSESTMEQKVADSKPIAVTVDAEKPEKTAAVMGTTVHRSIRFSYRNAGLAL

SEQ ID NO: 36993 - DNA, 1772 bp, Arabidopsis thaliana
  misc_feature (1)..(1772): Ceres Seq. ID no. 12329490
  misc_feature (1)..(1772): Ortholog of  Ceres SEQ ID NO 13594345 as cited in SEQ ID NO 58043
  misc_feature (1)..(1772): Ortholog of  Ceres SEQ ID NO 14308594 as cited in SEQ ID NO 60384
  misc_feature (1)..(1772): Ortholog of  Ceres SEQ ID NO 12614112 as cited in SEQ ID NO 60891
  misc_feature (1)..(1772): Ortholog of  Ceres SEQ ID NO 13662880 as cited in SEQ ID NO 65422
  misc_feature (1)..(1772): Ortholog of  Ceres SEQ ID NO 12779098 as cited in SEQ ID NO 67698
  misc_feature (1)..(1772): Ortholog of  Ceres SEQ ID NO 13591190 as cited in SEQ ID NO 68044
  misc_feature (1)..(1772): Ortholog of  Ceres SEQ ID NO 13596089 as cited in SEQ ID NO 68373
aacaagtcacacacttaaaacaaaacaaaacaaaacaaaaacagagcacacaaaaagagaaaccaagttttcttaaaaatggagctagaatcttctcctcctctacctcctcatgtgatgctcgtatcttttccagggcaaggccacgttaatccacttcttcgtcttggtaagctcttagcttcaaagggtttgctcataaccttcgtcaccactgagtcatggggcaaaaagatgcgaatctccaacaaaatccaagaccgtgtcctcaaaccggttggtaaaggctatctccggtatgatttcttcgacgacgggcttcctgaagacgacgaagctagcagaaccaacttaaccatcctccgaccacatctagagctggtcggcaaaagagagatcaagaaccttgtgaaacgttacaaggaagtaacgaaacagcccgtgacatgtcttatcaacaaccctttcgtctcttgggtctgtgacgtggcagaagatcttcaaatcccttgtgctgttctttgggttcaatcttgtgcctgcttagctgcttattactattaccaccacaacctagttgacttcccgaccaaaacagaacccgagatcgatgtccaaatctctggcatgcctctcttgaaacatgacgagatcccttctttcattcacccttcaagtcctcactccgctttgcgagaagtgatcatagatcagattaaacggcttcacaagactttctccattttcatcgacactttcaactcattggagaaagacatcattgaccacatgtcgacgctctctctccccggtgttatcagaccgctaggaccactctacaaaatggctaaaaccgtagcttatgatgtcgttaaagtaaacatctctgagccaacggatccttgcatggagtggttagactcgcagccagtttcctccgttgtttacatctcattcgggaccgttgcttacttgaaacaagaacaaatagacgagatcgcttacggtgtgttaaacgccgacgttacgttcttgtgggtgattagacaacaagagttaggtttcaacaaagagaaacatgttttgccggaagaagttaaagggaaagggaagatcgttgaatggtgttcacaagagaaagtattatctcatccttcagtggcatgtttcgtgactcactgtggatggaactcaacgatggaagctgtgtcttccggagtcccgacggtttgttttcctcaatggggagatcaagtcacggacgccgtttacatgatcgatgtttggaagacgggagtgaggctaagccgtggagaggcggaggagaggttagtgccgagggaggaagttgcggagaggttgagagaggttactaaaggagagaaagcgatcgagttgaaaaagaatgctttgaagtggaaggaagaggcggaggcggcggttgctcgcggtggttcgtcggataggaatcttgaaaagtttgtggagaagttgggtgccaaacctgtggggaaagtacaaaacgggagtcataatcatgtcttggctggatcaatcaaaagcttttaaaaagtcatttaagtttttttgttttttgcctttggtttctgcaaattcgtaattgtgtttgtatccatcctcccattgtgttctttgtttttctgtttactatttttttttggtatgggtctaggggagagtcaatgaccttactgaagaatgtcagtcacgcattaaaaaatatattattaatggttaatactatatcttgc

SEQ ID NO: 36994 - protein, 496 aa, Arabidopsis thaliana
  peptide (1)..(496): Ceres Seq. ID no. 12329491
MELESSPPLPPHVMLVSFPGQGHVNPLLRLGKLLASKGLLITFVTTESWGKKMRISNKIQDRVLKPVGKGYLRYDFFDDGLPEDDEASRTNLTILRPHLELVGKREIKNLVKRYKEVTKQPVTCLINNPFVSWVCDVAEDLQIPCAVLWVQSCACLAAYYYYHHNLVDFPTKTEPEIDVQISGMPLLKHDEIPSFIHPSSPHSALREVIIDQIKRLHKTFSIFIDTFNSLEKDIIDHMSTLSLPGVIRPLGPLYKMAKTVAYDVVKVNISEPTDPCMEWLDSQPVSSVVYISFGTVAYLKQEQIDEIAYGVLNADVTFLWVIRQQELGFNKEKHVLPEEVKGKGKIVEWCSQEKVLSHPSVACFVTHCGWNSTMEAVSSGVPTVCFPQWGDQVTDAVYMIDVWKTGVRLSRGEAEERLVPREEVAERLREVTKGEKAIELKKNALKWKEEAEAAVARGGSSDRNLEKFVEKLGAKPVGKVQNGSHNHVLAGSIKSF

SEQ ID NO: 36995 - protein, 483 aa, Arabidopsis thaliana
  peptide (1)..(483): Ceres Seq. ID no. 12329492
MLVSFPGQGHVNPLLRLGKLLASKGLLITFVTTESWGKKMRISNKIQDRVLKPVGKGYLRYDFFDDGLPEDDEASRTNLTILRPHLELVGKREIKNLVKRYKEVTKQPVTCLINNPFVSWVCDVAEDLQIPCAVLWVQSCACLAAYYYYHHNLVDFPTKTEPEIDVQISGMPLLKHDEIPSFIHPSSPHSALREVIIDQIKRLHKTFSIFIDTFNSLEKDIIDHMSTLSLPGVIRPLGPLYKMAKTVAYDVVKVNISEPTDPCMEWLDSQPVSSVVYISFGTVAYLKQEQIDEIAYGVLNADVTFLWVIRQQELGFNKEKHVLPEEVKGKGKIVEWCSQEKVLSHPSVACFVTHCGWNSTMEAVSSGVPTVCFPQWGDQVTDAVYMIDVWKTGVRLSRGEAEERLVPREEVAERLREVTKGEKAIELKKNALKWKEEAEAAVARGGSSDRNLEKFVEKLGAKPVGKVQNGSHNHVLAGSIKSF

SEQ ID NO: 36996 - protein, 444 aa, Arabidopsis thaliana
  peptide (1)..(444): Ceres Seq. ID no. 12329493
MRISNKIQDRVLKPVGKGYLRYDFFDDGLPEDDEASRTNLTILRPHLELVGKREIKNLVKRYKEVTKQPVTCLINNPFVSWVCDVAEDLQIPCAVLWVQSCACLAAYYYYHHNLVDFPTKTEPEIDVQISGMPLLKHDEIPSFIHPSSPHSALREVIIDQIKRLHKTFSIFIDTFNSLEKDIIDHMSTLSLPGVIRPLGPLYKMAKTVAYDVVKVNISEPTDPCMEWLDSQPVSSVVYISFGTVAYLKQEQIDEIAYGVLNADVTFLWVIRQQELGFNKEKHVLPEEVKGKGKIVEWCSQEKVLSHPSVACFVTHCGWNSTMEAVSSGVPTVCFPQWGDQVTDAVYMIDVWKTGVRLSRGEAEERLVPREEVAERLREVTKGEKAIELKKNALKWKEEAEAAVARGGSSDRNLEKFVEKLGAKPVGKVQNGSHNHVLAGSIKSF

SEQ ID NO: 36997 - DNA, 780 bp, Arabidopsis thaliana
  misc_feature (1)..(780): Ceres Seq. ID no. 12603324
  misc_feature (1)..(780): Ortholog of  Ceres SEQ ID NO 15179153 as cited in SEQ ID NO 1066
  misc_feature (1)..(780): Ortholog of  Ceres SEQ ID NO 15176047 as cited in SEQ ID NO 55988
  misc_feature (1)..(780): Ortholog of  Ceres SEQ ID NO 13582167 as cited in SEQ ID NO 56203
  misc_feature (1)..(780): Ortholog of  Ceres SEQ ID NO 13658295 as cited in SEQ ID NO 66515
acaatggcgaatcttcccaccgttctcgtcaccggcgctagtggcagaacaggccagattgtgtataagaagctgaaggaggggtcagacaagtttgtagcaaagggtttagttagaagtgctcaaggaaaagagaaaattggaggagaagctgatgttttcattggggatataacagatgctgatagcattaaccctgcgtttcaaggaatcgatgcgcttgtgattctcactagtgctgtgcctaaaatgaaacctggttttgatcccactaaaggtggaagacctgagttcattttcgaagatggacagtatcctgatcatcctttgaacaaactgggaaatgggaatatactggtttggaagagaaaggctgaacagtaccttgctgattctggaactccttacacaattatcagagctggaggacttctagataaggaaggcggtgtacagctgctagttggtaaagacgatgagctacttcagacagacacgaaaaccgtccccagggctgatgttgcagaagtctgcattcaggcattgctgttcgaggaggccaagaacaaagctttcgatctcggctcaaagccagagggaaccagtaccccaaccaaagacttcaaggctctcttctctcaagtcacctctcgtttttaaatcattatctttgttgccaataagaacatttgggatcaaaccttctaaaataaattctgtagtgtctatttgaaaggatacgttctttcaattcaatgagaatattggggttgaatgtcc

SEQ ID NO: 36998 - protein, 219 aa, Arabidopsis thaliana
  peptide (1)..(219): Ceres Seq. ID no. 12603325
TMANLPTVLVTGASGRTGQIVYKKLKEGSDKFVAKGLVRSAQGKEKIGGEADVFIGDITDADSINPAFQGIDALVILTSAVPKMKPGFDPTKGGRPEFIFEDGQYPDHPLNKLGNGNILVWKRKAEQYLADSGTPYTIIRAGGLLDKEGGVQLLVGKDDELLQTDTKTVPRADVAEVCIQALLFEEAKNKAFDLGSKPEGTSTPTKDFKALFSQVTSRF

SEQ ID NO: 36999 - protein, 218 aa, Arabidopsis thaliana
  peptide (1)..(218): Ceres Seq. ID no. 12603326
MANLPTVLVTGASGRTGQIVYKKLKEGSDKFVAKGLVRSAQGKEKIGGEADVFIGDITDADSINPAFQGIDALVILTSAVPKMKPGFDPTKGGRPEFIFEDGQYPDHPLNKLGNGNILVWKRKAEQYLADSGTPYTIIRAGGLLDKEGGVQLLVGKDDELLQTDTKTVPRADVAEVCIQALLFEEAKNKAFDLGSKPEGTSTPTKDFKALFSQVTSRF

SEQ ID NO: 37000 - protein, 136 aa, Arabidopsis thaliana
  peptide (1)..(136): Ceres Seq. ID no. 12603327
MKPGFDPTKGGRPEFIFEDGQYPDHPLNKLGNGNILVWKRKAEQYLADSGTPYTIIRAGGLLDKEGGVQLLVGKDDELLQTDTKTVPRADVAEVCIQALLFEEAKNKAFDLGSKPEGTSTPTKDFKALFSQVTSRF

SEQ ID NO: 37001 - DNA, 1041 bp, Arabidopsis thaliana
  misc_feature (1)..(1041): Ceres Seq. ID no. 12420773
  misc_feature (1)..(1041): Ortholog of  Ceres SEQ ID NO 14307654 as cited in SEQ ID NO 54606
  misc_feature (1)..(1041): Ortholog of  Ceres SEQ ID NO 15168370 as cited in SEQ ID NO 55687
  misc_feature (1)..(1041): Ortholog of  Ceres SEQ ID NO 12620302 as cited in SEQ ID NO 65999
ctccgatttagatagaaacaacaatcctccggtggtcactcgctaatctccgtttgatctcgccgacactcgagccttttaccgatgaaggatggagattccttaccaataagcacttcttccgtcacggcgacgacggtgaccggaaagaaggaaaccggttattccgctctcttctcgaaaggccggtacaagttttgggccttagctgcgattctgttactcgctttctggtcaatgctcactggcacggtcaatctccgttggtctgccggtaacattaaccatttcaccgacgatctcgtctttcccatccacgaggatctcgatgttcttgtgagtcttcttcttcttcgcgatctgttttctgatttctgtgaattacgtttgttttgtgttgtgttgatgaggttattaggaaatggaggagagggagaaagtggtgaagcacatgtgggatgtgtataacaatggccgtcgtatcagattacctaggttttggcaagaggccttcgaggctgcttacgaggagcttaccagtgatgtacccgatgtggttgaggctgccatttccgagatcgctaggatgtctattcgctccattgttatagatccgcctccgcttcattccacgaatgtacgagaattgacaaagactctaaaacttgcggacaaaggaagagcaactcaaatatcaaaaccaagcagccgtcgattgaaatagctatggaggctttacgaaaaaggtagtgtagcagtcagccgtcgtggcgtgaccatacatatacttgatgtcagaaagatcaatcaacctcatccctagaatatatgtccatcattagtgttattttttcttccactaggggcattaatcctttcactatcatcatcatctcttctataaacaaaattttgaggaagctttttatccactccttattagctctgaacggtaatgtcttctattttggatttatgaaatatttcatatgtagttagcccatacatttaaataccttccaatgaattttctagttatat

SEQ ID NO: 37002 - protein, 127 aa, Arabidopsis thaliana
  peptide (1)..(127): Ceres Seq. ID no. 12420774
MKDGDSLPISTSSVTATTVTGKKETGYSALFSKGRYKFWALAAILLLAFWSMLTGTVNLRWSAGNINHFTDDLVFPIHEDLDVLVSLLLLRDLFSDFCELRLFCVVLMRLLGNGGEGESGEAHVGCV

SEQ ID NO: 37003 - protein, 100 aa, Arabidopsis thaliana
  peptide (1)..(100): Ceres Seq. ID no. 12420775
MEEREKVVKHMWDVYNNGRRIRLPRFWQEAFEAAYEELTSDVPDVVEAAISEIARMSIRSIVIDPPPLHSTNVRELTKTLKLADKGRATQISKPSSRRLK

SEQ ID NO: 37004 - protein, 90 aa, Arabidopsis thaliana
  peptide (1)..(90): Ceres Seq. ID no. 12420776
MWDVYNNGRRIRLPRFWQEAFEAAYEELTSDVPDVVEAAISEIARMSIRSIVIDPPPLHSTNVRELTKTLKLADKGRATQISKPSSRRLK

SEQ ID NO: 37005 - DNA, 825 bp, Arabidopsis thaliana
  misc_feature (1)..(825): Ceres Seq. ID no. 12336410
  misc_feature (1)..(825): Ortholog of  Ceres SEQ ID NO 12616324 as cited in SEQ ID NO 63414
attaaaaagctaatatggctactagggaagagagagataagtatagatcagtccttgaagatgcatgacaggttcaatggaggtatgataaccctccagacttcaatagtgtgaaccagctctttgaagaaggccagactaaggtgtggccagaaggttcgttagaagagacagtgcaaaacgcgatcaagtcatgggagatggagttctcacataagatccgtttacaggacttcaagactataaaccctgagaagtttaagctctttgtcaatggtttatcagctgaagagacgcttaggcttgggagttacaatgctttgctcaagaactctttgcctgaagagtttcagtactataagcccgaggaagagagctttgagtcatcacatgacgcctttagatctgctttaccacgcgggtttgcgtgggaaatactctctgtgtactcggggccgcctgttatagccttcaaatttagacactggggatactttgaaggaactttcaaaggtcatgctcctactggggaaatggttcaattcctgggtctaggagttctaaaggttgacgaatcacttagagcagaggagattgagatttactatgatccaggagagctgttcgggggactactcaagggacctcctatatcagagaccaaaaccacagacagtggagacaacactgcagagaaacaaagctgcccattcacacactaagataataagaaaagcagaagtgtatttgaccctttaaagaatatattgtaacagtctcttggttattgatgcatggaataaattataagttatgttaggcgcc

SEQ ID NO: 37006 - protein, 173 aa, Arabidopsis thaliana
  peptide (1)..(173): Ceres Seq. ID no. 12336411
MEFSHKIRLQDFKTINPEKFKLFVNGLSAEETLRLGSYNALLKNSLPEEFQYYKPEEESFESSHDAFRSALPRGFAWEILSVYSGPPVIAFKFRHWGYFEGTFKGHAPTGEMVQFLGLGVLKVDESLRAEEIEIYYDPGELFGGLLKGPPISETKTTDSGDNTAEKQSCPFTH

SEQ ID NO: 37007 - DNA, 1977 bp, Arabidopsis thaliana
  misc_feature (1)..(1977): Ceres Seq. ID no. 13497255
  misc_feature (1)..(1977): Ortholog of  Ceres SEQ ID NO 13660287 as cited in SEQ ID NO 67316
acaaaattcctctttttttttatttaattaaaattgcatcaaaatgtttgttttcttgagccgaattattctattaagcgcattaaaaaagaaaaaaaaaaaagaaataggagctaatgtaatttagagaaactctatcaaagacttataataaccaaaacgaagacctattgtgaccaaatacaaagggtggggcagatcgtttctttgaatactatgatgtcttttagtttatgagttgctttatttctgatacttctcctccccattctcttatcctatcctcagccattgaagcctctgtgtcccaatttgttttgcagatcatccatgttaaaactattgtctgaaccacggtccccgtcaacattccacaccagattcccattacaccatagttaagcttgtaccccaataatagaccaaatgggattccaaacacgtaatagcaggcgatgttaacgtaggccaccactgcttgccatccagctcccacagccacactgataagacaggttggacattgttgatgacaatggaaagtgcaagtattggtgtgagttctttaacaagaatgatgactttttcgtctttcacaaaaagtgatggatattgatctctaaagatgagtagaatcattgatacaatgaatccgattagcgtcgatgttatcactgccacaagtagtgagaatttcgcggttcttggatggttagctcctaattcattagacactctcacacttacggctgtgttcatcccaatagcaatcatagcagtccatcccaaaatattcatgcagatggagagggcagctacagagatttcagcattcttcaaatatccagcaaataatatgattgccataaaataccaaacctccaaacagagcataacagcagaagccaaagataatctaacgaaactccacaaattatgaaaagcctcccacgagaaaccagaccaagcctcaccacacgtaccactaaatatgtacacaagctgagccatgtcaatgaagcaccacgacgcgttaagcactacggctagacctggcataccccactggagcttcacaatgacaaaccacgtgagaggcacgtgtataacaagtgcaacagccgatatcacggccatgaccattatcttgctttgcgattgcaaaaatttagcggttggaaaattgatggcgtaggcaaagatttgagggatcatgtagatggaaaatattccggccgcgctagagattgccgccgtttgaccaatggacgcgaggataggggcggcgaaaatgtaaaggagagagaggataagagcagtcacgtttagtatcacccatgatcgttgcaagtaaacgccaagcattgacaattttcctgctccaaacgcttgtccacatagcgtttctaacgcacttcccattccaagcatgatgccgaatgagaagccggcaacgacggagttttcgacggagacagcggcaagagcgatggtgctgatgtgaccggcgaagacctgagtaatagcgccgagagaatattggttcacggatgtgaaaatggcgggaccggccaagtaccatagctttttggtttccacgttgaattccctaacgaagccaccgacggtggtgatcggaggaatatcgtcgacggataagaaaggaagatcagaacgttcttccgccgcagtgagaagcgtctccgttatatctttgtcttttgccatcttaaggagaaagagatggagagattaaaggaggtcgaagactaaggaccaacgagtgaggatcttgggtttaatcattcatgaattatataggaaaaaaaaatgttaatacgtgcgaccaaaaaaattgtttttatgatataaaggaaaaaatagctaatatagcaactagcatttaataaaatggctaaatgtagacaaaatcattgttgtattaatcaaattatggtatatattatggatggattc

SEQ ID NO: 37008 - protein, 104 aa, Arabidopsis thaliana
  peptide (1)..(104): Ceres Seq. ID no. 13497256
MSRIIDTMNPISVDVITATSSENFAVLGWLAPNSLDTLTLTAVFIPIAIIAVHPKIFMQMERAATEISAFFKYPANNMIAIKYQTSKQSITAEAKDNLTKLHKL

SEQ ID NO: 37009 - protein, 97 aa, Arabidopsis thaliana
  peptide (1)..(97): Ceres Seq. ID no. 13497257
MNPISVDVITATSSENFAVLGWLAPNSLDTLTLTAVFIPIAIIAVHPKIFMQMERAATEISAFFKYPANNMIAIKYQTSKQSITAEAKDNLTKLHKL

SEQ ID NO: 37010 - protein, 65 aa, Arabidopsis thaliana
  peptide (1)..(65): Ceres Seq. ID no. 13497258
MAGPAKYHSFLVSTLNSLTKPPTVVIGGISSTDKKGRSERSSAAVRSVSVISLSFAILRRKRWRD

SEQ ID NO: 37011 - DNA, 924 bp, Arabidopsis thaliana
  misc_feature (1)..(924): Ceres Seq. ID no. 12421272
  misc_feature (1)..(924): Ortholog of  Ceres SEQ ID NO 14312166 as cited in SEQ ID NO 59253
aaggagacccaaatttcctgcaacaaacaaagtaaaaaagttgagaatggattcatcgcagggaagtacacaacagaagactgtgattctgaacagccacaatgagaacctggtgggtctgcttcatgaaactggttctacagaaattgtagtcttgtgtcatggctttcgatcaaacaagaacttcgaaattatgaaaaatgtggctgttgctatagagagagaagggattagtgctttccgttttgatttctccgggaatggagagagtgaaggcagtttctattatggtaactacaattacgaagctgatgatctacattctgttatccaatacttctctaacttgaaccgtgttgttactataattctcggtcacagtaaaggaggtgatgtggtcctcctctatgcctccaagtatcacgatatccccaatgtgatcaatctctcgggacgttatgatctgaagaaaggcataggagaacgtcttggtgaagattttttggaaagaattaagcaacaaggatacatcgatgttaaagatggagattctggttaccgtgttaccgaggagagtttgatggaccggttaaacacagatatgcatgaagcttgcctcaagattgacaaagaatgcagggtcttgacggtccatggatcgggtgacgagacagtaccagtggaagatgcaaaggagtttgcaaagataataccgaaccacgagctacagattgtggaaggagctgatcattgttataccaattatcaaagtcaattggttttaacggttatggagttcataaagagtcattgtgaagaaaaaaacgacaagacttgtaattgaccctccaatattgcattggacatttatttatgtttggttgaccaaataaatttataaaaggtaaataaaaatataatact

SEQ ID NO: 37012 - protein, 280 aa, Arabidopsis thaliana
  peptide (1)..(280): Ceres Seq. ID no. 12421273
RRPKFPATNKVKKLRMDSSQGSTQQKTVILNSHNENLVGLLHETGSTEIVVLCHGFRSNKNFEIMKNVAVAIEREGISAFRFDFSGNGESEGSFYYGNYNYEADDLHSVIQYFSNLNRVVTIILGHSKGGDVVLLYASKYHDIPNVINLSGRYDLKKGIGERLGEDFLERIKQQGYIDVKDGDSGYRVTEESLMDRLNTDMHEACLKIDKECRVLTVHGSGDETVPVEDAKEFAKIIPNHELQIVEGADHCYTNYQSQLVLTVMEFIKSHCEEKNDKTCN

SEQ ID NO: 37013 - protein, 265 aa, Arabidopsis thaliana
  peptide (1)..(265): Ceres Seq. ID no. 12421274
MDSSQGSTQQKTVILNSHNENLVGLLHETGSTEIVVLCHGFRSNKNFEIMKNVAVAIEREGISAFRFDFSGNGESEGSFYYGNYNYEADDLHSVIQYFSNLNRVVTIILGHSKGGDVVLLYASKYHDIPNVINLSGRYDLKKGIGERLGEDFLERIKQQGYIDVKDGDSGYRVTEESLMDRLNTDMHEACLKIDKECRVLTVHGSGDETVPVEDAKEFAKIIPNHELQIVEGADHCYTNYQSQLVLTVMEFIKSHCEEKNDKTCN

SEQ ID NO: 37014 - protein, 216 aa, Arabidopsis thaliana
  peptide (1)..(216): Ceres Seq. ID no. 12421275
MKNVAVAIEREGISAFRFDFSGNGESEGSFYYGNYNYEADDLHSVIQYFSNLNRVVTIILGHSKGGDVVLLYASKYHDIPNVINLSGRYDLKKGIGERLGEDFLERIKQQGYIDVKDGDSGYRVTEESLMDRLNTDMHEACLKIDKECRVLTVHGSGDETVPVEDAKEFAKIIPNHELQIVEGADHCYTNYQSQLVLTVMEFIKSHCEEKNDKTCN

SEQ ID NO: 37015 - DNA, 1546 bp, Arabidopsis thaliana
  misc_feature (1)..(1546): Ceres Seq. ID no. 12712755
  misc_feature (1)..(1546): Ortholog of  Ceres SEQ ID NO 12578784 as cited in SEQ ID NO 20729
  misc_feature (1)..(1546): Ortholog of  Ceres SEQ ID NO 13658847 as cited in SEQ ID NO 66674
agagcttccacttccatcgtcgtcttctattttttcttctttcttcgatttcataccaaaacaagaactctctgttttcgacaaaaacgaaaccttgagatctattttgattgacttttaagaaagagagagatctttcttagaagattttgtctcgtcggcattgaagatccagggtttgtctttcgaaattcagagagaaaatgggtgatgaggcagagatcaaggaacatttaaagccacaagcttcatctgaaacaatggacaagaaacataatgtgaaagggaagaggttatggcagaaagtcaagtatcaattggtggagtttcattcattgcctgcttatttaagagacaatgagtacatcattggtcattaccgatccgaatggccgatcaaacagattcttctcagcatctttaccattcataatgagactttgaatgtttggacgcacttgattgggtttttcctgtttttggcgctcactatatacactgcaacgaaagtaccgagtgtcgtggatcttcattcgcttcaacaccgtttacccgatttgttgaggaaaacagatctccacaaacttcattctgagctcatggctcgccttccttctagtccatctagttggcatgtgatggaccttctttataactgtttgcctgaaagattttctcatggcaactacactgacatgtgtgttctgcattctgtgagggaagatcttgcaaacttgatagctcctttgatcttcaggccaattactcgatggccgttttatgcatttctaggtggtgctatgttctgtctattagcaagcagcacgtgccacctcctctcatgtcactccgagcgagtctcctacataatgcttaggcttgattacgccggcatcgcagctctaatagcgacttccttctaccctccggtttattactccttcatgtgtgatcctttcttctgcaacctctacttaggattcataaccatcttaggaatcgccactgtgcttgtttctctcctcccggttttccaaagcccggagtttcgggtggtgagggcgtctctgttctttggaatgggattctctggcttagctccgattcttcacaagctgataatcttttgggaccaacctgaagcccttcacacgacaggttatgagattttgatgggtttgctttatgggttaggagctctggtttatgcaactaggatcccagagagatggatgccgggtaaattcgatatagcaggacatagccatcagttgtttcatgttctggttgttgctggtgcgttcacgcactatagagctgggctagtgtatcttaagtggagagatattgaaggatgttgaagatgaagattgaagattagatggaatctttgaatcttgtttgtagtagcttcatataaaagttggattatgtaaagtcttatatgtaatcaaacgtttaattgtttcctttattcaacaaaggatttatattgttaatccacatatgtattactggttaaagaagctgaaggattcatattttt

SEQ ID NO: 37016 - protein, 385 aa, Arabidopsis thaliana
  peptide (1)..(385): Ceres Seq. ID no. 12712756
MGDEAEIKEHLKPQASSETMDKKHNVKGKRLWQKVKYQLVEFHSLPAYLRDNEYIIGHYRSEWPIKQILLSIFTIHNETLNVWTHLIGFFLFLALTIYTATKVPSVVDLHSLQHRLPDLLRKTDLHKLHSELMARLPSSPSSWHVMDLLYNCLPERFSHGNYTDMCVLHSVREDLANLIAPLIFRPITRWPFYAFLGGAMFCLLASSTCHLLSCHSERVSYIMLRLDYAGIAALIATSFYPPVYYSFMCDPFFCNLYLGFITILGIATVLVSLLPVFQSPEFRVVRASLFFGMGFSGLAPILHKLIIFWDQPEALHTTGYEILMGLLYGLGALVYATRIPERWMPGKFDIAGHSHQLFHVLVVAGAFTHYRAGLVYLKWRDIEGC

SEQ ID NO: 37017 - protein, 366 aa, Arabidopsis thaliana
  peptide (1)..(366): Ceres Seq. ID no. 12712757
MDKKHNVKGKRLWQKVKYQLVEFHSLPAYLRDNEYIIGHYRSEWPIKQILLSIFTIHNETLNVWTHLIGFFLFLALTIYTATKVPSVVDLHSLQHRLPDLLRKTDLHKLHSELMARLPSSPSSWHVMDLLYNCLPERFSHGNYTDMCVLHSVREDLANLIAPLIFRPITRWPFYAFLGGAMFCLLASSTCHLLSCHSERVSYIMLRLDYAGIAALIATSFYPPVYYSFMCDPFFCNLYLGFITILGIATVLVSLLPVFQSPEFRVVRASLFFGMGFSGLAPILHKLIIFWDQPEALHTTGYEILMGLLYGLGALVYATRIPERWMPGKFDIAGHSHQLFHVLVVAGAFTHYRAGLVYLKWRDIEGC

SEQ ID NO: 37018 - protein, 253 aa, Arabidopsis thaliana
  peptide (1)..(253): Ceres Seq. ID no. 12712758
MARLPSSPSSWHVMDLLYNCLPERFSHGNYTDMCVLHSVREDLANLIAPLIFRPITRWPFYAFLGGAMFCLLASSTCHLLSCHSERVSYIMLRLDYAGIAALIATSFYPPVYYSFMCDPFFCNLYLGFITILGIATVLVSLLPVFQSPEFRVVRASLFFGMGFSGLAPILHKLIIFWDQPEALHTTGYEILMGLLYGLGALVYATRIPERWMPGKFDIAGHSHQLFHVLVVAGAFTHYRAGLVYLKWRDIEGC

SEQ ID NO: 37019 - DNA, 910 bp, Arabidopsis thaliana
  misc_feature (1)..(910): Ceres Seq. ID no. 13489408
  misc_feature (1)..(910): Ortholog of  Ceres SEQ ID NO 14307589 as cited in SEQ ID NO 20466
  misc_feature (1)..(910): Ortholog of  Ceres SEQ ID NO 14313599 as cited in SEQ ID NO 54989
  misc_feature (1)..(910): Ortholog of  Ceres SEQ ID NO 15176204 as cited in SEQ ID NO 55608
  misc_feature (1)..(910): Ortholog of  Ceres SEQ ID NO 15225111 as cited in SEQ ID NO 58444
  misc_feature (1)..(910): Ortholog of  Ceres SEQ ID NO 14313064 as cited in SEQ ID NO 59543
  misc_feature (1)..(910): Ortholog of  Ceres SEQ ID NO 13661001 as cited in SEQ ID NO 67531
  misc_feature (1)..(910): Ortholog of  Ceres SEQ ID NO 15178920 as cited in SEQ ID NO 0
atcaactctctctctcactttcacaactctccctttctatttctctctctagaaaaatatcatcatctatcaattatatagagtacttatttagattcatttcataaaaatggagaaaagagaaagtagtggtggttctggatcaggagatgcagaggtgagaaaagggccatggacgatggaagaagatttgattctcatcaattatatcgccaatcatggtgaaggtgtttggaactctctcgccaaatctgcaggactaaaacgcaccgggaaaagttgccggctccggtggctgaactacctccgacctgatgtgcgacggggaaatatcacaccagaagaacagctcaccatcatggaacttcatgcaaaatggggaaataggtggtcaaaaattgcaaagcatttaccaggaaggaccgacaatgagataaagaacttttggaggactaagatccagaaatacatcatcaagagcggagaaacgacgaccgttggatcacaaagctccgagtttataaaccatcatgcgacaacgagccatgtcatgaatgatactcaagaaaccatggatatgtattctccaacgacgtcgtatcaacatgccagcaatattaatcagcagcttaattatggtaattatgtgcctgaatccagttcgatcatgatgccattatctgttgatcaatccgaacaaaactattggagcgtcgatgatctttggcccatgaatatatataatggtaattaataaataagttcgttaaaacttatatatatttacggtccaaagagggttctatataaacagagtactgtatgggtttgcctcattgtttagaggtaggtacttaatataaggttggagatcttatatgaattaataaataactcgtatttactagat

SEQ ID NO: 37020 - protein, 214 aa, Arabidopsis thaliana
  peptide (1)..(214): Ceres Seq. ID no. 13489409
MEKRESSGGSGSGDAEVRKGPWTMEEDLILINYIANHGEGVWNSLAKSAGLKRTGKSCRLRWLNYLRPDVRRGNITPEEQLTIMELHAKWGNRWSKIAKHLPGRTDNEIKNFWRTKIQKYIIKSGETTTVGSQSSEFINHHATTSHVMNDTQETMDMYSPTTSYQHASNINQQLNYGNYVPESSSIMMPLSVDQSEQNYWSVDDLWPMNIYNGN

SEQ ID NO: 37021 - protein, 191 aa, Arabidopsis thaliana
  peptide (1)..(191): Ceres Seq. ID no. 13489410
MEEDLILINYIANHGEGVWNSLAKSAGLKRTGKSCRLRWLNYLRPDVRRGNITPEEQLTIMELHAKWGNRWSKIAKHLPGRTDNEIKNFWRTKIQKYIIKSGETTTVGSQSSEFINHHATTSHVMNDTQETMDMYSPTTSYQHASNINQQLNYGNYVPESSSIMMPLSVDQSEQNYWSVDDLWPMNIYNGN

SEQ ID NO: 37022 - protein, 131 aa, Arabidopsis thaliana
  peptide (1)..(131): Ceres Seq. ID no. 13489411
MELHAKWGNRWSKIAKHLPGRTDNEIKNFWRTKIQKYIIKSGETTTVGSQSSEFINHHATTSHVMNDTQETMDMYSPTTSYQHASNINQQLNYGNYVPESSSIMMPLSVDQSEQNYWSVDDLWPMNIYNGN

SEQ ID NO: 37023 - DNA, 712 bp, Arabidopsis thaliana
  misc_feature (1)..(712): Ceres Seq. ID no. 12329505
  misc_feature (1)..(712): Ortholog of  Ceres SEQ ID NO 12638267 as cited in SEQ ID NO 0
agacaaatctccattccaactgtaaccaaaaaaagagaaaagcaaaaaaacactctctgcgattcacactaagtatctaatgtatcaagatcgtcaaggcgttgtaggaggcggaggcggtggcggttctgcgccacacggaatcatactcgccgtcgttgttgcattagtggtgcttgttccgttcttcatcggagacagtggtgaagccattacagatgcgatcgcagagcttcttagtccggtgggacttctattgcttcctatcatcctcctcctcactatacagtttctctcgtcggaacgtggttccttcgtgtcggccattttctccaccggagaacccgaatcgattcacagggttagcggatctcccgtgggtgttgctctcttcctcgtactgatcttgttcttactctactaccgcttctctatcttcggcggagatgatggttccgatgactgatgcgacgtcgtattttcagatctagttttttccctctttttcttttttagggaaaacaatatatttatgtctttattcgattttcgtttttattttattttgtttgacagttgaaagtcaaactatatacagcagttgcatttcatgtaggtacgcacgtgtgagtcacgtgagtgatgagtgtactgaggttgtataatttagtaaacatgatgtgattacgattaatatgaatcccgaactttt

SEQ ID NO: 37024 - protein, 128 aa, Arabidopsis thaliana
  peptide (1)..(128): Ceres Seq. ID no. 12329506
MYQDRQGVVGGGGGGGSAPHGIILAVVVALVVLVPFFIGDSGEAITDAIAELLSPVGLLLLPIILLLTIQFLSSERGSFVSAIFSTGEPESIHRVSGSPVGVALFLVLILFLLYYRFSIFGGDDGSDD

SEQ ID NO: 37025 - DNA, 700 bp, Arabidopsis thaliana
  misc_feature (1)..(700): Ceres Seq. ID no. 12393963
  misc_feature (1)..(700): Ortholog of  Ceres SEQ ID NO 12626708 as cited in SEQ ID NO 67104
gtgccgctttgttcctaaacgattttctgtctgttctctctttgctctctcgccctctcttgctcttctgggttcgccttcctcggctagggtttatcagtggtttgtcaatggaggcttcatcatctcaaccatccgattcttctgatcaaactgcttccaagttcctttctgacctcccgtctcgaggtttcttgtcttctaccgtcgtctcttccaatccgggaagcttgcgggtctacatttgtgagcatgacacatctcccccagaaggacagcttatcaaaacaaaccagcaaaatatactaatcagatctctcttgttaaagaagcaaaaaggcgaatctagttctaaagactcaaaaggaactgctgaagatggtcctaaaaagagggctgcaaatagagctctggacgacagaagctcagctaaaagagctgctaatgcatctagacaagaaggatcaagcagtcgcacaggcgaaagagactttcagtctttgaccgttgagaagctccgcgccatgctcaaggagaagggccttccaacaaaaggaagaaaggatgagctcattgcgcgtctgaagagtgccaactgaaatgaagttgagaagggtgctctggtgaatatatgtatctttagaggtttcccaaataggagagaattgttgttgttcttgatcaaatacaaatccttttg

SEQ ID NO: 37026 - protein, 198 aa, Arabidopsis thaliana
  peptide (1)..(198): Ceres Seq. ID no. 12393964
AALFLNDFLSVLSLLSRPLLLFWVRLPRLGFISGLSMEASSSQPSDSSDQTASKFLSDLPSRGFLSSTVVSSNPGSLRVYICEHDTSPPEGQLIKTNQQNILIRSLLLKKQKGESSSKDSKGTAEDGPKKRAANRALDDRSSAKRAANASRQEGSSSRTGERDFQSLTVEKLRAMLKEKGLPTKGRKDELIARLKSAN

SEQ ID NO: 37027 - protein, 162 aa, Arabidopsis thaliana
  peptide (1)..(162): Ceres Seq. ID no. 12393965
MEASSSQPSDSSDQTASKFLSDLPSRGFLSSTVVSSNPGSLRVYICEHDTSPPEGQLIKTNQQNILIRSLLLKKQKGESSSKDSKGTAEDGPKKRAANRALDDRSSAKRAANASRQEGSSSRTGERDFQSLTVEKLRAMLKEKGLPTKGRKDELIARLKSAN

SEQ ID NO: 37028 - DNA, 697 bp, Arabidopsis thaliana
  misc_feature (1)..(697): Ceres Seq. ID no. 12604897
  misc_feature (1)..(697): Ortholog of  Ceres SEQ ID NO 12557420 as cited in SEQ ID NO 15
  misc_feature (1)..(697): Ortholog of  Ceres SEQ ID NO 15224673 as cited in SEQ ID NO 0
  misc_feature (1)..(697): Ortholog of  Ceres SEQ ID NO 15227157 as cited in SEQ ID NO 0
atctttagccgcctacttggtatcatcaaatcgaggagattcgaagaagcatggtgggatttaagaacagatacatgttaatggaagtttttctggatccggacaaggatcttctcggagaaggaacaccgatcattcttacacaattcaatctctcgaaagcaatcaaagacagtatcctcgtcaatttcggcgagtgtggtctaggttcgtctctcggttccttccaagtgaaatatgtgaatccaatcacgaagctgtgcattgtaagatcatcaagagaagaacacagacaagtttggttagcaatcacattggtcaaaagcatcggaaactgtccggtgatcttaaacttgctcgatatcagcggttgcatcagagcgtgtagagacacagccttgaagtgcgacaaggagaagtttgagcagtgtagcaaaagcttgtctgaagaggagattaggcagatgaatactttctctttgagaagatcaaacctattggaaacttgaaccttttctnanccntttttccnttcgatttngccccttaantttngaaatggtccantcttggnntttttnttanttttgaaatccaaagggntaagaaccanctncattccctgaaaagatngtttncgatttgaancnntgggtttttatatgtnggaattaaaataagagggtgtgaattgttg

SEQ ID NO: 37029 - protein, 152 aa, Arabidopsis thaliana
  peptide (1)..(152): Ceres Seq. ID no. 12604898
MVGFKNRYMLMEVFLDPDKDLLGEGTPIILTQFNLSKAIKDSILVNFGECGLGSSLGSFQVKYVNPITKLCIVRSSREEHRQVWLAITLVKSIGNCPVILNLLDISGCIRACRDTALKCDKEKFEQCSKSLSEEEIRQMNTFSLRRSNLLET

SEQ ID NO: 37030 - protein, 144 aa, Arabidopsis thaliana
  peptide (1)..(144): Ceres Seq. ID no. 12604899
MLMEVFLDPDKDLLGEGTPIILTQFNLSKAIKDSILVNFGECGLGSSLGSFQVKYVNPITKLCIVRSSREEHRQVWLAITLVKSIGNCPVILNLLDISGCIRACRDTALKCDKEKFEQCSKSLSEEEIRQMNTFSLRRSNLLET

SEQ ID NO: 37031 - protein, 142 aa, Arabidopsis thaliana
  peptide (1)..(142): Ceres Seq. ID no. 12604900
MEVFLDPDKDLLGEGTPIILTQFNLSKAIKDSILVNFGECGLGSSLGSFQVKYVNPITKLCIVRSSREEHRQVWLAITLVKSIGNCPVILNLLDISGCIRACRDTALKCDKEKFEQCSKSLSEEEIRQMNTFSLRRSNLLET

SEQ ID NO: 37032 - DNA, 1637 bp, Arabidopsis thaliana
  misc_feature (1)..(1637): Ceres Seq. ID no. 13497284
  misc_feature (1)..(1637): Ortholog of  Ceres SEQ ID NO 13594209 as cited in SEQ ID NO 59089
  misc_feature (1)..(1637): Ortholog of  Ceres SEQ ID NO 13502874 as cited in SEQ ID NO 66298
  misc_feature (1)..(1637): Ortholog of  Ceres SEQ ID NO 12614124 as cited in SEQ ID NO 68392
atcgataaccaaataaaaaatggcgatctctttcctctgtgtttttctcatcaccttcgtttcgttaatcttttttgccaagaaaatcaaacgatcaaaatggaatcttcctccaagccctcccaagtttccggtcatcgggaacttacatcagattggagaattgcctcacaggtcacttcaacatctcgccgaaagatacggacctgtgatgcttcttcactttgggtttgtccctataactgtggtctcatcgagagaagccgctgaagaagtgcttagaactcatgacctagactgttgcagcaggcctaagcttgtcgggacaaggttactctcgcgggattttaaagatatcggttttacgccatacggtaacgagtggaaggcgcggcgtaagtttgccctgcgtgagcttttctgtttgaaaaaggttcagtcctttaggcatatccgagaggaagaatgtaactttctggtcaagcaactgtcggaatctgcggttgatcgctctccggtcgatttgagcaaatcccttttctggctaaccgctagtatcctttttagagttgccttaggacagaattttcacgagagcgattttatcgataaagaaaagatcgaagagctcgtgttcgaagctgagactgccctagcaagtttcacttgttctgatttcttccctgttgccggacttggatggctcgttgattggttttccggacaacacaagagactcaacgatgttttttacaagctcgatgctctgtttcaacatgtcatagatgatcatttaaatcctggaagatcaaaagagcacgaagacatcatcgattcaatgttggatgtgattcataaacaaggagaggacagttccttagagctcacaatagatcatatcaaggggtttctcgcgaatatatttcttgcagggatagacacaggggccatcaccatgatatgggcagtgacggagctcgttaaaaacccgaaactgataaagaaagttcaaggcgatatccgagaacaacttggcagcaataaggagagaatcaccgaggaagatatcgagaaagttccttacttgaagatggtaatcaaagaaacattcaggttacacccagcagctcctcttatacttccaagggaaacaatggctcacatcaaagttcaagggtatgatattcctcccaagaggaggatcttggtcaatgtttcggcaataggaagagatcccaaactctggacaaacccgaaagagtttgaccctgagaggtttatggatagctttgttgattataggggacaacattacgagctcttaccatttgggtccggtcgaaggatatgtcccgggatgccaatggggattgctgccgtcgaattgggactcttgaacttactttacttcttcgattggaagttgcctgatgggatgacacataaagatatcgatactgaagaagctggtactcttacaatagtcaagaaagtacctctcaagctcgttccagttcgagttcagtgatcagaccaaactccaaaccttttgaataaatatatcatgcaaatcatgtaagcttctctgatgatgtatgaagtatatttttcagtaaaatactaagttgaaatttcat

SEQ ID NO: 37033 - protein, 502 aa, Arabidopsis thaliana
  peptide (1)..(502): Ceres Seq. ID no. 13497285
MAISFLCVFLITFVSLIFFAKKIKRSKWNLPPSPPKFPVIGNLHQIGELPHRSLQHLAERYGPVMLLHFGFVPITVVSSREAAEEVLRTHDLDCCSRPKLVGTRLLSRDFKDIGFTPYGNEWKARRKFALRELFCLKKVQSFRHIREEECNFLVKQLSESAVDRSPVDLSKSLFWLTASILFRVALGQNFHESDFIDKEKIEELVFEAETALASFTCSDFFPVAGLGWLVDWFSGQHKRLNDVFYKLDALFQHVIDDHLNPGRSKEHEDIIDSMLDVIHKQGEDSSLELTIDHIKGFLANIFLAGIDTGAITMIWAVTELVKNPKLIKKVQGDIREQLGSNKERITEEDIEKVPYLKMVIKETFRLHPAAPLILPRETMAHIKVQGYDIPPKRRILVNVSAIGRDPKLWTNPKEFDPERFMDSFVDYRGQHYELLPFGSGRRICPGMPMGIAAVELGLLNLLYFFDWKLPDGMTHKDIDTEEAGTLTIVKKVPLKLVPVRVQ

SEQ ID NO: 37034 - protein, 438 aa, Arabidopsis thaliana
  peptide (1)..(438): Ceres Seq. ID no. 13497286
MLLHFGFVPITVVSSREAAEEVLRTHDLDCCSRPKLVGTRLLSRDFKDIGFTPYGNEWKARRKFALRELFCLKKVQSFRHIREEECNFLVKQLSESAVDRSPVDLSKSLFWLTASILFRVALGQNFHESDFIDKEKIEELVFEAETALASFTCSDFFPVAGLGWLVDWFSGQHKRLNDVFYKLDALFQHVIDDHLNPGRSKEHEDIIDSMLDVIHKQGEDSSLELTIDHIKGFLANIFLAGIDTGAITMIWAVTELVKNPKLIKKVQGDIREQLGSNKERITEEDIEKVPYLKMVIKETFRLHPAAPLILPRETMAHIKVQGYDIPPKRRILVNVSAIGRDPKLWTNPKEFDPERFMDSFVDYRGQHYELLPFGSGRRICPGMPMGIAAVELGLLNLLYFFDWKLPDGMTHKDIDTEEAGTLTIVKKVPLKLVPVRVQ

SEQ ID NO: 37035 - DNA, 1674 bp, Arabidopsis thaliana
  misc_feature (1)..(1674): Ceres Seq. ID no. 12731360
  misc_feature (1)..(1674): Ortholog of  Ceres SEQ ID NO 14302852 as cited in SEQ ID NO 64814
  misc_feature (1)..(1674): Ortholog of  Ceres SEQ ID NO 13598593 as cited in SEQ ID NO 64978
  misc_feature (1)..(1674): Ortholog of  Ceres SEQ ID NO 14303067 as cited in SEQ ID NO 67078
  misc_feature (1)..(1674): Ortholog of  Ceres SEQ ID NO 13595992 as cited in SEQ ID NO 68401
acaccaaaaaacacagaaacattttgagaaaccaaagaagaagaagaagaagaagaacaagcagaagctaaagaagaagacttgaacttgagagatggagcgcagacagtcatatgtgcttgtcgcgctcattggattgcttctcttgacagatattgtcattgcacagagcgatggcggcaaaggcaacggtaacaatggcaaggggaacgaggtacaagtagacaagggtaaaggagataatggcaaaagtaacggtaacggtccaaaggataaagaacaggagaagaaggacaaggagaaggcagccaaggacaagaaggagaaggagaaaaaggataaggaggaaaaggagaagaaggataaggaaaggaaggaaaaggagaagaaggataaactggaaaaggaaaagaaggataaggaaaggaaggagaaggagaggaaggagaaagagagaaaggcgaaggagaagaaagacaaagaggagagtgaagcagctgcgagatacagaatattatcaccgttgcctacaggacaagagcaggccatgtgccaaggtcggggatcatgttactacaagactcttgtttgccctggtgagtgtcccaagaggaagcccacgaagaacaagaacaccaaaggttgcttcattgactgcactaacaaatgtgaagctacctgcaaatggagaaaaacgaactgcaatggttacggatctctgtgctacgaccctcgatttgtgggaggagacggtgtgatgttctatttccacggatccaaaggaggaaactttgcgattgtttcagacaacaatctccaaattaacgctcacttcatcggtacaagacccgttgggagaaccagagacttcacatgggttcaggccctaaatgtcatgttcgaaaaccacaagctcgtgatcacagccaacagagtgaatcaatgggatgaaacatctgacgcctttaccatcagatatgatggagaactcatcacactccctgaagacgaacaatcagaatggagggaaatttcaggacaaaagaaggatatcatcatcgaaagaactgatgagagaaacagcgtaagagtacttgtctctgatcttgttcagatggacatcagagtgagacctatagggaaagaagagaacagagttcacaactatcagttgccgcaggatgacgcttttgcccatctcgagactcagttcaagttcttagacctaagtgagctcgtcgagggtgttttggggaaaacctaccgtcctgattacgtcagctctgccaagactggagtcccaatgcctgtattgggaggagaagacaaataccaaacgccttctctgttctcgccgacttgcagactgtgcaggttcaagcctcaagaagaatcactttctgctgatatctaatgagaagaaggagaaagatggaaacttctttgatttttaaataaattcatggaaatttcgtgtttgtaactgttttgtttctggaaatattttatattcataaaaagtgatgtaataaaagccaaaaagataacatttggcctgtttgtgatgtttttgagggtttaagaaatgtaaaacatttcttgtgcaagaagcaaccccttgatttcttatcgttcctttgctgtattttgtgtacctatccgtttatcgaacaa

SEQ ID NO: 37036 - protein, 439 aa, Arabidopsis thaliana
  peptide (1)..(439): Ceres Seq. ID no. 12731361
MERRQSYVLVALIGLLLLTDIVIAQSDGGKGNGNNGKGNEVQVDKGKGDNGKSNGNGPKDKEQEKKDKEKAAKDKKEKEKKDKEEKEKKDKERKEKEKKDKLEKEKKDKERKEKERKEKERKAKEKKDKEESEAAARYRILSPLPTGQEQAMCQGRGSCYYKTLVCPGECPKRKPTKNKNTKGCFIDCTNKCEATCKWRKTNCNGYGSLCYDPRFVGGDGVMFYFHGSKGGNFAIVSDNNLQINAHFIGTRPVGRTRDFTWVQALNVMFENHKLVITANRVNQWDETSDAFTIRYDGELITLPEDEQSEWREISGQKKDIIIERTDERNSVRVLVSDLVQMDIRVRPIGKEENRVHNYQLPQDDAFAHLETQFKFLDLSELVEGVLGKTYRPDYVSSAKTGVPMPVLGGEDKYQTPSLFSPTCRLCRFKPQEESLSADI

SEQ ID NO: 37037 - protein, 288 aa, Arabidopsis thaliana
  peptide (1)..(288): Ceres Seq. ID no. 12731362
MCQGRGSCYYKTLVCPGECPKRKPTKNKNTKGCFIDCTNKCEATCKWRKTNCNGYGSLCYDPRFVGGDGVMFYFHGSKGGNFAIVSDNNLQINAHFIGTRPVGRTRDFTWVQALNVMFENHKLVITANRVNQWDETSDAFTIRYDGELITLPEDEQSEWREISGQKKDIIIERTDERNSVRVLVSDLVQMDIRVRPIGKEENRVHNYQLPQDDAFAHLETQFKFLDLSELVEGVLGKTYRPDYVSSAKTGVPMPVLGGEDKYQTPSLFSPTCRLCRFKPQEESLSADI

SEQ ID NO: 37038 - DNA, 861 bp, Arabidopsis thaliana
  misc_feature (1)..(861): Ceres Seq. ID no. 12489501
  misc_feature (1)..(861): Ortholog of  Ceres SEQ ID NO 12634327 as cited in SEQ ID NO 0
aacaacgggtccactctgcatctctctctctctctctagatttgatttctttgcgggcttgttaatggcgaacccagggcaatcaaagggatggataaagaaatggacgtctatggcttcatcggtttacttcgtcttgatcttattccagatccctctcttcagagttccatgtagatctggtatgtgttcatcgccaatccatgtgacatcgtctcagttgatttctagtgagatctttcctgttccgatgattaaggctctcttataccctggtgctgtagtcaatggccttgccatcaacatgacatttccaaagtgggaaaatgtgttagatatctacaatctcaccaatgtgaaagaagcttctgcagtgaccgatcttcaacgcctagaggttcttgcagggagctacttttctgtagctggggcgtttgtgggtttgctaaagcctggaaggatgagcatgtttgggtcattgctactagtatggggtcttgttaaagaagggatcttagggaagccagtaaatactgacccagccaaaactgtttatgtgtacccaactatggtgcttgcgatgatctgcgctttctctatgataaagtatgacttgaggaaagccacgagggcagctccagctcgtcccattgctaaacctctaatgagctcttcaaaatctaagctgaagtgagttttttgagacttaatagggcttgtgtcctgtctttgtaccaacacccgggaaaggaaaatgtcccggaaaatggcattgtcactatattttgctctcagttaccttatgtttcatgaattgtctattttctaggacactgctcagtagtcaatatcttccaatat

SEQ ID NO: 37039 - protein, 230 aa, Arabidopsis thaliana
  peptide (1)..(230): Ceres Seq. ID no. 12489502
TTGPLCISLSLSRFDFFAGLLMANPGQSKGWIKKWTSMASSVYFVLILFQIPLFRVPCRSGMCSSPIHVTSSQLISSEIFPVPMIKALLYPGAVVNGLAINMTFPKWENVLDIYNLTNVKEASAVTDLQRLEVLAGSYFSVAGAFVGLLKPGRMSMFGSLLLVWGLVKEGILGKPVNTDPAKTVYVYPTMVLAMICAFSMIKYDLRKATRAAPARPIAKPLMSSSKSKLK

SEQ ID NO: 37040 - protein, 209 aa, Arabidopsis thaliana
  peptide (1)..(209): Ceres Seq. ID no. 12489503
MANPGQSKGWIKKWTSMASSVYFVLILFQIPLFRVPCRSGMCSSPIHVTSSQLISSEIFPVPMIKALLYPGAVVNGLAINMTFPKWENVLDIYNLTNVKEASAVTDLQRLEVLAGSYFSVAGAFVGLLKPGRMSMFGSLLLVWGLVKEGILGKPVNTDPAKTVYVYPTMVLAMICAFSMIKYDLRKATRAAPARPIAKPLMSSSKSKLK

SEQ ID NO: 37041 - protein, 193 aa, Arabidopsis thaliana
  peptide (1)..(193): Ceres Seq. ID no. 12489504
MASSVYFVLILFQIPLFRVPCRSGMCSSPIHVTSSQLISSEIFPVPMIKALLYPGAVVNGLAINMTFPKWENVLDIYNLTNVKEASAVTDLQRLEVLAGSYFSVAGAFVGLLKPGRMSMFGSLLLVWGLVKEGILGKPVNTDPAKTVYVYPTMVLAMICAFSMIKYDLRKATRAAPARPIAKPLMSSSKSKLK

SEQ ID NO: 37042 - DNA, 1057 bp, Arabidopsis thaliana
  misc_feature (1)..(1057): Ceres Seq. ID no. 12558683
  misc_feature (1)..(1057): Ortholog of  Ceres SEQ ID NO 13595752 as cited in SEQ ID NO 57735
agtgaattcgtctgagaaaacaaaagaaatcgaacgaagagtgtgtgcacttgaggatcgaattaaggtgagaacaaagaagagagaagaatcgaaatagcaaatctcttgatggtcttgatgatcattaaaggtatatttcggagatatgaaaaatggaatcctgtgcatcctacttatggagcattttggggaatggggattgggattggttgtggcgtcggatggggacctggttttggccctgaggtcattggttatgtcggtgctggctgcggtgttggttttagtgttggtataacacttgctggtctcggcattggtcttcccacaaattttcttcttgcagctccttataacactgtggaagcaactagaaagggtgcttttaatttctttggtaaaaacctctcaaccaatggttggagtgatttgatgcctcaaatcgcggggttgcagagacaagtcagtgagatatgctctggttttaacaagaagcctcatttaaataatgccattgacctaaaaagttttcctttgttcatttcacatgattgtggcaaatttggaagtcatcttctccatgtgcgcaaaggttcggaggacaataaatcatcagctatgtaatgctacccaccacgaggatcttaagcatctgagacgcatttcgagatagttactttgatggaatttgtgaatgtgactgaaatattcagcacaaatcagaacatggttcctgtcttgtttggagaagcactatgaaccaaacctgaagcccttgtgatttagagttacagagatacattaaaagggttcgggatttcacagtagcattcatagacagttcaggttagttaaacgtgcttcacaaaaagaaaaaaaacagaagtgtagttgaggtcacaccacaggtttatgctttgctcttaatcaaatatttatctttctcttttttgttatttgtcctttttaattccatttgctttattccttacttgtggggattaaatgtttgcagagaaagataattcgactgaataaatacacttttacctgt

SEQ ID NO: 37043 - protein, 171 aa, Arabidopsis thaliana
  peptide (1)..(171): Ceres Seq. ID no. 12558684
MVLMIIKGIFRRYEKWNPVHPTYGAFWGMGIGIGCGVGWGPGFGPEVIGYVGAGCGVGFSVGITLAGLGIGLPTNFLLAAPYNTVEATRKGAFNFFGKNLSTNGWSDLMPQIAGLQRQVSEICSGFNKKPHLNNAIDLKSFPLFISHDCGKFGSHLLHVRKGSEDNKSSAM

SEQ ID NO: 37044 - protein, 168 aa, Arabidopsis thaliana
  peptide (1)..(168): Ceres Seq. ID no. 12558685
MIIKGIFRRYEKWNPVHPTYGAFWGMGIGIGCGVGWGPGFGPEVIGYVGAGCGVGFSVGITLAGLGIGLPTNFLLAAPYNTVEATRKGAFNFFGKNLSTNGWSDLMPQIAGLQRQVSEICSGFNKKPHLNNAIDLKSFPLFISHDCGKFGSHLLHVRKGSEDNKSSAM

SEQ ID NO: 37045 - protein, 143 aa, Arabidopsis thaliana
  peptide (1)..(143): Ceres Seq. ID no. 12558686
MGIGIGCGVGWGPGFGPEVIGYVGAGCGVGFSVGITLAGLGIGLPTNFLLAAPYNTVEATRKGAFNFFGKNLSTNGWSDLMPQIAGLQRQVSEICSGFNKKPHLNNAIDLKSFPLFISHDCGKFGSHLLHVRKGSEDNKSSAM

SEQ ID NO: 37046 - DNA, 1393 bp, Arabidopsis thaliana
  misc_feature (1)..(1393): Ceres Seq. ID no. 13499692
  misc_feature (1)..(1393): Ortholog of  Ceres SEQ ID NO 14315989 as cited in SEQ ID NO 57571
cccaaatacaaaactcccgaaaatctctctcttttattctttctttcttcttcttcttccccaacttgaaaaaaaaaagtaaacacgaaaatgtctccgtcttggctccgcccaaccgccgatcacaatcatcctccaccgcaaccgccgtcgcaatcaccgtcccctctatcttccggtgatccgaatctcacaacatgtctctaccaaacagatcacggcgtcttctatctaacatggtcccgaactttcttaggaggccactctgtgaatctcttcctccattcacaagattactacaaccactcttcgccactctctttctcctccgctgatctctctctttcctccgccgtctctttccatctcaacttaaacacattagctttctggaaaaaacgtggatccagattcgtttctcccaaaatccaagtcttctgggacttaagcaaagccaaattcgactctggatccgaacctagatccggattctacatcgctgtagttgttgacggagagatgggactattagtcggagattcagtcaaagaagcttacgctcgtgctaaatcggcgaaacctccgacgaatccgcaagctcttctgttgaggaaagagcacgtgtttggagctagggttttcacaacgaaagcgagatttggagggaagaacagagagatttctattgattgtcgtgttgatgaagacgctaagctctgttttagcgttgattcgaaacaggttctgcagatcaagagacttagatggaaatttagaggaaatgagaaagttgaaatcgatggagttcatgttcagatctcttgggatgtatacaattggttgtttcagagtaaaagttccggtgacggcggaggaggaggaggacacgccgtgtttatgtttagattcgagagtgatccagaagcagaggaggtttgtgaaacgaagaggaaagaagaagaagatgagaaaaatcgaaacggtatcgttttatggaagccgaagaagcaatgtggaaatagttttgggattaaagggattgttgagtggaggaagatgaggaagagatttgttaagagtaagagaagttcttcgtcgtcttcgatttcgatgtcgtcggcttcttcggcgtgtagctcgtcggttatggaatgggctagtagtgctgatgaggcggagtacggcggaggaggttgttctggttccggttccggcaatggtcttggattctcattactggtttacgcttggattaagtgaaaatattctttttcgagggaaataagaagttactgttttcggttaatttttttttttaatatgttcttctttcttttttatattaattttccctctgaaatcacgtacggacgagaagatataaaaatnntgg

SEQ ID NO: 37047 - protein, 389 aa, Arabidopsis thaliana
  peptide (1)..(389): Ceres Seq. ID no. 13499693
MSPSWLRPTADHNHPPPQPPSQSPSPLSSGDPNLTTCLYQTDHGVFYLTWSRTFLGGHSVNLFLHSQDYYNHSSPLSFSSADLSLSSAVSFHLNLNTLAFWKKRGSRFVSPKIQVFWDLSKAKFDSGSEPRSGFYIAVVVDGEMGLLVGDSVKEAYARAKSAKPPTNPQALLLRKEHVFGARVFTTKARFGGKNREISIDCRVDEDAKLCFSVDSKQVLQIKRLRWKFRGNEKVEIDGVHVQISWDVYNWLFQSKSSGDGGGGGGHAVFMFRFESDPEAEEVCETKRKEEEDEKNRNGIVLWKPKKQCGNSFGIKGIVEWRKMRKRFVKSKRSSSSSSISMSSASSACSSSVMEWASSADEAEYGGGGCSGSGSGNGLGFSLLVYAWIK

SEQ ID NO: 37048 - protein, 246 aa, Arabidopsis thaliana
  peptide (1)..(246): Ceres Seq. ID no. 13499694
MGLLVGDSVKEAYARAKSAKPPTNPQALLLRKEHVFGARVFTTKARFGGKNREISIDCRVDEDAKLCFSVDSKQVLQIKRLRWKFRGNEKVEIDGVHVQISWDVYNWLFQSKSSGDGGGGGGHAVFMFRFESDPEAEEVCETKRKEEEDEKNRNGIVLWKPKKQCGNSFGIKGIVEWRKMRKRFVKSKRSSSSSSISMSSASSACSSSVMEWASSADEAEYGGGGCSGSGSGNGLGFSLLVYAWIK

SEQ ID NO: 37049 - DNA, 1353 bp, Arabidopsis thaliana
  misc_feature (1)..(1353): Ceres Seq. ID no. 13600835
  misc_feature (1)..(1353): Ortholog of  Ceres SEQ ID NO 12778345 as cited in SEQ ID NO 62792
  misc_feature (1)..(1353): Ortholog of  Ceres SEQ ID NO 13662513 as cited in SEQ ID NO 63303
aatttcatttctccaaagctttccagaatactctccactccttcatcatttctctggcaacgatggctatgatatctcaccgtctccgacgagctttactcactgcgacttcctatgttaaccgatcaattagctcttcgatcacaccagcgtctgatttcccttctgtgtcggcggcggtgttaaagagatccgttatagggcgttcgacggaagtagctactcgagcaccggcgagactgttttcaacgaggcagtacaagctttacaaagaaggtgatgagatcacggaagacactgtgttgttcgaaggatgtgattataatcactggcttatcactatggatttctccaaagaggaaactcctaagtctccagaagaaatggtcgctgcttatgaagaaacttgcgcccaaggacttggcatcagcgtggaagaggctaagcaaaggatgtatgcttgtagcacaactacttaccaaggatttcaagcaatcatgactgaacaagaatcagaaaagttcaaggatctacccggagtggttttcatcttgccagattcctacattgatccccagaacaaagagtatggaggagataaatacgagaatggagtgataacacacaggccaccaccgattcagagtggcagagcaagacctcgtcctagatttgaccgttcaggaggaggaagtggtggtccccaaaacttccaaagaaacacacagtatggtcagcaaccaccaatgcaaggtggtggagggagctatggtcctcaacagggctatgccactccaggacaaggtcagggaactcaagcgcctccaccatttcaaggaggttataaccaaggcccgagatctccaccacctccatatcaggcaggttacaatcaaggccagggatctccagtgcctccatatcaggcaggttacaatcaagtccagggatctccagtgcctccataccaaggaacacaaagcagttacggtcaaggtggatctgggaactatagtcaagggccacaaggtggttacaaccaaggaggacctaggaattacaatccacagggagctggaaactttggtcctgcatctggagctggaaacttaggtcctgcacctggagctggaaatcctggctatggtcaggggtattctggaccaggacaagagcagaatcagacattcccacaggcagatcagaggaatcgagactggaacaacaataatccagcaggccagcccgggtctgaccaagtaagatctcgatcaataatgaatcttgcatctttcttttttgatatcctcatcaggcattaaagtaccccattttccccatatttgttactga

SEQ ID NO: 37050 - protein, 439 aa, Arabidopsis thaliana
  peptide (1)..(439): Ceres Seq. ID no. 13600836
FHFSKAFQNTLHSFIISLATMAMISHRLRRALLTATSYVNRSISSSITPASDFPSVSAAVLKRSVIGRSTEVATRAPARLFSTRQYKLYKEGDEITEDTVLFEGCDYNHWLITMDFSKEETPKSPEEMVAAYEETCAQGLGISVEEAKQRMYACSTTTYQGFQAIMTEQESEKFKDLPGVVFILPDSYIDPQNKEYGGDKYENGVITHRPPPIQSGRARPRPRFDRSGGGSGGPQNFQRNTQYGQQPPMQGGGGSYGPQQGYATPGQGQGTQAPPPFQGGYNQGPRSPPPPYQAGYNQGQGSPVPPYQAGYNQVQGSPVPPYQGTQSSYGQGGSGNYSQGPQGGYNQGGPRNYNPQGAGNFGPASGAGNLGPAPGAGNPGYGQGYSGPGQEQNQTFPQADQRNRDWNNNNPAGQPGSDQVRSRSIMNLASFFFDILIRH

SEQ ID NO: 37051 - protein, 419 aa, Arabidopsis thaliana
  peptide (1)..(419): Ceres Seq. ID no. 13600837
MAMISHRLRRALLTATSYVNRSISSSITPASDFPSVSAAVLKRSVIGRSTEVATRAPARLFSTRQYKLYKEGDEITEDTVLFEGCDYNHWLITMDFSKEETPKSPEEMVAAYEETCAQGLGISVEEAKQRMYACSTTTYQGFQAIMTEQESEKFKDLPGVVFILPDSYIDPQNKEYGGDKYENGVITHRPPPIQSGRARPRPRFDRSGGGSGGPQNFQRNTQYGQQPPMQGGGGSYGPQQGYATPGQGQGTQAPPPFQGGYNQGPRSPPPPYQAGYNQGQGSPVPPYQAGYNQVQGSPVPPYQGTQSSYGQGGSGNYSQGPQGGYNQGGPRNYNPQGAGNFGPASGAGNLGPAPGAGNPGYGQGYSGPGQEQNQTFPQADQRNRDWNNNNPAGQPGSDQVRSRSIMNLASFFFDILIRH

SEQ ID NO: 37052 - protein, 417 aa, Arabidopsis thaliana
  peptide (1)..(417): Ceres Seq. ID no. 13600838
MISHRLRRALLTATSYVNRSISSSITPASDFPSVSAAVLKRSVIGRSTEVATRAPARLFSTRQYKLYKEGDEITEDTVLFEGCDYNHWLITMDFSKEETPKSPEEMVAAYEETCAQGLGISVEEAKQRMYACSTTTYQGFQAIMTEQESEKFKDLPGVVFILPDSYIDPQNKEYGGDKYENGVITHRPPPIQSGRARPRPRFDRSGGGSGGPQNFQRNTQYGQQPPMQGGGGSYGPQQGYATPGQGQGTQAPPPFQGGYNQGPRSPPPPYQAGYNQGQGSPVPPYQAGYNQVQGSPVPPYQGTQSSYGQGGSGNYSQGPQGGYNQGGPRNYNPQGAGNFGPASGAGNLGPAPGAGNPGYGQGYSGPGQEQNQTFPQADQRNRDWNNNNPAGQPGSDQVRSRSIMNLASFFFDILIRH

SEQ ID NO: 37053 - DNA, 956 bp, Arabidopsis thaliana
  misc_feature (1)..(956): Ceres Seq. ID no. 12678795
  misc_feature (1)..(956): Ortholog of  Ceres SEQ ID NO 12608945 as cited in SEQ ID NO 51209
  misc_feature (1)..(956): Ortholog of  Ceres SEQ ID NO 12619999 as cited in SEQ ID NO 66123
  misc_feature (1)..(956): Ortholog of  Ceres SEQ ID NO 13656436 as cited in SEQ ID NO 69154
aacattaattgaggaggaggagattggttgttgttgacgacgcgtttccgctcactaattttttttaacctttttgtgtctccgtcgtcttttgatcttcaatctcagttttgagctgaagattatcgtatcgacctgcgattctcttcagatcgataatccatggctgcagctggaaacaagagcattaacgccaaattggtgttgcttggagatgttggtgctggaaaatcaagtcttgtgttacggtttgtcaaagatcagtttgttgaattccaggaatcaaccattggtgctgcttttttctcacaaacgttagctgtgaacgatgccactgtgaagtttgagatttgggatacagcgggtcaggaacggtaccatagtttggctccaatgtactacagaggtgctgctgctgcaatcattgtttttgatgttacgaatcaggcttcgtttgagagggcaaagaaatgggttcaggaactgcaggcacaaggtaaccctaatatggtcatggcccttgctggaaacaaatctgatttattagatgcaaggaaggtgacagcagaggatgcacaaacatatgctcaggaaaacggtcttttcttcatggaaacttcagcaaaaaccgctactaatgtcaaagagatattctatgaaatcgcaagaaggctaccgcgagtacagccaacagaaaacccaacaggaatggttctgccagacagggccatggatagggcagtgagctcatcttgttgtgcttagttatattgtgtaatggcacacacttctcttaaaaagagatcttttggtcactttaaagttatggacttctgtgtttgcgtctctttgctttgttttacgtatttgagatttgatctccactattttgtaaataaatctaatactcaactaagtaactaagtgcgtgagggggctatggatccatttgtcat

SEQ ID NO: 37054 - protein, 200 aa, Arabidopsis thaliana
  peptide (1)..(200): Ceres Seq. ID no. 12678796
MAAAGNKSINAKLVLLGDVGAGKSSLVLRFVKDQFVEFQESTIGAAFFSQTLAVNDATVKFEIWDTAGQERYHSLAPMYYRGAAAAIIVFDVTNQASFERAKKWVQELQAQGNPNMVMALAGNKSDLLDARKVTAEDAQTYAQENGLFFMETSAKTATNVKEIFYEIARRLPRVQPTENPTGMVLPDRAMDRAVSSSCCA

SEQ ID NO: 37055 - protein, 123 aa, Arabidopsis thaliana
  peptide (1)..(123): Ceres Seq. ID no. 12678797
MYYRGAAAAIIVFDVTNQASFERAKKWVQELQAQGNPNMVMALAGNKSDLLDARKVTAEDAQTYAQENGLFFMETSAKTATNVKEIFYEIARRLPRVQPTENPTGMVLPDRAMDRAVSSSCCA

SEQ ID NO: 37056 - DNA, 782 bp, Arabidopsis thaliana
  misc_feature (1)..(782): Ceres Seq. ID no. 12337156
  misc_feature (1)..(782): Ortholog of  Ceres SEQ ID NO 13582388 as cited in SEQ ID NO 56812
  misc_feature (1)..(782): Ortholog of  Ceres SEQ ID NO 14305353 as cited in SEQ ID NO 57710
aaaagaaaagatgttgtgtagaatggtggtggtgactggccggaaaaagaaacccggttcggttccggtttatctgaatgtatacgatctcacacccatcaatggctacgcttactggttaggacttgggatctatcactctggtgttgaagttcatggagttgaatatggtttcggagctcacgatcattcgactaccgggatattcgaggtaaccgaagcaatgtccgggtttcacatttaggaagtctatattgattggaagaactgatttagatcctgaaaacgttcgtgtctttatggagaaacttgcggaagaatatagtggaaacagttatcatttgattactaagaattgcaatcacttttgcaatgatgtttgtgtgcaactgactcgaagatcgatccctagttgggttaaccgtcttgctcgctttggtttgttttgcaactgtgttctgccggcggagttgaatgagactaaggtgaggcaggtgagatcaaaggaagagaagattccggaagtagagaagaagaaacttcggagtagatcaagtaggtttccacctggtccttcgctttcttcgtcgggttctttaaaccgaagcagaagaggagaaaggagaagacaatgtcttcctccatcaccaactgtgagtgtttagctctagtcctagtaaaattatacctttttgtttcgcaatttgattctgtagtaatgtttaagctacaagatatggattgaacaaacattttcttgatagtaatggtataagattttc

SEQ ID NO: 37057 - protein, 121 aa, Arabidopsis thaliana
  peptide (1)..(121): Ceres Seq. ID no. 12337157
MEKLAEEYSGNSYHLITKNCNHFCNDVCVQLTRRSIPSWVNRLARFGLFCNCVLPAELNETKVRQVRSKEEKIPEVEKKKLRSRSSRFPPGPSLSSSGSLNRSRRGERRRQCLPPSPTVSV

SEQ ID NO: 37058 - protein, 80 aa, Arabidopsis thaliana
  peptide (1)..(80): Ceres Seq. ID no. 12337158
KEKMLCRMVVVTGRKKKPGSVPVYLNVYDLTPINGYAYWLGLGIYHSGVEVHGVEYGFGAHDHSTTGIFEVTEAMSGFHI

SEQ ID NO: 37059 - protein, 77 aa, Arabidopsis thaliana
  peptide (1)..(77): Ceres Seq. ID no. 12337159
MLCRMVVVTGRKKKPGSVPVYLNVYDLTPINGYAYWLGLGIYHSGVEVHGVEYGFGAHDHSTTGIFEVTEAMSGFHI

SEQ ID NO: 37060 - DNA, 498 bp, Arabidopsis thaliana
  misc_feature (1)..(498): Ceres Seq. ID no. 1391902
  misc_feature (1)..(498): Ortholog of  Ceres SEQ ID NO 13657872 as cited in SEQ ID NO 66357
aatttaaaggtttatagacaactcttggaaaaaacaaaatcgactccaggagccaaagtagaaaaccacaagttttgtgcttctgtgcactttcgctgcgtcgatgagaagaaatggagcgaactggttctacaggttcggtcggtattaaagaaattccctacgctgcaactgacccaaggtcggaaggttttcgaaatccgtccaatgattgaatgggataaaggaaaggctcttgagttcttgttagaatcacttggatttgggaacactaacaatgttttcccggtttatattggtgacaatcgaactgacgaagatgcatttaagatgctacgagacagaggcgaaggctttggcattcttgtctccaagtttcccaaggatactgatgcttcgtattctttgcaagatccatccgaggtgatggatttcttacgacgattggtggaatggaaacaaatgcagccaagaatgtgaaatgataatataataaac

SEQ ID NO: 37061 - protein, 159 aa, Arabidopsis thaliana
  peptide (1)..(159): Ceres Seq. ID no. 1391903
NLKVYRQLLEKTKSTPGAKVENHKFCASVHFRCVDEKKWSELVLQVRSVLKKFPTLQLTQGRKVFEIRPMIEWDKGKALEFLLESLGFGNTNNVFPVYIGDNRTDEDAFKMLRDRGEGFGILVSKFPKDTDASYSLQDPSEVMDFLRRLVEWKQMQPRM

SEQ ID NO: 37062 - protein, 90 aa, Arabidopsis thaliana
  peptide (1)..(90): Ceres Seq. ID no. 1391904
MIEWDKGKALEFLLESLGFGNTNNVFPVYIGDNRTDEDAFKMLRDRGEGFGILVSKFPKDTDASYSLQDPSEVMDFLRRLVEWKQMQPRM

SEQ ID NO: 37063 - DNA, 672 bp, Arabidopsis thaliana
  misc_feature (1)..(672): Ceres Seq. ID no. 12482397
  misc_feature (1)..(672): Ortholog of  Ceres SEQ ID NO 12586351 as cited in SEQ ID NO 64028
  misc_feature (1)..(672): Ortholog of  Ceres SEQ ID NO 13584899 as cited in SEQ ID NO 64830
  misc_feature (1)..(672): Ortholog of  Ceres SEQ ID NO 13654441 as cited in SEQ ID NO 67814
  misc_feature (1)..(672): Ortholog of  Ceres SEQ ID NO 13596128 as cited in SEQ ID NO 67831
  misc_feature (1)..(672): Ortholog of  Ceres SEQ ID NO 12585194 as cited in SEQ ID NO 68878
  misc_feature (1)..(672): Ortholog of  Ceres SEQ ID NO 12589186 as cited in SEQ ID NO 0
atgggcaaaaatgaggaagtgaagcttttgggaatatgggcgagccctttcagccgtcggatcgagatggctctcaaactcaaaggtgtaccgtacgaatacttggaggaagatttggagaacaagagctctttgcttcttgctctaagccctattcacaagaagatccctgttcttgttcataatggtaaaaccattatcgagtcgcatgtgatcctcgaatacatcgatgagacttggaaacacaatcccattcttcctcaggatcccttccaaagatccaaggctcgagtcttagctaaacttgttgatgaaaagatagtaaatgtgggatttgcctcactggccaaaacagagaaaggaagagaagttctgattgagcagacaagagaattgattatgtgtctcgaaaaagaactcgccggaaaagattacttcggcggcaagacagtcggattcttggactttgtcgccggaagtatgatcccgttttgtttggagagggcttgggaaggaatgggagtggagatgattacagagaaaaagtttccagaatataacaaatgggtgaagaagctgaaggaggttgagatcgttgttgattgtattcctctaagagagaaacatattgaacacatgaacaatatggcagagaaaattagatctgcttaa

SEQ ID NO: 37064 - protein, 223 aa, Arabidopsis thaliana
  peptide (1)..(223): Ceres Seq. ID no. 12482398
MGKNEEVKLLGIWASPFSRRIEMALKLKGVPYEYLEEDLENKSSLLLALSPIHKKIPVLVHNGKTIIESHVILEYIDETWKHNPILPQDPFQRSKARVLAKLVDEKIVNVGFASLAKTEKGREVLIEQTRELIMCLEKELAGKDYFGGKTVGFLDFVAGSMIPFCLERAWEGMGVEMITEKKFPEYNKWVKKLKEVEIVVDCIPLREKHIEHMNNMAEKIRSA

SEQ ID NO: 37065 - protein, 201 aa, Arabidopsis thaliana
  peptide (1)..(201): Ceres Seq. ID no. 12482399
MALKLKGVPYEYLEEDLENKSSLLLALSPIHKKIPVLVHNGKTIIESHVILEYIDETWKHNPILPQDPFQRSKARVLAKLVDEKIVNVGFASLAKTEKGREVLIEQTRELIMCLEKELAGKDYFGGKTVGFLDFVAGSMIPFCLERAWEGMGVEMITEKKFPEYNKWVKKLKEVEIVVDCIPLREKHIEHMNNMAEKIRSA

SEQ ID NO: 37066 - DNA, 973 bp, Arabidopsis thaliana
  misc_feature (1)..(973): Ceres Seq. ID no. 12330419
  misc_feature (1)..(973): Ortholog of  Ceres SEQ ID NO 12623748 as cited in SEQ ID NO 61143
gaacaggatctgttctataggctcgtacctctgtttccttgatttctaaggagacaggccctaaaccctggttgatgaaccatgaccgtgcggtcagagcgtgattgatggctacgatcgtcttcggacgcatccggtgctgtagaggatcgttactcggcttggtcttccttgccggggtggtcgcacggcggtctgacagaaaacaagagataaggttgaagagtgaagcaaagcttagtaatggcttcaatgcacgaagctctgttctcttctcggcttcttcaagtcaattcttctttttccttccgttgcgctcttccaattatctcttcaccagctgcagtatcttgcgcaatcaaatcgacccagttttttaaacagcgttgtagaaccaaagtgagggacttttctctatcttcactgtcccggagagggttccgtttgccagagctgctgagtacaagtttccggatcccatacctgaattcgccgaagctgagactgagaaatttagggaccatatgttaaacaaactatcaaaaagagatctttttgaagactctgttgatgaaattgttggagtctgcactgagatcttcgagacgttcttgcgcagtgagtatggaggacctggtacactcttggtgatacctttcattgacatggcagatactctcaatgaaagggaattgcctggaggtccacaagccgcccgagcagctattaaatgggctcaggatcatgtagacaaggactggaaggaatggaccggcactgattagtcccctgggagcattaagtataatccgtgagttatttagtttagtagtggggtagcagatgtgtcattgtaaaactctgattactatgtcgtgaagcacttaatctttgatcaaaaactgtttggtgtaaacttgtccaaacgactggaaacaagaaaaagaaaagatggcaaaagctttttattgtc

SEQ ID NO: 37067 - protein, 95 aa, Arabidopsis thaliana
  peptide (1)..(95): Ceres Seq. ID no. 12330420
MASMHEALFSSRLLQVNSSFSFRCALPIISSPAAVSCAIKSTQFFKQRCRTKVRDFSLSSLSRRGFRLPELLSTSFRIPYLNSPKLRLRNLGTIC

SEQ ID NO: 37068 - protein, 92 aa, Arabidopsis thaliana
  peptide (1)..(92): Ceres Seq. ID no. 12330421
MHEALFSSRLLQVNSSFSFRCALPIISSPAAVSCAIKSTQFFKQRCRTKVRDFSLSSLSRRGFRLPELLSTSFRIPYLNSPKLRLRNLGTIC

SEQ ID NO: 37069 - protein, 90 aa, Arabidopsis thaliana
  peptide (1)..(90): Ceres Seq. ID no. 12330422
MATIVFGRIRCCRGSLLGLVFLAGVVARRSDRKQEIRLKSEAKLSNGFNARSSVLFSASSSQFFFFLPLRSSNYLFTSCSILRNQIDPVF

SEQ ID NO: 37070 - protein, 86 aa, Arabidopsis thaliana
  peptide (1)..(86): Ceres Seq. ID no. 12330423
MLNKLSKRDLFEDSVDEIVGVCTEIFETFLRSEYGGPGTLLVIPFIDMADTLNERELPGGPQAARAAIKWAQDHVDKDWKEWTGTD

SEQ ID NO: 37071 - DNA, 649 bp, Arabidopsis thaliana
  misc_feature (1)..(649): Ceres Seq. ID no. 12604901
  misc_feature (1)..(649): Ortholog of  Ceres SEQ ID NO 12635657 as cited in SEQ ID NO 0
  misc_feature (1)..(649): Ortholog of  Ceres SEQ ID NO 12635879 as cited in SEQ ID NO 0
  misc_feature (1)..(649): Ortholog of  Ceres SEQ ID NO 13599649 as cited in SEQ ID NO 0
acacaatcacagaacctaatcttcttctccaatcaatctcagagaaaaaaagaaatggcaacaaaccctaaagtctacttcgacatgaccgtcggtggcaaatccgccggtcgtatcgtgatggagctttacgccgacacaacaccagaaaccgccgagaatttcagagcactctgtaccggagagagaggaatcggtaaacaaggtgatttcacagccgggaatggtaccggaggtgaatctatctatggatcgaagttcaaagacgagaactttatcaagaaacatacaggaccaggtattttgtctatggctaacgctggtgcgaacacgaatggatctcagttttttatttgtactgagaagacttcgtggctcgatgggaaacatgttgtgtttggtcaagttgttgagggattgaatgttgttagagatattgagaaggttggatctgactctggaagaacttctaagcctgttgtcattgctgattgtggtcagatttcttagatctgtctgagattgttgataatgatgatgatgatcttgaggatccaatggtagctttgtgttgtttctctttgatgttttctggtttatgtttttggattttgatatttattgctgttgtgaaactttgagtttggct

SEQ ID NO: 37072 - protein, 169 aa, Arabidopsis thaliana
  peptide (1)..(169): Ceres Seq. ID no. 12604902
TQSQNLIFFSNQSQRKKEMATNPKVYFDMTVGGKSAGRIVMELYADTTPETAENFRALCTGERGIGKQGDFTAGNGTGGESIYGSKFKDENFIKKHTGPGILSMANAGANTNGSQFFICTEKTSWLDGKHVVFGQVVEGLNVVRDIEKVGSDSGRTSKPVVIADCGQIS

SEQ ID NO: 37073 - protein, 151 aa, Arabidopsis thaliana
  peptide (1)..(151): Ceres Seq. ID no. 12604903
MATNPKVYFDMTVGGKSAGRIVMELYADTTPETAENFRALCTGERGIGKQGDFTAGNGTGGESIYGSKFKDENFIKKHTGPGILSMANAGANTNGSQFFICTEKTSWLDGKHVVFGQVVEGLNVVRDIEKVGSDSGRTSKPVVIADCGQIS

SEQ ID NO: 37074 - protein, 141 aa, Arabidopsis thaliana
  peptide (1)..(141): Ceres Seq. ID no. 12604904
MTVGGKSAGRIVMELYADTTPETAENFRALCTGERGIGKQGDFTAGNGTGGESIYGSKFKDENFIKKHTGPGILSMANAGANTNGSQFFICTEKTSWLDGKHVVFGQVVEGLNVVRDIEKVGSDSGRTSKPVVIADCGQIS

SEQ ID NO: 37075 - DNA, 2028 bp, Arabidopsis thaliana
  misc_feature (1)..(2028): Ceres Seq. ID no. 12559842
  misc_feature (1)..(2028): Ortholog of  Ceres SEQ ID NO 14313670 as cited in SEQ ID NO 54491
attgttatttgttttcgttgccactctaacacaatgtgtgggattctcgctgttcttggttgcatcgacaactctcaagctaaacgttctcgtatcatcgaactctctcgcagattgaggcacagaggtcctgattggagtggactccattgttatgaagattgttatcttgcccatgagcgtttagccatcattgaccctacttcaggagaccaacctctctataacgaagacaagaccgtcgctgtcactgtaaatggagagatatacaaccacaagattttgcgtgaaaagcttaagtctcatcagttccgtactggtagtgactgtgaagtgattgcacatctttacgaagaacatggagaggaatttatcgacatgttggatggaatgttcgcgtttgtccttcttgatactcgcgacaaaagttttattgctgcaagggacgctattggtatcactccactttacattggatggggtcttgatggttctgtctggtttgcttcggagatgaaagcgcttagtgatgattgtgaacagtttatgtcttttcctcctggccacatctactcaagtaaacaaggagggcttaggaggtggtacaatcctccgtggtacaatgagcaggttccttcaaccccatatgatcctttagttctgcgcaatgctttcgagaaggctgtaataaagagacttatgactgatgtgccttttggagttctcctatctggaggattggactcgtctctcgttgctgcagtagcattacgccatttggaaaaatcagaagctgctcgtcaatggggttcacaattgcacacgttttgcatcggtttgcagggatcgccagatcttaaagctggcagagaagttgctgactatcttggaacacgccaccacgagtttcagtttacagttcaggacgggatagacgcgatagaggaagtcatttaccatattgagacttatgacgttactacaataagagctagcaccccaatgtttcttatgtccagaaaaattaaatctttaggtgtaaagatggttctttctggggaaggttctgatgaaatactggggggatacttgtacttccataaggctcccaacaagaaagaatttcatgaagaaacatgccgaaagatcaaagctctccaccaatttgattgtttgagagctaacaaatcaacttctgcgtggggtgtcgaagctcgtgtgcctttcctagataaagaatttttaaatgttgcaatgagcatcgatccagagtggaagttgatcaagcctgatctcggaaggatcgagaagtgggtgctacgcaatgcctttgatgatgaagaacgaccttatctaccaaagcacattctatatagacagaaagaacagtttagtgatggagttgggtatagctggatagatggtctgaaagatcatgcaaataaacatgtctctgatactatgctgtcaaacgcaagctttgtcttcccggataacacacctctgacaaaagaagcgtactactacagaaccatcttcgagaagttcttcccgaagagtgctgctagagcgactgtaccaggaggtccaagtatagcttgcagtaccgcgaaagctgtagaatgggatgcaacttggtcaaagaatcttgatccgtcaggccgtgcggctcttggagttcatgttgcagcttatgaagaggataaagcagctgctgctgctaaggctggatcggatttagtagatcctcttcctaagaatggaacataagagaacaacactacaggcattgaggatataagcaaatgttttattcttctacacagagagatcgttatcttctagagggatcaatgaataaaagcttcgtccatttctagctggagattccatggatctccagttagtgcaagtgatacacgttgtctacatttgtacctaagtttctgcattttttgtcgttcttttgtgttagacaagtcttggaccctagatgatacttcagtttcttagacgttaaatttgatg

SEQ ID NO: 37076 - protein, 589 aa, Arabidopsis thaliana
  peptide (1)..(589): Ceres Seq. ID no. 12559843
IVICFRCHSNTMCGILAVLGCIDNSQAKRSRIIELSRRLRHRGPDWSGLHCYEDCYLAHERLAIIDPTSGDQPLYNEDKTVAVTVNGEIYNHKILREKLKSHQFRTGSDCEVIAHLYEEHGEEFIDMLDGMFAFVLLDTRDKSFIAARDAIGITPLYIGWGLDGSVWFASEMKALSDDCEQFMSFPPGHIYSSKQGGLRRWYNPPWYNEQVPSTPYDPLVLRNAFEKAVIKRLMTDVPFGVLLSGGLDSSLVAAVALRHLEKSEAARQWGSQLHTFCIGLQGSPDLKAGREVADYLGTRHHEFQFTVQDGIDAIEEVIYHIETYDVTTIRASTPMFLMSRKIKSLGVKMVLSGEGSDEILGGYLYFHKAPNKKEFHEETCRKIKALHQFDCLRANKSTSAWGVEARVPFLDKEFLNVAMSIDPEWKLIKPDLGRIEKWVLRNAFDDEERPYLPKHILYRQKEQFSDGVGYSWIDGLKDHANKHVSDTMLSNASFVFPDNTPLTKEAYYYRTIFEKFFPKSAARATVPGGPSIACSTAKAVEWDATWSKNLDPSGRAALGVHVAAYEEDKAAAAAKAGSDLVDPLPKNGT

SEQ ID NO: 37077 - protein, 578 aa, Arabidopsis thaliana
  peptide (1)..(578): Ceres Seq. ID no. 12559844
MCGILAVLGCIDNSQAKRSRIIELSRRLRHRGPDWSGLHCYEDCYLAHERLAIIDPTSGDQPLYNEDKTVAVTVNGEIYNHKILREKLKSHQFRTGSDCEVIAHLYEEHGEEFIDMLDGMFAFVLLDTRDKSFIAARDAIGITPLYIGWGLDGSVWFASEMKALSDDCEQFMSFPPGHIYSSKQGGLRRWYNPPWYNEQVPSTPYDPLVLRNAFEKAVIKRLMTDVPFGVLLSGGLDSSLVAAVALRHLEKSEAARQWGSQLHTFCIGLQGSPDLKAGREVADYLGTRHHEFQFTVQDGIDAIEEVIYHIETYDVTTIRASTPMFLMSRKIKSLGVKMVLSGEGSDEILGGYLYFHKAPNKKEFHEETCRKIKALHQFDCLRANKSTSAWGVEARVPFLDKEFLNVAMSIDPEWKLIKPDLGRIEKWVLRNAFDDEERPYLPKHILYRQKEQFSDGVGYSWIDGLKDHANKHVSDTMLSNASFVFPDNTPLTKEAYYYRTIFEKFFPKSAARATVPGGPSIACSTAKAVEWDATWSKNLDPSGRAALGVHVAAYEEDKAAAAAKAGSDLVDPLPKNGT

SEQ ID NO: 37078 - protein, 463 aa, Arabidopsis thaliana
  peptide (1)..(463): Ceres Seq. ID no. 12559845
MLDGMFAFVLLDTRDKSFIAARDAIGITPLYIGWGLDGSVWFASEMKALSDDCEQFMSFPPGHIYSSKQGGLRRWYNPPWYNEQVPSTPYDPLVLRNAFEKAVIKRLMTDVPFGVLLSGGLDSSLVAAVALRHLEKSEAARQWGSQLHTFCIGLQGSPDLKAGREVADYLGTRHHEFQFTVQDGIDAIEEVIYHIETYDVTTIRASTPMFLMSRKIKSLGVKMVLSGEGSDEILGGYLYFHKAPNKKEFHEETCRKIKALHQFDCLRANKSTSAWGVEARVPFLDKEFLNVAMSIDPEWKLIKPDLGRIEKWVLRNAFDDEERPYLPKHILYRQKEQFSDGVGYSWIDGLKDHANKHVSDTMLSNASFVFPDNTPLTKEAYYYRTIFEKFFPKSAARATVPGGPSIACSTAKAVEWDATWSKNLDPSGRAALGVHVAAYEEDKAAAAAKAGSDLVDPLPKNGT

SEQ ID NO: 37079 - DNA, 1254 bp, Arabidopsis thaliana
  misc_feature (1)..(1254): Ceres Seq. ID no. 12329514
  misc_feature (1)..(1254): Ortholog of  Ceres SEQ ID NO 13582332 as cited in SEQ ID NO 59890
atggctcagaatcaacaacctattttccagaccaaacctccagaacaatttgtgcaaatacctatcaacatcgagcgtgattcttcaaccacacgcatgaaccaaaccggaaacacaatccggaaaccaaaccactggccaaccatcaccatctcaatcatcttcgtcatcatcggtcaatccatagcgaaactcctcgaaaacttctactacgacaaaaccaaccgaagcgaatacaacgaaaaccgtcaaaacgatggcgtttggactcaatctcttctccaaactgttggtttccctctccttcttctcccgttcctcatcttcatcaccaagaacaaacgcaaccaccatcaacaacctccgatcacttccgattcaatccacttaaaatccttagctgtgatctacatttgcatcggaattatcatgtccgttcaaggaagactcgcagccatgggaaaactcgagatcccatttggtgttttcactctgatctacacagcacagctcttcttcactcctatcttcgcagctttcattaacaaaatcaaattcaatcgatgggttgttatctctgtgatcttagctatcatcaccggagctcttactctgtcttcttcattcggtggtgagcctgatgaagcagaggagaattacgctagaggctcatgggctgctctgttcgctggaatctgtttcgctcttcttctctgtaacatccaaaacgtcttcgacagttacatcttcaaacgaactgaatcaaccaatcaaaaaccaagctttgcctctgttttcgaagttattatcttctcttctctcgttgctacgatcatctccgtcgtgggtctgcttatagccggtgagcaacacgatttgaagagggaaatgaatggattctcgaaagggaaaggttcttatgtgatggctatggttggtcaagctgtttcgtggcaggtctattgggttgggattgttggacttgtctactctgtttcgagcgtgttgtcgaatgtgatcagtgtcattacgtggccgattgtgtcggttcttgtggtgatcttcttcaatttcatggatgatgagtttgatgccttcaaaggtgttgccttggttactgccgtcttaagcgctgcagcttatttctttaggcttcacaaagacaatcgtatggcttattaggtttggattcttgaatctctaaagaaagtttttttatttcccttgattttttgtgtgtatatctaatcatat

SEQ ID NO: 37080 - protein, 393 aa, Arabidopsis thaliana
  peptide (1)..(393): Ceres Seq. ID no. 12329515
MAQNQQPIFQTKPPEQFVQIPINIERDSSTTRMNQTGNTIRKPNHWPTITISIIFVIIGQSIAKLLENFYYDKTNRSEYNENRQNDGVWTQSLLQTVGFPLLLLPFLIFITKNKRNHHQQPPITSDSIHLKSLAVIYICIGIIMSVQGRLAAMGKLEIPFGVFTLIYTAQLFFTPIFAAFINKIKFNRWVVISVILAIITGALTLSSSFGGEPDEAEENYARGSWAALFAGICFALLLCNIQNVFDSYIFKRTESTNQKPSFASVFEVIIFSSLVATIISVVGLLIAGEQHDLKREMNGFSKGKGSYVMAMVGQAVSWQVYWVGIVGLVYSVSSVLSNVISVITWPIVSVLVVIFFNFMDDEFDAFKGVALVTAVLSAAAYFFRLHKDNRMAY

SEQ ID NO: 37081 - protein, 361 aa, Arabidopsis thaliana
  peptide (1)..(361): Ceres Seq. ID no. 12329516
MNQTGNTIRKPNHWPTITISIIFVIIGQSIAKLLENFYYDKTNRSEYNENRQNDGVWTQSLLQTVGFPLLLLPFLIFITKNKRNHHQQPPITSDSIHLKSLAVIYICIGIIMSVQGRLAAMGKLEIPFGVFTLIYTAQLFFTPIFAAFINKIKFNRWVVISVILAIITGALTLSSSFGGEPDEAEENYARGSWAALFAGICFALLLCNIQNVFDSYIFKRTESTNQKPSFASVFEVIIFSSLVATIISVVGLLIAGEQHDLKREMNGFSKGKGSYVMAMVGQAVSWQVYWVGIVGLVYSVSSVLSNVISVITWPIVSVLVVIFFNFMDDEFDAFKGVALVTAVLSAAAYFFRLHKDNRMAY

SEQ ID NO: 37082 - protein, 250 aa, Arabidopsis thaliana
  peptide (1)..(250): Ceres Seq. ID no. 12329517
MSVQGRLAAMGKLEIPFGVFTLIYTAQLFFTPIFAAFINKIKFNRWVVISVILAIITGALTLSSSFGGEPDEAEENYARGSWAALFAGICFALLLCNIQNVFDSYIFKRTESTNQKPSFASVFEVIIFSSLVATIISVVGLLIAGEQHDLKREMNGFSKGKGSYVMAMVGQAVSWQVYWVGIVGLVYSVSSVLSNVISVITWPIVSVLVVIFFNFMDDEFDAFKGVALVTAVLSAAAYFFRLHKDNRMAY

SEQ ID NO: 37083 - DNA, 662 bp, Arabidopsis thaliana
  misc_feature (1)..(662): Ceres Seq. ID no. 13499574
  misc_feature (1)..(662): Ortholog of  Ceres SEQ ID NO 12623585 as cited in SEQ ID NO 60992
  misc_feature (1)..(662): Ortholog of  Ceres SEQ ID NO 12625545 as cited in SEQ ID NO 63154
ttgtttcttcatcttcctcactctctgcgccgcgtttgcttccatctttctctcgattgtttcctctcaagcgaagcttcttcttcttcgatcttcttcctcgtgtgtggattcgtttctgaaataggatcgaagtaatggccagcaaatctggaagcggtggcctaagagaaccgccgaatgagcaagctgttttgaacatgtatgaaggcaagagatcagagctaagccaaatctactccaacataaccgacctcgagatgcaagtgagcgaacattctctggtcattaacgccattcagcctctcgaccaatcgaggaaatgcttccgcatgataggaggcgttcttgtcgaaagaaccatcaaagaggtactaccagctgtccaacgtaacaaggacggacttgaagaggttgtgaggaagctatacgagacattggagaaaaagaagaaagatcttacagagtttgaagctaagtataagatcaggataacgaaacaagaagataacaaggaaggaggtaacaagaaggaaggtaatgctcaaggtgttcttgttggagctgccagttcaagccagtaaaactctatatttggcagtttgttttactgttgtatctcttttttggatcttatggttaaaagccgtaaactttgctgt

SEQ ID NO: 37084 - protein, 148 aa, Arabidopsis thaliana
  peptide (1)..(148): Ceres Seq. ID no. 13499575
MASKSGSGGLREPPNEQAVLNMYEGKRSELSQIYSNITDLEMQVSEHSLVINAIQPLDQSRKCFRMIGGVLVERTIKEVLPAVQRNKDGLEEVVRKLYETLEKKKKDLTEFEAKYKIRITKQEDNKEGGNKKEGNAQGVLVGAASSSQ

SEQ ID NO: 37085 - protein, 127 aa, Arabidopsis thaliana
  peptide (1)..(127): Ceres Seq. ID no. 13499576
MYEGKRSELSQIYSNITDLEMQVSEHSLVINAIQPLDQSRKCFRMIGGVLVERTIKEVLPAVQRNKDGLEEVVRKLYETLEKKKKDLTEFEAKYKIRITKQEDNKEGGNKKEGNAQGVLVGAASSSQ

SEQ ID NO: 37086 - protein, 107 aa, Arabidopsis thaliana
  peptide (1)..(107): Ceres Seq. ID no. 13499577
MQVSEHSLVINAIQPLDQSRKCFRMIGGVLVERTIKEVLPAVQRNKDGLEEVVRKLYETLEKKKKDLTEFEAKYKIRITKQEDNKEGGNKKEGNAQGVLVGAASSSQ

SEQ ID NO: 37087 - DNA, 1499 bp, Arabidopsis thaliana
  misc_feature (1)..(1499): Ceres Seq. ID no. 13593683
  misc_feature (1)..(1499): Ortholog of  Ceres SEQ ID NO 15176579 as cited in SEQ ID NO 54513
gatctaccttctcagaaagggagctgcatcaatggcgaccaataatgattttggagctttcattgagaaagttacaatctctccaacttctacttcctcgtcgcctccttctctacagggtcttactttcgccattaaagacatttttgatgtggaaggacgcgttaccggttttggtaacccggattggttaaggacacactcggcagctacttctacagctccagtagtttcatctctcttagaagctggtgccacagctttgggtattaccattatggatgaaatggcttacagtataaacggagaaaatgcgcattatgggactccgagaaacccgattgctttcgatagagtgcctgggggatcatcgagtggctcagccgtagctgtagctgctcgtcttgtggatttttctattggaactgataccggagggagtgtacgagttccagcatcttactgtgggattttcggtttccggccatcccacggtgcagtttccactgtcggacttactccaatggctcagagcttcgacacagttggatggtttgctcgggacacagccactttgaaacgtgtaggttgcgttctcctgcagcagcatcacttgaaccccatcgaaccatctcaactgattatcgcggatgactgcttcaagctgtgtagtgtaccgcatgatctcttggtgcagcctctggttggatccgtggaaaaatcgtttggaggcaacactgtagtaaagaaggtgaatcttggagagtacattggacagaatgttccaagccttaaacatttcatgacaagtgacgatgtcactacacaacaagagttctgcattccgtctctcatggccctatcgagttcaatgagattgttacaaagacatgaattcaagataaaccacggtgcatggatctcgtcggtgaagccagagtttggtcctggaatatcagaacgaattgaggaagctatcagaacatccgacgagaagatcgaccattgccggtccgtgaaatctgaactgataacggctctttcaactttgctcggggagaagggtgtgttggtgattccaacggtaccaggtcctccaccgcatctccaagctaatgtggctgcacttgaatctttccgcagcagagccttcagcttgttgtcgatcgcaggcgtttctggattctgtcaggtgagcataccattggggctacacgaaaatcttccggtttcggtatcattggtagctaagtatggctcagacggttttcttctgagtcttgtggattcccttgctgcatttatttgattgacatgtcataaacttaatgcactttgagcatatctattttgctttctgtttattatgtcatcgtagcatatctgaatggttttcttgtcccaaacccaacaatgtattaaataaattgttgtatatgttggacaattgtactatttgtcttttagcgaagtattaatgacaacttaatattaactag

SEQ ID NO: 37088 - protein, 435 aa, Arabidopsis thaliana
  peptide (1)..(435): Ceres Seq. ID no. 13593684
IYLLRKGAASMATNNDFGAFIEKVTISPTSTSSSPPSLQGLTFAIKDIFDVEGRVTGFGNPDWLRTHSAATSTAPVVSSLLEAGATALGITIMDEMAYSINGENAHYGTPRNPIAFDRVPGGSSSGSAVAVAARLVDFSIGTDTGGSVRVPASYCGIFGFRPSHGAVSTVGLTPMAQSFDTVGWFARDTATLKRVGCVLLQQHHLNPIEPSQLIIADDCFKLCSVPHDLLVQPLVGSVEKSFGGNTVVKKVNLGEYIGQNVPSLKHFMTSDDVTTQQEFCIPSLMALSSSMRLLQRHEFKINHGAWISSVKPEFGPGISERIEEAIRTSDEKIDHCRSVKSELITALSTLLGEKGVLVIPTVPGPPPHLQANVAALESFRSRAFSLLSIAGVSGFCQVSIPLGLHENLPVSVSLVAKYGSDGFLLSLVDSLAAFI

SEQ ID NO: 37089 - protein, 425 aa, Arabidopsis thaliana
  peptide (1)..(425): Ceres Seq. ID no. 13593685
MATNNDFGAFIEKVTISPTSTSSSPPSLQGLTFAIKDIFDVEGRVTGFGNPDWLRTHSAATSTAPVVSSLLEAGATALGITIMDEMAYSINGENAHYGTPRNPIAFDRVPGGSSSGSAVAVAARLVDFSIGTDTGGSVRVPASYCGIFGFRPSHGAVSTVGLTPMAQSFDTVGWFARDTATLKRVGCVLLQQHHLNPIEPSQLIIADDCFKLCSVPHDLLVQPLVGSVEKSFGGNTVVKKVNLGEYIGQNVPSLKHFMTSDDVTTQQEFCIPSLMALSSSMRLLQRHEFKINHGAWISSVKPEFGPGISERIEEAIRTSDEKIDHCRSVKSELITALSTLLGEKGVLVIPTVPGPPPHLQANVAALESFRSRAFSLLSIAGVSGFCQVSIPLGLHENLPVSVSLVAKYGSDGFLLSLVDSLAAFI

SEQ ID NO: 37090 - protein, 343 aa, Arabidopsis thaliana
  peptide (1)..(343): Ceres Seq. ID no. 13593686
MDEMAYSINGENAHYGTPRNPIAFDRVPGGSSSGSAVAVAARLVDFSIGTDTGGSVRVPASYCGIFGFRPSHGAVSTVGLTPMAQSFDTVGWFARDTATLKRVGCVLLQQHHLNPIEPSQLIIADDCFKLCSVPHDLLVQPLVGSVEKSFGGNTVVKKVNLGEYIGQNVPSLKHFMTSDDVTTQQEFCIPSLMALSSSMRLLQRHEFKINHGAWISSVKPEFGPGISERIEEAIRTSDEKIDHCRSVKSELITALSTLLGEKGVLVIPTVPGPPPHLQANVAALESFRSRAFSLLSIAGVSGFCQVSIPLGLHENLPVSVSLVAKYGSDGFLLSLVDSLAAFI

SEQ ID NO: 37091 - DNA, 930 bp, Arabidopsis thaliana; identical to SEQ ID NO: 27097
  misc_feature (1)..(930): Ceres Seq. ID no. 12647740
  misc_feature (1)..(930): Ortholog of  Ceres SEQ ID NO 14314442 as cited in SEQ ID NO 52358
  misc_feature (1)..(930): Ortholog of  Ceres SEQ ID NO 12610442 as cited in SEQ ID NO 56281
  misc_feature (1)..(930): Ortholog of  Ceres SEQ ID NO 12610713 as cited in SEQ ID NO 56591
  misc_feature (1)..(930): Ortholog of  Ceres SEQ ID NO 12587345 as cited in SEQ ID NO 62844
  misc_feature (1)..(930): Ortholog of  Ceres SEQ ID NO 13597357 as cited in SEQ ID NO 68961
  misc_feature (1)..(930): Ortholog of  Ceres SEQ ID NO 13587656 as cited in SEQ ID NO 0
  misc_feature (1)..(930): Ortholog of  Ceres SEQ ID NO 14309353 as cited in SEQ ID NO 0
  misc_feature (1)..(930): Ortholog of  Ceres SEQ ID NO 15177686 as cited in SEQ ID NO 0

SEQ ID NO: 37092 - protein, 253 aa, Arabidopsis thaliana; identical to SEQ ID NO: 27098
  peptide (1)..(253): Ceres Seq. ID no. 12647741

SEQ ID NO: 37093 - protein, 205 aa, Arabidopsis thaliana; identical to SEQ ID NO: 27099
  peptide (1)..(205): Ceres Seq. ID no. 12647742

SEQ ID NO: 37094 - protein, 174 aa, Arabidopsis thaliana; identical to SEQ ID NO: 27100
  peptide (1)..(174): Ceres Seq. ID no. 12647743

SEQ ID NO: 37095 - DNA, 740 bp, Arabidopsis thaliana
  misc_feature (1)..(740): Ceres Seq. ID no. 13646106
  misc_feature (1)..(740): Ortholog of  Ceres SEQ ID NO 15172660 as cited in SEQ ID NO 68708
acggcgccaccattaaaatctctcgatctctatctgcgaaatttcacggtgagcttagtattactctcaattgttctcagtaggtatttgaaatggcgacagttccaggacaattgatctgggagatcgtgaagaacaacaactgtttcttggtgaagcagttcggtagaggaaactctaaggttcaattcagcaaggagactaacaacctcaccaacgttcactcttacaagcactctggtcttgcaaacaaaaagactgtgaccatccaggccgctgacaaggaccaagctgttgtgctcgccaccaccaagaccaagaagcagaacaagcctaagctctctgtcaacaagtctatcctcaagaaggaattccccaggatgtcaaaggctgttgctaaccaggtggtggacaactactacaggccggacttgaagaaagctgcacttgctagactcagcgccatcagcaaaggtctcagggttgccaagtccggtgccaagcaaagaaacagacaagcttaagcttcttcgtttcacaatctgttttttttgaagtaaaagattctgttgaacaggttttatgtaagttgttgctttgaagatgttccataatgctattctcctttttcattatccttattataaaggagttagaagtttatcttgttatgcttgatgtttctggtgtgcttgtgcttacattttgttagatccttctatcgaatcaggagctttctc

SEQ ID NO: 37096 - protein, 143 aa, Arabidopsis thaliana [sequence omitted]

SEQ ID NO: 37097 - DNA, 1714 bp, Arabidopsis thaliana
  misc_feature (1)..(1714): Ceres Seq. ID no. 12336512
  misc_feature (1)..(1714): Ortholog of  Ceres SEQ ID NO 13546266 as cited in SEQ ID NO 65659
aatctctctctccctctttcttcctcttctctcattgaaatcgaacgaggatggggaagaagaaatcgaaggaaacggagccggaatctcaaaacgatgaatctcagacaatcttctccactctcttctccggcgaggttgaaagctctggctttgcgagtctcttctccgctgataaccctttccggcgaaaacaacctcaagaaatcaaagagtcgtcaattcctgatgagaagaaaggggataaacgaaatgcagagcaacgaagaaggagaagaagaaacagatttgcctgtgaagacgaagaaatctaaaaaggaaaaaaagcttacagattccggcgacaagaaagagacgatttcggaggctgtagaagaaagtgggttggtttcaaagaggaagaagaggaagagagatgagattgagaacgaatacgagacgaagaagtatggaagcgttgagatgaaagagaagaaggttggtgagaagaggaagaaagctgatgaagtagctgatacaatggtttcaaaggaaggttttgatgatgagagtaagcttcttagaactgttttcgttgggaatttgcctttgaaggttaagaaaaaagtcatcttgaaggagtttagtaaatttggtgaggttgaatctgtgaggatacgctctgtgcctattgttgattcgaagaggacaaggaaaggagctataatgctgaaacaaatcaatgagaaagcttcaagtgttcatgcttatgttgtgtttgaaacagagcaatctgctgcagcttctctggcacataacatgtctctgattgatgggaatcatgtccgcgttgatagagcatgtccgcctcgtaagaaacagaaagggcatgatgatactcatttgtatgatcctaagaggacagtctttatgggtaatctccctttcgatgtgaaggacgaggaagtgtatcaactgtttacgggtaagagtaatctggagaacagtatagaagctgttcgtgtcattagagatcctcacttgaacattgggaaaggaatagcttacgtcttgtttaaaacacgggaagctgcaaatctcgtactcaagaaaggatacttgaagcttagagaaagagagttacggatttctcgagtcaaacctgatacgccatcaaagagaaagagcaatccgtctgaagcttactcgccggcccagaaaagactgcagaaggacaaagtggtcacaccaactccaacagggaaggctaatctttcatatcaaggtgtacgagcttcaagatctggtgatgataagaaaacaccttatcagaaaagctccgcgcagacaaagatgagacctagaggtagcagcagcaatgacaacaaaaaatctgggaataatagtgcttcaaaggaaagaagtcagaagcgaccagctgttgcagcaagaaaggcgaaagcaaacgcaaaaggttcaaaagagagcggtggtaagcggtttgcagggacaaagcgtaaacaagaaaaccggacgcctgaaatcttntctaagaagaaaaaaacaaaacggttttagncggtttctttcaaccataatggtgaacctctttcttcttccttagttttgatactagtagtcgttttgtattgttctcttatatcaatcaatgatgatatactgtaatgttgcaacaattatgttttcgtgcaagtttaaaaggaaagctattttg

SEQ ID NO: 37098 - protein, 518 aa, Arabidopsis thaliana
  peptide (1)..(518): Ceres Seq. ID no. 12336513
  misc_feature (509)..(509): Xaa is any aa, unknown or other
NLSLPLSSSSLIEIERGWGRRNRRKRSRNLKTMNLRQSSPLSSPARLKALALRVSSPLITLSGENNLKKSKSRQFLMRRKGINEMQSNEEGEEETDLPVKTKKSKKEKKLTDSGDKKETISEAVEESGLVSKRKKRKRDEIENEYETKKYGSVEMKEKKVGEKRKKADEVADTMVSKEGFDDESKLLRTVFVGNLPLKVKKKVILKEFSKFGEVESVRIRSVPIVDSKRTRKGAIMLKQINEKASSVHAYVVFETEQSAAASLAHNMSLIDGNHVRVDRACPPRKKQKGHDDTHLYDPKRTVFMGNLPFDVKDEEVYQLFTGKSNLENSIEAVRVIRDPHLNIGKGIAYVLFKTREAANLVLKKGYLKLRERELRISRVKPDTPSKRKSNPSEAYSPAQKRLQKDKVVTPTPTGKANLSYQGVRASRSGDDKKTPYQKSSAQTKMRPRGSSSNDNKKSGNNSASKERSQKRPAVAARKAKANAKGSKESGGKRFAGTKRKQENRTPEIXSKKKKTKRF

SEQ ID NO: 37099 - protein, 486 aa, Arabidopsis thaliana
  peptide (1)..(486): Ceres Seq. ID no. 12336514
  misc_feature (477)..(477): Xaa is any aa, unknown or other
MNLRQSSPLSSPARLKALALRVSSPLITLSGENNLKKSKSRQFLMRRKGINEMQSNEEGEEETDLPVKTKKSKKEKKLTDSGDKKETISEAVEESGLVSKRKKRKRDEIENEYETKKYGSVEMKEKKVGEKRKKADEVADTMVSKEGFDDESKLLRTVFVGNLPLKVKKKVILKEFSKFGEVESVRIRSVPIVDSKRTRKGAIMLKQINEKASSVHAYVVFETEQSAAASLAHNMSLIDGNHVRVDRACPPRKKQKGHDDTHLYDPKRTVFMGNLPFDVKDEEVYQLFTGKSNLENSIEAVRVIRDPHLNIGKGIAYVLFKTREAANLVLKKGYLKLRERELRISRVKPDTPSKRKSNPSEAYSPAQKRLQKDKVVTPTPTGKANLSYQGVRASRSGDDKKTPYQKSSAQTKMRPRGSSSNDNKKSGNNSASKERSQKRPAVAARKAKANAKGSKESGGKRFAGTKRKQENRTPEIXSKKKKTKRF

SEQ ID NO: 37100 - protein, 442 aa, Arabidopsis thaliana
  peptide (1)..(442): Ceres Seq. ID no. 12336515
  misc_feature (433)..(433): Xaa is any aa, unknown or other
MRRKGINEMQSNEEGEEETDLPVKTKKSKKEKKLTDSGDKKETISEAVEESGLVSKRKKRKRDEIENEYETKKYGSVEMKEKKVGEKRKKADEVADTMVSKEGFDDESKLLRTVFVGNLPLKVKKKVILKEFSKFGEVESVRIRSVPIVDSKRTRKGAIMLKQINEKASSVHAYVVFETEQSAAASLAHNMSLIDGNHVRVDRACPPRKKQKGHDDTHLYDPKRTVFMGNLPFDVKDEEVYQLFTGKSNLENSIEAVRVIRDPHLNIGKGIAYVLFKTREAANLVLKKGYLKLRERELRISRVKPDTPSKRKSNPSEAYSPAQKRLQKDKVVTPTPTGKANLSYQGVRASRSGDDKKTPYQKSSAQTKMRPRGSSSNDNKKSGNNSASKERSQKRPAVAARKAKANAKGSKESGGKRFAGTKRKQENRTPEIXSKKKKTKRF

SEQ ID NO: 37101 - DNA, 1123 bp, Arabidopsis thaliana
  misc_feature (1)..(1123): Ceres Seq. ID no. 12336416
  misc_feature (1)..(1123): Ortholog of  Ceres SEQ ID NO 14313796 as cited in SEQ ID NO 54544
aaagttctcagctaatctaaattcctctgttcattttctgggttgtgcgatagtttctgaacagagttaggtttctttgttcatgtctgatttcgcaaaactctgtttgccataatttgtaggtggtttaccagttcatattcttcgtaatcacggctcttttcaaatttgatcaagtcactgactttgctggtagcacaaacttcgttatacttgctgtgttaacacttgttctcaaagcctcttggcattttcgacagatagtattgactttgctagttgtggtatggggtcttcgcttggggattttccttctaatgaggatcttgcaatggggggaagatcgtcgctttgatgaacagcgtggaaatatagtgagactaatcattttctggactcttcaggctgtgtgggtttggacggttagcttacctttaacacttgttaatgcaagtgatggtggtggatctcttaaacccgcagatgttatcggttggactatgtgggttttcggtttcttgattgaagctgcagctgatcaacagaagctatcattcaaaaactctcctgaaaacagaggaaaatggtgtgatgttggagtctggaagtattcaagacatccaaactacttcggtgagatgttactgtggtggggaatctttgtggctgcatcgcctgtgcttgaaggtgcagagtatcttgtcatattcggaccactctttctcactttgctacttctattcgtcagcggcataccattactcgaggcatcggctgacaaaaaacatggaaactcaggagcttacagatcctacaagaagacaacaagtcctctgattctgttcccaagaggagtgtatgggaacttaccaggatggttcaagacggtctttctcttcgagtttccattttacagccgaaatctccctcaagagttagggtagactccaaaacagcaaagagaaagaagtaaaagatgactgatttgtgatactcatatttgagttattgttcttcacaacactctttgataaaatttgtgtaaaaaattgcccgtaagaaactgaatttgtttgaaatattggacagtcttgacagattatctcagttgtatttggttctc

SEQ ID NO: 37102 - protein, 208 aa, Arabidopsis thaliana
  peptide (1)..(208): Ceres Seq. ID no. 12336417
MRILQWGEDRRFDEQRGNIVRLIIFWTLQAVWVWTVSLPLTLVNASDGGGSLKPADVIGWTMWVFGFLIEAAADQQKLSFKNSPENRGKWCDVGVWKYSRHPNYFGEMLLWWGIFVAASPVLEGAEYLVIFGPLFLTLLLLFVSGIPLLEASADKKHGNSGAYRSYKKTTSPLILFPRGVYGNLPGWFKTVFLFEFPFYSRNLPQELG

SEQ ID NO: 37103 - protein, 147 aa, Arabidopsis thaliana
  peptide (1)..(147): Ceres Seq. ID no. 12336418
MWVFGFLIEAAADQQKLSFKNSPENRGKWCDVGVWKYSRHPNYFGEMLLWWGIFVAASPVLEGAEYLVIFGPLFLTLLLLFVSGIPLLEASADKKHGNSGAYRSYKKTTSPLILFPRGVYGNLPGWFKTVFLFEFPFYSRNLPQELG

SEQ ID NO: 37104 - DNA, 741 bp, Arabidopsis thaliana
  misc_feature (1)..(741): Ceres Seq. ID no. 12603380
  misc_feature (1)..(741): Ortholog of  Ceres SEQ ID NO 15180555 as cited in SEQ ID NO 1214
aatcaatctatcttttttttaaccattgcgtttctttttttccctttccgagcagatctgagccgaaggttaactacatgaccggcgctgagaacggcgtgagaatgacgtcaccagagacgtcttcaacatcttccctcgccaccacaagtgtccacgtaagcgctctcgacggactcgtgaacgtgaactctctcttcaccatcgccgtcttcgttggtctttccttagcgactccaggacaacacagcctcgaacaacgatccagctgcgacgcaagtgctgacgtcgccaagaagctactggtcttcgaagtcgtctccttcagcttcttcctcttctcctctcttgtagctcagggtcttaagcttgccttaaaccttcttaatagcaaagacgtcaacgagattttcagagctcacatcaatatcaaggttttgagatggggaatgatggcttctgctgtcggatctgtaatgggctgtctcttcttgatgctctctatggttaatgtgattcagatccgtcttggtttgctctcttgcggcagcaaatcggcggctcaagctgttgcaacgctcgtcactctggtttcctctgctctgctgatttacatctctaccgccatttacgctttctggcattgatgctatgtcaaaattggataatgtccatggctttgttttgattagccaatgtgtaatttcatcatcaatgccttccaatctagttttttgttcc

SEQ ID NO: 37105 - protein, 214 aa, Arabidopsis thaliana
  peptide (1)..(214): Ceres Seq. ID no. 12603381
SIYLFFNHCVSFFPFPSRSEPKVNYMTGAENGVRMTSPETSSTSSLATTSVHVSALDGLVNVNSLFTIAVFVGLSLATPGQHSLEQRSSCDASADVAKKLLVFEVVSFSFFLFSSLVAQGLKLALNLLNSKDVNEIFRAHINIKVLRWGMMASAVGSVMGCLFLMLSMVNVIQIRLGLLSCGSKSAAQAVATLVTLVSSALLIYISTAIYAFWH

SEQ ID NO: 37106 - protein, 189 aa, Arabidopsis thaliana
  peptide (1)..(189): Ceres Seq. ID no. 12603382
MTGAENGVRMTSPETSSTSSLATTSVHVSALDGLVNVNSLFTIAVFVGLSLATPGQHSLEQRSSCDASADVAKKLLVFEVVSFSFFLFSSLVAQGLKLALNLLNSKDVNEIFRAHINIKVLRWGMMASAVGSVMGCLFLMLSMVNVIQIRLGLLSCGSKSAAQAVATLVTLVSSALLIYISTAIYAFWH

SEQ ID NO: 37107 - protein, 180 aa, Arabidopsis thaliana
  peptide (1)..(180): Ceres Seq. ID no. 12603383
MTSPETSSTSSLATTSVHVSALDGLVNVNSLFTIAVFVGLSLATPGQHSLEQRSSCDASADVAKKLLVFEVVSFSFFLFSSLVAQGLKLALNLLNSKDVNEIFRAHINIKVLRWGMMASAVGSVMGCLFLMLSMVNVIQIRLGLLSCGSKSAAQAVATLVTLVSSALLIYISTAIYAFWH

SEQ ID NO: 37108 - DNA, 838 bp, Arabidopsis thaliana
  misc_feature (1)..(838): Ceres Seq. ID no. 13613583
  misc_feature (1)..(838): Ortholog of  Ceres SEQ ID NO 13598367 as cited in SEQ ID NO 62113
acacaactgcaaaaccctaatctcaagttttctgtcgattttgatcttttggttgtaattttgtttgtgaaagtttcggacttttggaatttgaggtagaagagatgaacagaggaagaaggaatctgaaacaagcggcgtcggaccaggatttcacgcttgaggaatgtcagagcattgcccaagtcgtctctctcagaggttccaatcaaattgagataatggatgcaaaaggagagaactcattagctttgtttccagccaagtttcgtgagagcatgtggatcagacgaggaagctttgtagtgattgaccatacaggaaaggaaaaggctcaagagtctggtagcaaagttacatctattgtatgtaaagttctattctttgagcaagtccgtcttcttcaaaagtctccggaatggccagaaatcttcaaagatactagaccgattccagctgagaaaagctcacccattgaacagcatgaagatgacggtgaagttgattcgagtgatgatgatgatggtatgcctccattgcaagcaaacacaaacagattgagaccgtttggggtgaagtgtgatgcagaaactgattcagggtcagattccgattcatagaaacatccggtacatttcttttcgcagcctcaacttaatttctcaatataggggatttatagttgcaagctgtattttataaacagtatgtaaccaacacagatctgctgataaagcagagttttgctttgcactaaatcgataattgatttatataacatgcttctcattctcttcttgcaattcttgataagtcttaataaggagtcagaaaagtt

SEQ ID NO: 37109 - protein, 171 aa, Arabidopsis thaliana
  peptide (1)..(171): Ceres Seq. ID no. 13613584
MNRGRRNLKQAASDQDFTLEECQSIAQVVSLRGSNQIEIMDAKGENSLALFPAKFRESMWIRRGSFVVIDHTGKEKAQESGSKVTSIVCKVLFFEQVRLLQKSPEWPEIFKDTRPIPAEKSSPIEQHEDDGEVDSSDDDDGMPPLQANTNRLRPFGVKCDAETDSGSDSDS

SEQ ID NO: 37110 - protein, 132 aa, Arabidopsis thaliana
  peptide (1)..(132): Ceres Seq. ID no. 13613585
MDAKGENSLALFPAKFRESMWIRRGSFVVIDHTGKEKAQESGSKVTSIVCKVLFFEQVRLLQKSPEWPEIFKDTRPIPAEKSSPIEQHEDDGEVDSSDDDDGMPPLQANTNRLRPFGVKCDAETDSGSDSDS

SEQ ID NO: 37111 - protein, 113 aa, Arabidopsis thaliana
  peptide (1)..(113): Ceres Seq. ID no. 13613586
MWIRRGSFVVIDHTGKEKAQESGSKVTSIVCKVLFFEQVRLLQKSPEWPEIFKDTRPIPAEKSSPIEQHEDDGEVDSSDDDDGMPPLQANTNRLRPFGVKCDAETDSGSDSDS

SEQ ID NO: 37112 - DNA, 1211 bp, Arabidopsis thaliana
  misc_feature (1)..(1211): Ceres Seq. ID no. 13593431
  misc_feature (1)..(1211): Ortholog of  Ceres SEQ ID NO 12609146 as cited in SEQ ID NO 52118
  misc_feature (1)..(1211): Ortholog of  Ceres SEQ ID NO 14303397 as cited in SEQ ID NO 54614
  misc_feature (1)..(1211): Ortholog of  Ceres SEQ ID NO 13594056 as cited in SEQ ID NO 55691
  misc_feature (1)..(1211): Ortholog of  Ceres SEQ ID NO 14314186 as cited in SEQ ID NO 57457
  misc_feature (1)..(1211): Ortholog of  Ceres SEQ ID NO 13638136 as cited in SEQ ID NO 58644
  misc_feature (1)..(1211): Ortholog of  Ceres SEQ ID NO 13596868 as cited in SEQ ID NO 62806
  misc_feature (1)..(1211): Ortholog of  Ceres SEQ ID NO 13595885 as cited in SEQ ID NO 69265
  misc_feature (1)..(1211): Ortholog of  Ceres SEQ ID NO 12566239 as cited in SEQ ID NO 0
  misc_feature (1)..(1211): Ortholog of  Ceres SEQ ID NO 13599119 as cited in SEQ ID NO 0
  misc_feature (1)..(1211): Ortholog of  Ceres SEQ ID NO 14308987 as cited in SEQ ID NO 0
atttcctcattcgcatcaacgaagtcaaaaccatttataaacccaaaatcttcttcgatctctccataattctcgtttgcgtcattcattcatcacatatcaaccaccacagagacagaggaatagtctcaaaactttctcagaaatggcaggcagtaatattctccataagattaagttgaaggctgggttctgtggatctgctcctgacatgggaagaggcaaaagcaagatgtggaagaacatcacccacggttttcactgtgtgaagggcaagtccagccatccgatggaggactatgtagtgtctgaattcaagaaacttgaaggtcatgaattgggtttgtttgctatctttgatggtcacttggggcatgatgtggctaaatacttgcagactaatctctttgacaacattcttaaagagaaggatttttggactgacacagagaatgctataaggaatgcctacagatcaacagatgccgtgatattgcagcagtcccttaagcttggtaaaggcggatcaacagctgtaacgggaattctaattgatggtaaaaagctagttgttgctaatgttggagactccagagcagtgatgtctaagaatggtgttgcgcatcagctatctgtcgatcatgaaccaagcaaggagaaaaaagaaatagagagccgaggtggctttgtgtcaaatattccaggggatgttccacgagtggatggacagttagcggttgcaagagcatttggagataagagcttaaagttacatctgagctcagaaccggacataacacaccagacaattgatgatcacactgaattcatccttttcgcaagcgatggtatttggaaagtattatcaaaccaagaagcggttgatgctatcaagagtatcaaagatcctcatgcagctgcaaagcacttgatagaggaagctatatctaggaagagcaaagatgacatctcatgtatcgttgtaaagttccactaatcttctcttcttcttatcaaaagctattttgtctataagttaccatcaagttgcaagatagagaaatatatgctcaagctgtgtctgtaaaaacccagtaatgaggtttcccagaagatgtaatatattatcgaaatcgcaacagccttaagatacaaaagaaagaactgaaattaaaaaaatgaaataaaacaaatcgcaacagccttaagat

SEQ ID NO: 37113 - protein, 283 aa, Arabidopsis thaliana
  peptide (1)..(283): Ceres Seq. ID no. 13593432
MAGSNILHKIKLKAGFCGSAPDMGRGKSKMWKNITHGFHCVKGKSSHPMEDYVVSEFKKLEGHELGLFAIFDGHLGHDVAKYLQTNLFDNILKEKDFWTDTENAIRNAYRSTDAVILQQSLKLGKGGSTAVTGILIDGKKLVVANVGDSRAVMSKNGVAHQLSVDHEPSKEKKEIESRGGFVSNIPGDVPRVDGQLAVARAFGDKSLKLHLSSEPDITHQTIDDHTEFILFASDGIWKVLSNQEAVDAIKSIKDPHAAAKHLIEEAISRKSKDDISCIVVKFH

SEQ ID NO: 37114 - protein, 261 aa, Arabidopsis thaliana
  peptide (1)..(261): Ceres Seq. ID no. 13593433
MGRGKSKMWKNITHGFHCVKGKSSHPMEDYVVSEFKKLEGHELGLFAIFDGHLGHDVAKYLQTNLFDNILKEKDFWTDTENAIRNAYRSTDAVILQQSLKLGKGGSTAVTGILIDGKKLVVANVGDSRAVMSKNGVAHQLSVDHEPSKEKKEIESRGGFVSNIPGDVPRVDGQLAVARAFGDKSLKLHLSSEPDITHQTIDDHTEFILFASDGIWKVLSNQEAVDAIKSIKDPHAAAKHLIEEAISRKSKDDISCIVVKFH

SEQ ID NO: 37115 - protein, 254 aa, Arabidopsis thaliana
  peptide (1)..(254): Ceres Seq. ID no. 13593434
MWKNITHGFHCVKGKSSHPMEDYVVSEFKKLEGHELGLFAIFDGHLGHDVAKYLQTNLFDNILKEKDFWTDTENAIRNAYRSTDAVILQQSLKLGKGGSTAVTGILIDGKKLVVANVGDSRAVMSKNGVAHQLSVDHEPSKEKKEIESRGGFVSNIPGDVPRVDGQLAVARAFGDKSLKLHLSSEPDITHQTIDDHTEFILFASDGIWKVLSNQEAVDAIKSIKDPHAAAKHLIEEAISRKSKDDISCIVVKFH

SEQ ID NO: 37116 - DNA, 905 bp, Arabidopsis thaliana
  misc_feature (1)..(905): Ceres Seq. ID no. 13593425
  misc_feature (1)..(905): Ortholog of  Ceres SEQ ID NO 12597207 as cited in SEQ ID NO 62146
atatataaagtcgccattgaagtgaagctgagatcttttcgaagagcggaagctaaggagaggcgaattcgaatcgagaagatggtgtctggctcagggatatgttcaaagcgtgtcgttgttgacgcacgtcaccatatgtgtggtcgtcttgcttcgatcatagctaaagagttgctcaatggacagagtgttgttgttgtccgatgtgaggagatttgtttgtctggtggtttggttcgtcagaagatgaagtacatgaggtttcttaggaaacgcatgaacactaaaccttctcatggtcctattcatttccgtgctccgtctaagatcttctggcgtaccgttcgtgggatgattccacacaagaccaagcgtggtgctgctgctcttgcacgtttgaaggtgtttgagggagtaccacctccttatgacaaggtcaagagaatggtcattcctgatgctctcaaggtgttgaggcttcaggctggtcacaagtactgcttgttgggacgtttgtcttctgaagttggctggaaccattacgataccatcaaggagcttgaggtgaagagaaaggagaggtcacaagctttgtatgagcgtaagaagcaactcaccaagctcagggcaaaggccgagaaggttgcagaggagaaacttggatcccagctcgatgttcttgcatcgatcaagtactgaagaaaatcagcatctatcttttggtttaactcttgttttggtttttatctattcagattttgttttcttccttgtatcactgttgaagtttatcacctcatttcagttttatttatcagttgatacttcaatccttagggatgagctctacaaaaaaaaaaaaaaaaatatcgataccgtcgacctcgagggggggcccggta

SEQ ID NO: 37117 - protein, 233 aa, Arabidopsis thaliana
  peptide (1)..(233): Ceres Seq. ID no. 13593426
IYKVAIEVKLRSFRRAEAKERRIRIEKMVSGSGICSKRVVVDARHHMCGRLASIIAKELLNGQSVVVVRCEEICLSGGLVRQKMKYMRFLRKRMNTKPSHGPIHFRAPSKIFWRTVRGMIPHKTKRGAAALARLKVFEGVPPPYDKVKRMVIPDALKVLRLQAGHKYCLLGRLSSEVGWNHYDTIKELEVKRKERSQALYERKKQLTKLRAKAEKVAEEKLGSQLDVLASIKY

SEQ ID NO: 37118 - protein, 206 aa, Arabidopsis thaliana [sequence omitted]

SEQ ID NO: 37119 - protein, 187 aa, Arabidopsis thaliana
  peptide (1)..(187): Ceres Seq. ID no. 13593428
MCGRLASIIAKELLNGQSVVVVRCEEICLSGGLVRQKMKYMRFLRKRMNTKPSHGPIHFRAPSKIFWRTVRGMIPHKTKRGAAALARLKVFEGVPPPYDKVKRMVIPDALKVLRLQAGHKYCLLGRLSSEVGWNHYDTIKELEVKRKERSQALYERKKQLTKLRAKAEKVAEEKLGSQLDVLASIKY

SEQ ID NO: 37120 - DNA, 1338 bp, Arabidopsis thaliana
  misc_feature (1)..(1338): Ceres Seq. ID no. 12397162
  misc_feature (1)..(1338): Ortholog of  Ceres SEQ ID NO 12336358 as cited in SEQ ID NO 20733
atggcgacctaaattttctaattccagaaagtaagcaactttaagcttcctcctcctctttttcaattacattaccattttttggtgtagctttttaaatcagtgcatcagaatcgaatctcacaccttttttgttccttcctcttaacccatcttttgatttcacaaaactccagatctgactgatttcatcgaagaaacaaatccgtgggtcattagaaaaatccgattttttgattaaaagatgtggtcggtgatgggtttagtgagacgtacggctatgtcctccaccgtgaataaagcttctccggttaggtctttgcttggtgggtttagatgtctcaacgttgagtctaaggaagaagatgagaaaaaggatatgactgtgttagaagctaagaagttaatgagattagtgaatgttgaagatatgaagaagaagcttattggtatgggtgataaagaaatggttacttacactacacttattgaagcatctcaaggtttaggtatcgctagatctcttgatgaagctcatgcttttgctcgtgttcttgatgatgctggtgttattttgatctttcgtgataaagtctatcttcatcctcataaggtggtggatttgattagaaaggcagtgcctttaggtttgaatccagatgatgagttgattagagaagagtttgataagatgagaagtatgaaggaagagattgatgtgttagctcatcaacaagtgaggaagattctatggggtggtcttggttactcagtggttcaaattggaatctttgttaggctaactttttgggagttttcttgggatgtgatggaaccaataacgtttttcactacagctactgggattattgtgggttatgcttatttcttgatgacttctagagatccaacgtatcaagatttcatgaaaaggttgtttctttccaggcagaggaagttgcttaagagtcataagtttgatgctgagaggtttaaagaactggagaacaagtggaagataacgtcttgctcttcttcttcgtgccacgctaatgcatcgattcggaatcgtgttggtgttgatcttgatttggaggattctttgcagagtcatcacagagattgattggttctaaccatttttcacttttgatgatattacttaaccagattttcttctctctggaggttgatcaagtttgattatttggtgttgattgatccaaagagttggagtagtcatggtgatttttatttgataatcttgagctactcttatttaaatcagctcatgtgttaatcttttctatggttaaggattttgacggattataatag

SEQ ID NO: 37121 - protein, 293 aa, Arabidopsis thaliana
  peptide (1)..(293): Ceres Seq. ID no. 12397163
MWSVMGLVRRTAMSSTVNKASPVRSLLGGFRCLNVESKEEDEKKDMTVLEAKKLMRLVNVEDMKKKLIGMGDKEMVTYTTLIEASQGLGIARSLDEAHAFARVLDDAGVILIFRDKVYLHPHKVVDLIRKAVPLGLNPDDELIREEFDKMRSMKEEIDVLAHQQVRKILWGGLGYSVVQIGIFVRLTFWEFSWDVMEPITFFTTATGIIVGYAYFLMTSRDPTYQDFMKRLFLSRQRKLLKSHKFDAERFKELENKWKITSCSSSSCHANASIRNRVGVDLDLEDSLQSHHRD

SEQ ID NO: 37122 - protein, 289 aa, Arabidopsis thaliana
  peptide (1)..(289): Ceres Seq. ID no. 12397164
MGLVRRTAMSSTVNKASPVRSLLGGFRCLNVESKEEDEKKDMTVLEAKKLMRLVNVEDMKKKLIGMGDKEMVTYTTLIEASQGLGIARSLDEAHAFARVLDDAGVILIFRDKVYLHPHKVVDLIRKAVPLGLNPDDELIREEFDKMRSMKEEIDVLAHQQVRKILWGGLGYSVVQIGIFVRLTFWEFSWDVMEPITFFTTATGIIVGYAYFLMTSRDPTYQDFMKRLFLSRQRKLLKSHKFDAERFKELENKWKITSCSSSSCHANASIRNRVGVDLDLEDSLQSHHRD

SEQ ID NO: 37123 - protein, 281 aa, Arabidopsis thaliana
  peptide (1)..(281): Ceres Seq. ID no. 12397165
MSSTVNKASPVRSLLGGFRCLNVESKEEDEKKDMTVLEAKKLMRLVNVEDMKKKLIGMGDKEMVTYTTLIEASQGLGIARSLDEAHAFARVLDDAGVILIFRDKVYLHPHKVVDLIRKAVPLGLNPDDELIREEFDKMRSMKEEIDVLAHQQVRKILWGGLGYSVVQIGIFVRLTFWEFSWDVMEPITFFTTATGIIVGYAYFLMTSRDPTYQDFMKRLFLSRQRKLLKSHKFDAERFKELENKWKITSCSSSSCHANASIRNRVGVDLDLEDSLQSHHRD

SEQ ID NO: 37124 - DNA, 903 bp, Arabidopsis thaliana
  misc_feature (1)..(903): Ceres Seq. ID no. 13592914
  misc_feature (1)..(903): Ortholog of  Ceres SEQ ID NO 12626248 as cited in SEQ ID NO 65768
gcacacagttctcagataaatactaaactcactgttaaaactttctcaacaaagcttcctgtttagatacaaatggcatctgctctcgctcttaagagactcctatcatcctccatcgctccacgttcccgtagtgttcttcgtccagctgtttcctctcgcctcttcaacaccaacgccgttaggagctacgacgacgacggcgaaaatggagacggcgttgatttatatcgccgctctgttcctcgccgccgtggtgatttcttctcagatgtgtttgatccgttttcgccgacgaggagcgttagtcaagtgctgaatctgatggaccagttcatggagaatcctctgttatcagctactcgtggcatgggagcttcaggagctcgtcgtggttgggatataaaagagaaagacgatgctctgtacctgagaatcgacatgcctgggctgagcagagaggatgtgaagctggctttggagcaggacactctggtgattagaggagaaggaaaaaacgaggaagatggtggcgaggaaggagagagcggtaatcggagattcacaagcaggattggattaccggataagatttacaagatcgatgagattaaggcggagatgaagaacggagtgttgaaagttgtgatcccgaagatgaaagaacaagagagaaatgatgttcgtcagatcgagatcaactaaaaacgtcgacgtttttttctgttctagttatgttgataggtctttgaataagatgtgtgtgtagtttggcacggtcgatgttgagtcatgtagtctctaaagactaaaaggttatatgtttctttcttgagacggtggttttttgtcttgcttaaaccaaaatttgcattccaaatcaaagcactaattaaataaaac

SEQ ID NO: 37125 - protein, 210 aa, Arabidopsis thaliana
  peptide (1)..(210): Ceres Seq. ID no. 13592915
MASALALKRLLSSSIAPRSRSVLRPAVSSRLFNTNAVRSYDDDGENGDGVDLYRRSVPRRRGDFFSDVFDPFSPTRSVSQVLNLMDQFMENPLLSATRGMGASGARRGWDIKEKDDALYLRIDMPGLSREDVKLALEQDTLVIRGEGKNEEDGGEEGESGNRRFTSRIGLPDKIYKIDEIKAEMKNGVLKVVIPKMKEQERNDVRQIEIN

SEQ ID NO: 37126 - protein, 126 aa, Arabidopsis thaliana
  peptide (1)..(126): Ceres Seq. ID no. 13592916
MDQFMENPLLSATRGMGASGARRGWDIKEKDDALYLRIDMPGLSREDVKLALEQDTLVIRGEGKNEEDGGEEGESGNRRFTSRIGLPDKIYKIDEIKAEMKNGVLKVVIPKMKEQERNDVRQIEIN

SEQ ID NO: 37127 - protein, 122 aa, Arabidopsis thaliana
  peptide (1)..(122): Ceres Seq. ID no. 13592917
MENPLLSATRGMGASGARRGWDIKEKDDALYLRIDMPGLSREDVKLALEQDTLVIRGEGKNEEDGGEEGESGNRRFTSRIGLPDKIYKIDEIKAEMKNGVLKVVIPKMKEQERNDVRQIEIN

SEQ ID NO: 37128 - DNA, 1188 bp, Arabidopsis thaliana
  misc_feature (1)..(1188): Ceres Seq. ID no. 12336419
  misc_feature (1)..(1188): Ortholog of  Ceres SEQ ID NO 15173696 as cited in SEQ ID NO 59972
ctttcgtgtatggttccgggaaggaaaaggggaagtggattgttttcatcggcgataagtctcttctcctctgggattgaggttggtggtgtgaggtaaagcttcggtagttagagatgaatgcgtccggcttaactgttactccgcccagatttcactttcgatggcgttctgatcgttttggtacatctcagagaagctctcaagcttttactgttcttagcaaattgaataatcgaaattccgcttggcctgttcttaaaagttctcgtttggcgcttcctacacaaagaagaaatgctatgatcactcgtgccatgagtgcttcctttggtgatatggcagacgattcagctgctatcttccctcggatcaatgtcaaagacccatataaacggcttgggataagccggatggcctcagaggatgagattcaaggagcgaggaactttctcattcagcaatacgcagggcacaaacccagtgttgatgcaatcgaatcagctcatgacaagattatcatgcagaagtttcatgagaggaaaaaccccaagattgacatatcgaaaaaggttcgccaagtgaggcagtccaaagttgtcaactttgttttcgagagattccaaactcctcccaatgcagtccttgtcaaaacagcagtcacgtttgcagttcttggcgttctaaccgttctgttcccgacagaagaaggaccgaccttgcaggttttgttatcactaatagctaccttttacttcatccaccaaaggctccagaagaagctctggactttcctttacggagcgggagctttcatcttctcgtggctggttgggactttcttgatggtatctgtgatcccaccgttcatcaaaggaccaagaggttttgaagtcatgtcttcgctcctaagctatgttttgctttgggtcgcttcgagttacctccggtagcgtgctagcttttttcttttccccgtcttttgggccagaaattcaagtgttatctcggatatatgaaaacacacgaacagagaaaaaatgcatcattttcatgtgacagagagagagagagagagagatatgatttgtggtcttggagttgttatttcacggagacctcattaactttcaaagctcagtttccaagttgtggctacaaacaaagaatagtaagagttgattacgc

SEQ ID NO: 37129 - protein, 278 aa, Arabidopsis thaliana
  peptide (1)..(278): Ceres Seq. ID no. 12336420
MNASGLTVTPPRFHFRWRSDRFGTSQRSSQAFTVLSKLNNRNSAWPVLKSSRLALPTQRRNAMITRAMSASFGDMADDSAAIFPRINVKDPYKRLGISRMASEDEIQGARNFLIQQYAGHKPSVDAIESAHDKIIMQKFHERKNPKIDISKKVRQVRQSKVVNFVFERFQTPPNAVLVKTAVTFAVLGVLTVLFPTEEGPTLQVLLSLIATFYFIHQRLQKKLWTFLYGAGAFIFSWLVGTFLMVSVIPPFIKGPRGFEVMSSLLSYVLLWVASSYLR

SEQ ID NO: 37130 - protein, 216 aa, Arabidopsis thaliana
  peptide (1)..(216): Ceres Seq. ID no. 12336421
MITRAMSASFGDMADDSAAIFPRINVKDPYKRLGISRMASEDEIQGARNFLIQQYAGHKPSVDAIESAHDKIIMQKFHERKNPKIDISKKVRQVRQSKVVNFVFERFQTPPNAVLVKTAVTFAVLGVLTVLFPTEEGPTLQVLLSLIATFYFIHQRLQKKLWTFLYGAGAFIFSWLVGTFLMVSVIPPFIKGPRGFEVMSSLLSYVLLWVASSYLR

SEQ ID NO: 37131 - protein, 211 aa, Arabidopsis thaliana
  peptide (1)..(211): Ceres Seq. ID no. 12336422
MSASFGDMADDSAAIFPRINVKDPYKRLGISRMASEDEIQGARNFLIQQYAGHKPSVDAIESAHDKIIMQKFHERKNPKIDISKKVRQVRQSKVVNFVFERFQTPPNAVLVKTAVTFAVLGVLTVLFPTEEGPTLQVLLSLIATFYFIHQRLQKKLWTFLYGAGAFIFSWLVGTFLMVSVIPPFIKGPRGFEVMSSLLSYVLLWVASSYLR

SEQ ID NO: 37132 - DNA, 1429 bp, Arabidopsis thaliana
  misc_feature (1)..(1429): Ceres Seq. ID no. 13491563
  misc_feature (1)..(1429): Ortholog of  Ceres SEQ ID NO 14314925 as cited in SEQ ID NO 57985
  misc_feature (1)..(1429): Ortholog of  Ceres SEQ ID NO 13591365 as cited in SEQ ID NO 62720
atggcttccatttccagaatcttaccaacagatggcagattaagtcaatgcagaatcaacacctcgtgggttccttctacaaccagaactcaaactcacttagattttcccaagttagtttctgttagtaactctgggataagtttgaggattcagaatagtaaacctattagccctgtctttgctcttgaagcaacttcctccaggagggttgtttgcaaagctgctgctggtgtgtcaggtgacttacctgagagtactcctaaggaacttagtcagtatgagaagattattgagcttttgacaaccctttttccactttgggttattttgggaacacttgttggcatcttcaagccatccttggttacatggttggaaacagatctctttactctaggtcttggatttcttatgctttccatgggtttgactcttacgtttgaagatttcagaagatgtttacgtaatccatggacggtgggtgttggttttcttgctcaatatatgatcaagccaattctaggttttctcattgcaatgactcttaagctttcggcacctcttgcgactggccttatcctagtctcatgctgccctggaggacaggcgtcaaacgttgctacttacatttccaaggggaatgtagcgctctctgtactcatgacaacgtgttcaaccattggggctattataatgactcctcttcttactaagcttcttgctggtcagcttgttcccgttgacgctgctggacttgctcttagtacgttccaagtagtgttggttcctaccataattggagttctggcaaatgagttctttcctaaatttacgtctaagatcataacagtgacgcctctaatcggagtcattctgactactctgctctgtgccagccctattggacaagttgcagatgttttgaaaacccaaggagctcaacttatactcccggtggcactccttcatgctgcagcctttgctattggctattggatttcaaagttttctttcggcgagtccacttcgcgtaccatttctatagaatgtggaatgcaaagttcagcgctcgggttcttgcttgcacaaaagcatttcacaaaccctctagttgctgttccttctgcagtcagtgttgtctgtatggcgcttggcgggagcggcctggccgtgttctggagaaacctaccgattccggcagatgacaaggatgacttcaaagagtaaatgaagtaggaaaggctgtttgcatcttctccaaacgatgtgattgttttgttgtaatgttagtaaacattacaaaatttgtgttgaaaaacatgaaacaaaatgtgtttaagagacatagaaacaagggcgtgcatgatgacaactttgtggtcaaccttttttttatttctcaattaatggacaaatcttttttggc

SEQ ID NO: 37133 - protein, 409 aa, Arabidopsis thaliana; identical to SEQ ID NO: 22580
  peptide (1)..(409): Ceres Seq. ID no. 13491564

SEQ ID NO: 37134 - protein, 271 aa, Arabidopsis thaliana; identical to SEQ ID NO: 22581
  peptide (1)..(271): Ceres Seq. ID no. 13491565

SEQ ID NO: 37135 - protein, 268 aa, Arabidopsis thaliana; identical to SEQ ID NO: 22582
  peptide (1)..(268): Ceres Seq. ID no. 13491566

SEQ ID NO: 37136 - DNA, 1325 bp, Arabidopsis thaliana
  misc_feature (1)..(1325): Ceres Seq. ID no. 12395299
  misc_feature (1)..(1325): Ortholog of  Ceres SEQ ID NO 14310904 as cited in SEQ ID NO 53831
  misc_feature (1)..(1325): Ortholog of  Ceres SEQ ID NO 12616772 as cited in SEQ ID NO 64057
aaaaaccctagaaaacctctggagctatggagatgatgcaggattcgttccaagtccataggattccacaatcgaagtatgtcgatggagttagatggcttccacaagcttctgctttgaatcgtttcttcgcaacagcgtcctatgacgcggattgtgattcttcatcaatcgagatccaatcgctcgacccaaaccctagagggaatcacaacacgaacccgttaatcgagtcgttatcttcatggacttcaccttctcgcgtttcgtctctagaagtcgcgggaaacggcggtggtggcggttcattcaaaccaatggtttcagcagctacgtcttctggttctcttcacgttctgatgattgatttggtggaaggagctgcgattgaagaggtttacgcggcggaaggggagaggtttcatgtgggacgcgtggaaggtgtggattggagagagggaggagaatgtgttactgttggtgaagatgggagagtgaatgtagtgaagattgtgaatggtgaaggtttaaggtatagaaaggtctttgatgggaatggattggtggcttatagagctgtgaaatgggcttctccgactgagtttgttactggaggatatggttttggtttgcaattgtgggatcagaggaagtctggtgaagctgtttcacaactcaaagggaactggtttcaaggcaaaacttctgcaattgtccactccattgacattcatccatctcggaagcacacttgcattgcgggaggttcttcaggtactgtatttgcttgggatcttcggtggccacagcaacccattgttctttctggggttggagcaagtgagaatataaacaatcctctgtctgaaagtgaggtatgggaagttcagtatgactcatacacaaaatccaacgtctcatcctcaaggattctccctgttatgacctgctctgaagatggaatccttggtatcatagaacaaggggaaagaaccaatcgagcttctggctgaaccttgtgccattaacagttttgacatcgacaggcaaaatccacaggatgtgatatgtagcttggagtgggaatcaatagcagttttctcaaggccttagtataatatggaactgtgcacggtatgctatgttttcttctgcgagctacaacgaagaaattgaggaaggtagtgatagatgatgagagacaagtttaaggaagagggtgtggaatgtgtttataagtttcattataacaagatcttaaaatacattctgcacaaacagagttttgtattcatcttaaagttagtgtgatcttgaagatttgc

SEQ ID NO: 37137 - protein, 328 aa, Arabidopsis thaliana
  peptide (1)..(328): Ceres Seq. ID no. 12395300
MEMMQDSFQVHRIPQSKYVDGVRWLPQASALNRFFATASYDADCDSSSIEIQSLDPNPRGNHNTNPLIESLSSWTSPSRVSSLEVAGNGGGGGSFKPMVSAATSSGSLHVLMIDLVEGAAIEEVYAAEGERFHVGRVEGVDWREGGECVTVGEDGRVNVVKIVNGEGLRYRKVFDGNGLVAYRAVKWASPTEFVTGGYGFGLQLWDQRKSGEAVSQLKGNWFQGKTSAIVHSIDIHPSRKHTCIAGGSSGTVFAWDLRWPQQPIVLSGVGASENINNPLSESEVWEVQYDSYTKSNVSSSRILPVMTCSEDGILGIIEQGERTNRASG

SEQ ID NO: 37138 - protein, 326 aa, Arabidopsis thaliana
  peptide (1)..(326): Ceres Seq. ID no. 12395301
MMQDSFQVHRIPQSKYVDGVRWLPQASALNRFFATASYDADCDSSSIEIQSLDPNPRGNHNTNPLIESLSSWTSPSRVSSLEVAGNGGGGGSFKPMVSAATSSGSLHVLMIDLVEGAAIEEVYAAEGERFHVGRVEGVDWREGGECVTVGEDGRVNVVKIVNGEGLRYRKVFDGNGLVAYRAVKWASPTEFVTGGYGFGLQLWDQRKSGEAVSQLKGNWFQGKTSAIVHSIDIHPSRKHTCIAGGSSGTVFAWDLRWPQQPIVLSGVGASENINNPLSESEVWEVQYDSYTKSNVSSSRILPVMTCSEDGILGIIEQGERTNRASG

SEQ ID NO: 37139 - protein, 325 aa, Arabidopsis thaliana
  peptide (1)..(325): Ceres Seq. ID no. 12395302
MQDSFQVHRIPQSKYVDGVRWLPQASALNRFFATASYDADCDSSSIEIQSLDPNPRGNHNTNPLIESLSSWTSPSRVSSLEVAGNGGGGGSFKPMVSAATSSGSLHVLMIDLVEGAAIEEVYAAEGERFHVGRVEGVDWREGGECVTVGEDGRVNVVKIVNGEGLRYRKVFDGNGLVAYRAVKWASPTEFVTGGYGFGLQLWDQRKSGEAVSQLKGNWFQGKTSAIVHSIDIHPSRKHTCIAGGSSGTVFAWDLRWPQQPIVLSGVGASENINNPLSESEVWEVQYDSYTKSNVSSSRILPVMTCSEDGILGIIEQGERTNRASG

SEQ ID NO: 37140 - DNA, 542 bp, Arabidopsis thaliana
  misc_feature (1)..(542): Ceres Seq. ID no. 12395297
  misc_feature (1)..(542): Ortholog of  Ceres SEQ ID NO 12563124 as cited in SEQ ID NO 57104
acataagtctctctcttacattttgaaaccctaatttctcaaaataaatgtctgaagttgagtaccggtgctttgtcggcggccttgcctgggccaccaatgatgaagatcttcaaaggacgttctcacagttcggcgacgttatcgattctaagatcattaacgaccgcgagagtggaagatcaaggggattcggattcgtcaccttcaaggacgagaaagccatgagggatgcgattgaagagatgaacggtaaagagctcgatggacgtgtcatcaccgtgaacgaggctcagtcgagaggtagcggcggtgatggtgaaagttacggaggcggtggtggcggctggtaatcaaagatagagttgtttgcgtgctgctgctctgtttttggtttagatttggatttgtgtcaccacttctggtttggttatcgttcgtttggtttacttttttgatgaaacagtttcgtttaagtcttctttgtctggatcgaaatgttaattcgcgtgttgtttactaaatttataacgtttcctttt

SEQ ID NO: 37141 - protein, 101 aa, Arabidopsis thaliana
  peptide (1)..(101): Ceres Seq. ID no. 12395298
MSEVEYRCFVGGLAWATNDEDLQRTFSQFGDVIDSKIINDRESGRSRGFGFVTFKDEKAMRDAIEEMNGKELDGRVITVNEAQSRGSGGDGESYGGGGGGW

SEQ ID NO: 37142 - DNA, 885 bp, Arabidopsis thaliana
  misc_feature (1)..(885): Ceres Seq. ID no. 12420460
  misc_feature (1)..(885): Ortholog of  Ceres SEQ ID NO 12611474 as cited in SEQ ID NO 56549
aaaacgaactagagacagtttgattcgaaaatcttgtcggaaaatggaggatatcgtcgaccaagaattaagcaattactgggaacctagctccttgctccaaaacgaatacttcgaatacgacagctggcctttggaagaagccatttctgggtcgtatgattcgagttcgccggatggagctgcttcgtcgccggcttctaagaatattgtgtcggagagaaacagaagacagaaacttaaccagagactcttcgctcttcgatcagttgttcccaatatcactaagatggataaagcctcaataatcaaagatgctattagttacatagaaggattacaatatgaagaaaagaagctcgaagctgagatcagagaacttgaatctacaccaaagagtagccttagtttcagcaaagattttgatcgtgatttacttgttcctgtcacatccaagaagatgaagcagcttgattctggttcttccacttctctcatcgaagttctcgaattgaaggtaacattcatgggagagaggacaatggtggtgagtgtaacatgtaataagaggacagatacaatggtgaaactgtgtgaagtctttgagtcattgaatctcaaaatcctcacttccaatctcacctctttctctggcatgatcttccacactgtctttattgaggcggatgaagaagaacaagaggtgttgcggttaaaaatagaaacaggaataggagcttataatgaaactcaaagccctactttgagcatcgactctctttactaataatactttttttcttccttttttggttcattttggcttctctctttacaataatgtatgtctctcttttcatttttatgatctcctacgtttgtttg

SEQ ID NO: 37143 - protein, 261 aa, Arabidopsis thaliana
  peptide (1)..(261): Ceres Seq. ID no. 12420461
KRTRDSLIRKSCRKMEDIVDQELSNYWEPSSLLQNEYFEYDSWPLEEAISGSYDSSSPDGAASSPASKNIVSERNRRQKLNQRLFALRSVVPNITKMDKASIIKDAISYIEGLQYEEKKLEAEIRELESTPKSSLSFSKDFDRDLLVPVTSKKMKQLDSGSSTSLIEVLELKVTFMGERTMVVSVTCNKRTDTMVKLCEVFESLNLKILTSNLTSFSGMIFHTVFIEADEEEQEVLRLKIETGIGAYNETQSPTLSIDSLY

SEQ ID NO: 37144 - protein, 247 aa, Arabidopsis thaliana
  peptide (1)..(247): Ceres Seq. ID no. 12420462
MEDIVDQELSNYWEPSSLLQNEYFEYDSWPLEEAISGSYDSSSPDGAASSPASKNIVSERNRRQKLNQRLFALRSVVPNITKMDKASIIKDAISYIEGLQYEEKKLEAEIRELESTPKSSLSFSKDFDRDLLVPVTSKKMKQLDSGSSTSLIEVLELKVTFMGERTMVVSVTCNKRTDTMVKLCEVFESLNLKILTSNLTSFSGMIFHTVFIEADEEEQEVLRLKIETGIGAYNETQSPTLSIDSLY

SEQ ID NO: 37145 - protein, 165 aa, Arabidopsis thaliana
  peptide (1)..(165): Ceres Seq. ID no. 12420463
MDKASIIKDAISYIEGLQYEEKKLEAEIRELESTPKSSLSFSKDFDRDLLVPVTSKKMKQLDSGSSTSLIEVLELKVTFMGERTMVVSVTCNKRTDTMVKLCEVFESLNLKILTSNLTSFSGMIFHTVFIEADEEEQEVLRLKIETGIGAYNETQSPTLSIDSLY

SEQ ID NO: 37146 - DNA, 2709 bp, Arabidopsis thaliana
  misc_feature (1)..(2709): Ceres Seq. ID no. 13591434
  misc_feature (1)..(2709): Ortholog of  Ceres SEQ ID NO 15177674 as cited in SEQ ID NO 52629
  misc_feature (1)..(2709): Ortholog of  Ceres SEQ ID NO 13596541 as cited in SEQ ID NO 62372
atggcttatgctcatgttttcgcttcgttgactatctcgacgatttctctccgacgattcctcccccgacttcatcgaaaccacagcgtaaaacccaattcccgaatcatatgcaatctgaaactaaactactctgctggaaaatttcgcgagatgggactatcacgttccgtggagctagaccaattcatcacaagcgaggaggaagaaggagaagcagaggagataggagaaggatttttcgaagcgattgaggaactagagaggatgactagagaaccatcagatatactcgaagagatgaatcatcgattatcttctagagaattgcaattgatgcttgtttacttcgcacaagaaggtagagattcatggtgtactttagaagtgtttgaatggttgaaaaaggagaatagagttgatgaagagataatggagttaatggtttcgattatgtgtggttgggttaagaaattgattgaagatgaatgtaatgcacaccaagtgttcgacttattgattgagatggattgtgttggtttaaaacctggttttagtatgatggacaaagttattgctttgtattgtgagatggggaagaaagaaagtgcggttttgtttgtcaaggaggttttaagaaggagagatggttttggttatagtgttgttggtggtggtggttctgaaggtagaaaaggtggacctgttgggtatcttgcttggaaatttatggttgatggagattataggaaggcagttgatatggttatggagttaagactttcagggctgaaaccagaagcgtacagctatcttattgcgatgacagctatagtgaaagagctgaatagtcttggaaagacattacgcgagttgaaacgctttgcacgggctggttttgttgctgagattgatgatcacgatagggtactcattgagaagtatcaatcagaaacattatctcgtggactgcagttagcaacttgggcggttgaggaaggccaagaaaatgattccattattggggtggtccatgagaggctactcgctatgtatatatgtgcgggacgtggaccagaagcagagaaacagctctggaagatgaaacttgcagggagagaacctgaagctgacctccacgacattgttatggcgatctgcgcttcacagaaagaggttaatgcagtttctcggctactgacacgagttgagttcatgggatctcagagaaagaagaagactctgtcatggttgctcagagggtatgtgaaaggagggcacttcgaagaggctgcagagacattggtatcgatgatcgactctgggttgcatccggagtatattgatcgagtggctgtgatgcaaggaatgacaaggaagatccaacggccgagagatgttgaagcatatatgagtctgtgcaagaggctctttgacgctggtttgcccaaaacaaaccttaatgacttgaggacatctgtttcctcgtacgtatttctgaaattaagtgaatctgaaggtgaaagcaaagccggaggaagaaataagaatcacagaggtaaaattgtgatggagctcgaagatccaacaatggcagattccacgattaagctaacagtcaaattcggaggcaaatcaataccactttcggtatcaccagattgtacagtcaaagatcttaagtctcagttacaaccaatcaccaacgttcttcctcgtggccagaagctcatcttcaaaggtaaggttttggttgaaacgtcgactttgaaacaatctgatgtgggaagtggagctaaactcatgttaatggcttctcaaggtctgcatcaaggggaaggtccaatacttaaggaagctagtataaggccaatctctagaactgttgtatctgataaagtagatcagagaaagcctagtgtacttgtagacaagaaccgcactgatcgatggaaagccacaggagttattgctttagctcaagccaatttgaaggaaatacctgaagaagtgtgggactgtggatctggagtcagagtacttgacattagtgaaaacttcattaaagaagtacctgccaaaatcagctcctttggttctatgcagaaattgttccttcaaggaaatggtctgtccgatgaatccattcaatgggaagggatagcatctctgaagcgcctgatgcttctgtccattagccataacaatctaactgttctgccatcagcaatgggttcactgacgtctcttagacagcttgatgtcaccaacaacaagttgacaagtctaccgaatgagttaggacttctgacgcagcttgagattttgaaagccaacaacaacagaataactagtcttcctgagagtatcggaaactgttcattcctcatggaggttgatctttcagctaatattatatcagaacttcccgagacattcaccaaactgcgtaatctaaagtgtttcggtattcagacgctggagctgaataacacgggattgaagacgctgccatcggctttatttaagatgtgtttgcagctctcaactttaggtctccacaacacagagataaccgttgaatttctccgccagttcgagggatatgatgattttgatgaaagaagacgtaccaagcatcaaaagcagcttgattttcgtgttgtgggatctggccaattcgacgaaggcgctgataaatcttggtga

SEQ ID NO: 37147 - protein, 902 aa, Arabidopsis thaliana
  peptide (1)..(902): Ceres Seq. ID no. 13591435
MAYAHVFASLTISTISLRRFLPRLHRNHSVKPNSRIICNLKLNYSAGKFREMGLSRSVELDQFITSEEEEGEAEEIGEGFFEAIEELERMTREPSDILEEMNHRLSSRELQLMLVYFAQEGRDSWCTLEVFEWLKKENRVDEEIMELMVSIMCGWVKKLIEDECNAHQVFDLLIEMDCVGLKPGFSMMDKVIALYCEMGKKESAVLFVKEVLRRRDGFGYSVVGGGGSEGRKGGPVGYLAWKFMVDGDYRKAVDMVMELRLSGLKPEAYSYLIAMTAIVKELNSLGKTLRELKRFARAGFVAEIDDHDRVLIEKYQSETLSRGLQLATWAVEEGQENDSIIGVVHERLLAMYICAGRGPEAEKQLWKMKLAGREPEADLHDIVMAICASQKEVNAVSRLLTRVEFMGSQRKKKTLSWLLRGYVKGGHFEEAAETLVSMIDSGLHPEYIDRVAVMQGMTRKIQRPRDVEAYMSLCKRLFDAGLPKTNLNDLRTSVSSYVFLKLSESEGESKAGGRNKNHRGKIVMELEDPTMADSTIKLTVKFGGKSIPLSVSPDCTVKDLKSQLQPITNVLPRGQKLIFKGKVLVETSTLKQSDVGSGAKLMLMASQGLHQGEGPILKEASIRPISRTVVSDKVDQRKPSVLVDKNRTDRWKATGVIALAQANLKEIPEEVWDCGSGVRVLDISENFIKEVPAKISSFGSMQKLFLQGNGLSDESIQWEGIASLKRLMLLSISHNNLTVLPSAMGSLTSLRQLDVTNNKLTSLPNELGLLTQLEILKANNNRITSLPESIGNCSFLMEVDLSANIISELPETFTKLRNLKCFGIQTLELNNTGLKTLPSALFKMCLQLSTLGLHNTEITVEFLRQFEGYDDFDERRRTKHQKQLDFRVVGSGQFDEGADKSW

SEQ ID NO: 37148 - protein, 851 aa, Arabidopsis thaliana
  peptide (1)..(851): Ceres Seq. ID no. 13591436
MGLSRSVELDQFITSEEEEGEAEEIGEGFFEAIEELERMTREPSDILEEMNHRLSSRELQLMLVYFAQEGRDSWCTLEVFEWLKKENRVDEEIMELMVSIMCGWVKKLIEDECNAHQVFDLLIEMDCVGLKPGFSMMDKVIALYCEMGKKESAVLFVKEVLRRRDGFGYSVVGGGGSEGRKGGPVGYLAWKFMVDGDYRKAVDMVMELRLSGLKPEAYSYLIAMTAIVKELNSLGKTLRELKRFARAGFVAEIDDHDRVLIEKYQSETLSRGLQLATWAVEEGQENDSIIGVVHERLLAMYICAGRGPEAEKQLWKMKLAGREPEADLHDIVMAICASQKEVNAVSRLLTRVEFMGSQRKKKTLSWLLRGYVKGGHFEEAAETLVSMIDSGLHPEYIDRVAVMQGMTRKIQRPRDVEAYMSLCKRLFDAGLPKTNLNDLRTSVSSYVFLKLSESEGESKAGGRNKNHRGKIVMELEDPTMADSTIKLTVKFGGKSIPLSVSPDCTVKDLKSQLQPITNVLPRGQKLIFKGKVLVETSTLKQSDVGSGAKLMLMASQGLHQGEGPILKEASIRPISRTVVSDKVDQRKPSVLVDKNRTDRWKATGVIALAQANLKEIPEEVWDCGSGVRVLDISENFIKEVPAKISSFGSMQKLFLQGNGLSDESIQWEGIASLKRLMLLSISHNNLTVLPSAMGSLTSLRQLDVTNNKLTSLPNELGLLTQLEILKANNNRITSLPESIGNCSFLMEVDLSANIISELPETFTKLRNLKCFGIQTLELNNTGLKTLPSALFKMCLQLSTLGLHNTEITVEFLRQFEGYDDFDERRRTKHQKQLDFRVVGSGQFDEGADKSW

SEQ ID NO: 37149 - protein, 813 aa, Arabidopsis thaliana
  peptide (1)..(813): Ceres Seq. ID no. 13591437
MTREPSDILEEMNHRLSSRELQLMLVYFAQEGRDSWCTLEVFEWLKKENRVDEEIMELMVSIMCGWVKKLIEDECNAHQVFDLLIEMDCVGLKPGFSMMDKVIALYCEMGKKESAVLFVKEVLRRRDGFGYSVVGGGGSEGRKGGPVGYLAWKFMVDGDYRKAVDMVMELRLSGLKPEAYSYLIAMTAIVKELNSLGKTLRELKRFARAGFVAEIDDHDRVLIEKYQSETLSRGLQLATWAVEEGQENDSIIGVVHERLLAMYICAGRGPEAEKQLWKMKLAGREPEADLHDIVMAICASQKEVNAVSRLLTRVEFMGSQRKKKTLSWLLRGYVKGGHFEEAAETLVSMIDSGLHPEYIDRVAVMQGMTRKIQRPRDVEAYMSLCKRLFDAGLPKTNLNDLRTSVSSYVFLKLSESEGESKAGGRNKNHRGKIVMELEDPTMADSTIKLTVKFGGKSIPLSVSPDCTVKDLKSQLQPITNVLPRGQKLIFKGKVLVETSTLKQSDVGSGAKLMLMASQGLHQGEGPILKEASIRPISRTVVSDKVDQRKPSVLVDKNRTDRWKATGVIALAQANLKEIPEEVWDCGSGVRVLDISENFIKEVPAKISSFGSMQKLFLQGNGLSDESIQWEGIASLKRLMLLSISHNNLTVLPSAMGSLTSLRQLDVTNNKLTSLPNELGLLTQLEILKANNNRITSLPESIGNCSFLMEVDLSANIISELPETFTKLRNLKCFGIQTLELNNTGLKTLPSALFKMCLQLSTLGLHNTEITVEFLRQFEGYDDFDERRRTKHQKQLDFRVVGSGQFDEGADKSW

SEQ ID NO: 37150 - DNA, 1057 bp, Arabidopsis thaliana
  misc_feature (1)..(1057): Ceres Seq. ID no. 12336423
  misc_feature (1)..(1057): Ortholog of  Ceres SEQ ID NO 13647762 as cited in SEQ ID NO 20426
aagctttcttcttgttcctacatacccatcttccctcacctacatcaaacctagggtttcttaactatatcaacaacatatataaatttatatataggttgtgatttattgaagatcataaagatcaaaaggagagaggtattaaaaaatgatgtgtagtcgaggccattggagacctgcagaagacgagaagctaagagaactcgtcgaacaatttggtcctcataattggaacgccatagctcagaagctctctggtcgatctggtaagagttgtagattgagatggtttaatcaattggatcctaggattaaccgaaaccctttcacggaggaagaagaagaaaggcttttagcgtctcatcggatccatgggaacagatggtccgtgatcgctagattttttcccggtcgaactgataacgctgttaaaaaccattggcacgtcatcatggctcgtcgtggccgagaacggtccaagctccgtccacgaggccttggccatgatggcacggtggctgcgactgggatgattggtaattataaagactgcgataaggagagaagattggcaaccacaaccgctatcaattttccttatcaattctctcatattaatcattttcaagtcctcaaagagttcttgaccgtaaagatcgggttcagaaatagtactactccaatacaagaaggagcaatagaccaaactaaacgaccgatggagttctacaattttcttcaagtaaacacggattcgaagatacacgaattgatagataattcaagaaaagacgaagaagaagatgtcgatcaaaacaaccgaattcctaacgagaattgtgttccatttttcgactttttgtctgttggaaactctgcctctcagggtttatgttaatttgtccgtaccacatgtactataaggtggaccatatgttaattaaagataatgtagaaagtactaatcaattagagctcttgtttgagccaaatgtgaaaattagttaagccatcccaaacatgttcttgtataacaaatataaggttgtacttttcc

SEQ ID NO: 37151 - protein, 249 aa, Arabidopsis thaliana
  peptide (1)..(249): Ceres Seq. ID no. 12336424
MMCSRGHWRPAEDEKLRELVEQFGPHNWNAIAQKLSGRSGKSCRLRWFNQLDPRINRNPFTEEEEERLLASHRIHGNRWSVIARFFPGRTDNAVKNHWHVIMARRGRERSKLRPRGLGHDGTVAATGMIGNYKDCDKERRLATTTAINFPYQFSHINHFQVLKEFLTVKIGFRNSTTPIQEGAIDQTKRPMEFYNFLQVNTDSKIHELIDNSRKDEEEDVDQNNRIPNENCVPFFDFLSVGNSASQGLC

SEQ ID NO: 37152 - protein, 248 aa, Arabidopsis thaliana
  peptide (1)..(248): Ceres Seq. ID no. 12336425
MCSRGHWRPAEDEKLRELVEQFGPHNWNAIAQKLSGRSGKSCRLRWFNQLDPRINRNPFTEEEEERLLASHRIHGNRWSVIARFFPGRTDNAVKNHWHVIMARRGRERSKLRPRGLGHDGTVAATGMIGNYKDCDKERRLATTTAINFPYQFSHINHFQVLKEFLTVKIGFRNSTTPIQEGAIDQTKRPMEFYNFLQVNTDSKIHELIDNSRKDEEEDVDQNNRIPNENCVPFFDFLSVGNSASQGLC

SEQ ID NO: 37153 - protein, 148 aa, Arabidopsis thaliana
  peptide (1)..(148): Ceres Seq. ID no. 12336426
MARRGRERSKLRPRGLGHDGTVAATGMIGNYKDCDKERRLATTTAINFPYQFSHINHFQVLKEFLTVKIGFRNSTTPIQEGAIDQTKRPMEFYNFLQVNTDSKIHELIDNSRKDEEEDVDQNNRIPNENCVPFFDFLSVGNSASQGLC

SEQ ID NO: 37154 - DNA, 1034 bp, Arabidopsis thaliana
  misc_feature (1)..(1034): Ceres Seq. ID no. 13489401
  misc_feature (1)..(1034): Ortholog of  Ceres SEQ ID NO 15225236 as cited in SEQ ID NO 66266
gattctctatattgcagatcgatctccgagtttgctaaatcgccgggaaatttactgaatttggagctagtcatgtcttcagatcctgacaaaatgatgtccaaagccgacaaaatgacaaagctcacgcttactagatggagtgctgattggagaggtgctactgagttgtatgagcaagcagcaaatgggtttagagcctcaaaaaattatgagaaagctaaagtggctctcgagaaagcttcaaaaggacaagagatgcaagcttctccttgggatgctgcaaagcatatggagtctgctgctgccttagcacagaagctaagtatttggaatgaagttgctgatttttatagaaaggcgtccgagctgtatgttgagtgtggaagggcacaacccgcatcagatgctcttggaaaggctgcccgtgctttggaagatgtcaaaccagatgactccatccaactatacactgatgcttgtgaaattcttgaagaggatgggagggaccaaatggcctttgatctgtaccgtgcttgtgctaatgtctacattaagcttgagaagttcacagatgctgcaacctttttcttaagattgggtgtagctgctgataagtgtgatgcgacaaatagccagtgtaaggcgtatctcagtgcaatcatcttatatctgtatgctcacgacctgcagcaggcagaaaaatgctacaatgactgttctcagattgacgcttttctgaagagtgatcagagccgaagtgctagtagacttctcacagcctataatgaaggtgacattgaagaaatcaagaaggtggcgagtgcaagcactgtctcgaatttggatcatatgattatcaagttggctaggaagctacccactggagatgttactgcaattcagatgaacactaatgacgatctagacgaggatgatctcacttaaagtttctccactttgtacagattcatatttacacttggcttcttttcagtccaaagattaaaaaaaaacttattatcgtttttccc

SEQ ID NO: 37155 - protein, 315 aa, Arabidopsis thaliana
  peptide (1)..(315): Ceres Seq. ID no. 13489402
DSLYCRSISEFAKSPGNLLNLELVMSSDPDKMMSKADKMTKLTLTRWSADWRGATELYEQAANGFRASKNYEKAKVALEKASKGQEMQASPWDAAKHMESAAALAQKLSIWNEVADFYRKASELYVECGRAQPASDALGKAARALEDVKPDDSIQLYTDACEILEEDGRDQMAFDLYRACANVYIKLEKFTDAATFFLRLGVAADKCDATNSQCKAYLSAIILYLYAHDLQQAEKCYNDCSQIDAFLKSDQSRSASRLLTAYNEGDIEEIKKVASASTVSNLDHMIIKLARKLPTGDVTAIQMNTNDDLDEDDLT

SEQ ID NO: 37156 - protein, 291 aa, Arabidopsis thaliana
  peptide (1)..(291): Ceres Seq. ID no. 13489403
MSSDPDKMMSKADKMTKLTLTRWSADWRGATELYEQAANGFRASKNYEKAKVALEKASKGQEMQASPWDAAKHMESAAALAQKLSIWNEVADFYRKASELYVECGRAQPASDALGKAARALEDVKPDDSIQLYTDACEILEEDGRDQMAFDLYRACANVYIKLEKFTDAATFFLRLGVAADKCDATNSQCKAYLSAIILYLYAHDLQQAEKCYNDCSQIDAFLKSDQSRSASRLLTAYNEGDIEEIKKVASASTVSNLDHMIIKLARKLPTGDVTAIQMNTNDDLDEDDLT

SEQ ID NO: 37157 - protein, 284 aa, Arabidopsis thaliana
  peptide (1)..(284): Ceres Seq. ID no. 13489404
MMSKADKMTKLTLTRWSADWRGATELYEQAANGFRASKNYEKAKVALEKASKGQEMQASPWDAAKHMESAAALAQKLSIWNEVADFYRKASELYVECGRAQPASDALGKAARALEDVKPDDSIQLYTDACEILEEDGRDQMAFDLYRACANVYIKLEKFTDAATFFLRLGVAADKCDATNSQCKAYLSAIILYLYAHDLQQAEKCYNDCSQIDAFLKSDQSRSASRLLTAYNEGDIEEIKKVASASTVSNLDHMIIKLARKLPTGDVTAIQMNTNDDLDEDDLT

SEQ ID NO: 37158 - DNA, 915 bp, Arabidopsis thaliana
  misc_feature (1)..(915): Ceres Seq. ID no. 13647113
  misc_feature (1)..(915): Ortholog of  Ceres SEQ ID NO 12609394 as cited in SEQ ID NO 52095
atcattaacctgttttcactcaaatcatccatctaccttctctctgtaacaatcctctcttccctctaagagtttctgaaaaatcggtgaaacaacagaggaagcaatatggcacttacttggactcataaagacaggggagaaattagggttcatgagaatttggaggaactaagcatagacttggttgattatatagctgagatatcagaagcatcaattaaagaacatggtgctttctgcattgtgttatcaggaggctctctcattagcttcatgggaaaattgatcgagccgccttacgacaagattgtagattgggcgaaatggtatgttttctgggcggatgagcgtgtggtagctaagaatcatgacgatagcaactacaagctagccaaagataatttactctccaaggtaaatgtgtttccgagacatatatgttccattaacgacacagtttcagcggaggaagctgcaacagagtatgaattcgccatcagacagatggtgagatcacgaaccgtggctgcgtcagacaacagtgacagtcccaggtttgatctgatcttgcttgggatgggctcagatggacatgtagcctcactcttcccgaaccacccagcacttgaggtgaaggacgattgggtcacattcctaaccgactctcataaaccgccaccagagagaatcacattcactttgcccgtcatcaactcagctgctaacgttgtcgtagtagcaaccggcgaatccaaagccaatgctatccacttagcaatcgatgatttgcccttaccagacagctctctgtctctgcctgcaaggctagtccacccgagcaatgggaatctgatttggtttatggataaacaagcggggtctaagcttgacaggtttaaattttccgagtag

SEQ ID NO: 37159 - protein, 268 aa, Arabidopsis thaliana
  peptide (1)..(268): Ceres Seq. ID no. 13647114
MALTWTHKDRGEIRVHENLEELSIDLVDYIAEISEASIKEHGAFCIVLSGGSLISFMGKLIEPPYDKIVDWAKWYVFWADERVVAKNHDDSNYKLAKDNLLSKVNVFPRHICSINDTVSAEEAATEYEFAIRQMVRSRTVAASDNSDSPRFDLILLGMGSDGHVASLFPNHPALEVKDDWVTFLTDSHKPPPERITFTLPVINSAANVVVVATGESKANAIHLAIDDLPLPDSSLSLPARLVHPSNGNLIWFMDKQAGSKLDRFKFSE

SEQ ID NO: 37160 - protein, 212 aa, Arabidopsis thaliana
  peptide (1)..(212): Ceres Seq. ID no. 13647115
MGKLIEPPYDKIVDWAKWYVFWADERVVAKNHDDSNYKLAKDNLLSKVNVFPRHICSINDTVSAEEAATEYEFAIRQMVRSRTVAASDNSDSPRFDLILLGMGSDGHVASLFPNHPALEVKDDWVTFLTDSHKPPPERITFTLPVINSAANVVVVATGESKANAIHLAIDDLPLPDSSLSLPARLVHPSNGNLIWFMDKQAGSKLDRFKFSE

SEQ ID NO: 37161 - protein, 135 aa, Arabidopsis thaliana
  peptide (1)..(135): Ceres Seq. ID no. 13647116
MVRSRTVAASDNSDSPRFDLILLGMGSDGHVASLFPNHPALEVKDDWVTFLTDSHKPPPERITFTLPVINSAANVVVVATGESKANAIHLAIDDLPLPDSSLSLPARLVHPSNGNLIWFMDKQAGSKLDRFKFSE

SEQ ID NO: 37162 - DNA, 656 bp, Arabidopsis thaliana
  misc_feature (1)..(656): Ceres Seq. ID no. 12580161
  misc_feature (1)..(656): Ortholog of  Ceres SEQ ID NO 15179121 as cited in SEQ ID NO 0
atattaaggagagacctattcgtgtggccaaacaccagaatatcgccaaaatcgttgaaacttgaacgaagaaacagacttgtcacagctcagccgccggaagactttaaggaggtatggatttggtgtggttattaagtgttttacttgttggagctgcacttggatattacatcagcactttacgacaaacccgccgaatctttctctcctccaaatctgtcgccatagatgcaggatccagcgggaataagaaaaccaagtccaaggaacccctcgagatagagaaactcgctgattttcgcaaaaatttcaaaatggttttggttgtgaggaatgatcttaaaatgggtaaagggaagattgcagctcaatgcagtcatgcaactttaggtttatacaagaaactccttcaacgggcgccaaaagccttgaacagatgggaatattgtgctcagccaaaagttgttgtcaaaattgaaagtgaggaagagatgctagttttgcaagaaagagcaaagaccctgaaactgccaacccatatcaccattgatgcgggaaaaacacagatcgctccaaattcaaggacagtaatggctattcttggacctgttgataatgttgatgaagtaacaggtggactaaagcttatgtaa

SEQ ID NO: 37163 - protein, 179 aa, Arabidopsis thaliana
  peptide (1)..(179): Ceres Seq. ID no. 12580162
MDLVWLLSVLLVGAALGYYISTLRQTRRIFLSSKSVAIDAGSSGNKKTKSKEPLEIEKLADFRKNFKMVLVVRNDLKMGKGKIAAQCSHATLGLYKKLLQRAPKALNRWEYCAQPKVVVKIESEEEMLVLQERAKTLKLPTHITIDAGKTQIAPNSRTVMAILGPVDNVDEVTGGLKLM

SEQ ID NO: 37164 - protein, 112 aa, Arabidopsis thaliana
  peptide (1)..(112): Ceres Seq. ID no. 12580163
MVLVVRNDLKMGKGKIAAQCSHATLGLYKKLLQRAPKALNRWEYCAQPKVVVKIESEEEMLVLQERAKTLKLPTHITIDAGKTQIAPNSRTVMAILGPVDNVDEVTGGLKLM

SEQ ID NO: 37165 - protein, 102 aa, Arabidopsis thaliana
  peptide (1)..(102): Ceres Seq. ID no. 12580164
MGKGKIAAQCSHATLGLYKKLLQRAPKALNRWEYCAQPKVVVKIESEEEMLVLQERAKTLKLPTHITIDAGKTQIAPNSRTVMAILGPVDNVDEVTGGLKLM

SEQ ID NO: 37166 - DNA, 854 bp, Arabidopsis thaliana
  misc_feature (1)..(854): Ceres Seq. ID no. 13509066
  misc_feature (1)..(854): Ortholog of  Ceres SEQ ID NO 12473409 as cited in SEQ ID NO 104
  misc_feature (1)..(854): Ortholog of  Ceres SEQ ID NO 15170477 as cited in SEQ ID NO 52825
  misc_feature (1)..(854): Ortholog of  Ceres SEQ ID NO 13595055 as cited in SEQ ID NO 55744
  misc_feature (1)..(854): Ortholog of  Ceres SEQ ID NO 13662009 as cited in SEQ ID NO 61951
aaagaaaaaaggattcctaaaaaatcagtcactcctcttaatcttctcctatctctcattttcgtgggttttgtttttgttatcttcttcgtttggatattattacatttgggactcaagaagaaatcgaatctatcgtgtgtgtagattgcttctctctatctcttctctcgctacacaacaatggctgcttacacgtgtacttcccgtccgccgatttctatccggtcagagatgagaatcgcttcctcgccgacgggttccttctctactcgacagatgttctctgtgttgccggaatcgagcggattgaggactcgcgtttctctatcttcactctcgaagaattctagggtttcccgattacgacgaggcgttatctgtgaagctcaggacactgctacaggaattccagtggtcaacgattcaacatgggactctctagttctcaaggctgatgagcctgtgtttgtcgacttttgggcaccatggtgtggaccctgcaaaatgattgatcccattgtcaacgaactcgcgcaaaagtacgccggccagttcaagttctacaaacttaacactgatgagtctcctgcaacccctggccagtatggtgttagaagcatcccaactatcatgatctttgtcaatggtgagaagaaggatacaatcatcggtgctgtctctaaagacactttagcaaccagcatcaacaaattcttgtaatgaactactagtcactgttctcttttctctgtatctctcgactctctaccttttacctatctactcatcactgttcatctagacttgtatgataatatgatgtctcaggttttcagaatttgaagtctacg

SEQ ID NO: 37167 - protein, 179 aa, Arabidopsis thaliana
  peptide (1)..(179): Ceres Seq. ID no. 13509067
MAAYTCTSRPPISIRSEMRIASSPTGSFSTRQMFSVLPESSGLRTRVSLSSLSKNSRVSRLRRGVICEAQDTATGIPVVNDSTWDSLVLKADEPVFVDFWAPWCGPCKMIDPIVNELAQKYAGQFKFYKLNTDESPATPGQYGVRSIPTIMIFVNGEKKDTIIGAVSKDTLATSINKFL

SEQ ID NO: 37168 - protein, 162 aa, Arabidopsis thaliana
  peptide (1)..(162): Ceres Seq. ID no. 13509068
MRIASSPTGSFSTRQMFSVLPESSGLRTRVSLSSLSKNSRVSRLRRGVICEAQDTATGIPVVNDSTWDSLVLKADEPVFVDFWAPWCGPCKMIDPIVNELAQKYAGQFKFYKLNTDESPATPGQYGVRSIPTIMIFVNGEKKDTIIGAVSKDTLATSINKFL

SEQ ID NO: 37169 - protein, 147 aa, Arabidopsis thaliana
  peptide (1)..(147): Ceres Seq. ID no. 13509069
MFSVLPESSGLRTRVSLSSLSKNSRVSRLRRGVICEAQDTATGIPVVNDSTWDSLVLKADEPVFVDFWAPWCGPCKMIDPIVNELAQKYAGQFKFYKLNTDESPATPGQYGVRSIPTIMIFVNGEKKDTIIGAVSKDTLATSINKFL

SEQ ID NO: 37170 - DNA, 1243 bp, Arabidopsis thaliana; identical to SEQ ID NO: 22030
  misc_feature (1)..(1243): Ceres Seq. ID no. 12562371
  misc_feature (1)..(1243): Ortholog of  Ceres SEQ ID NO 13581848 as cited in SEQ ID NO 51340
  misc_feature (1)..(1243): Ortholog of  Ceres SEQ ID NO 13595392 as cited in SEQ ID NO 56164
  misc_feature (1)..(1243): Ortholog of  Ceres SEQ ID NO 14316412 as cited in SEQ ID NO 59209
  misc_feature (1)..(1243): Ortholog of  Ceres SEQ ID NO 12618341 as cited in SEQ ID NO 64256

SEQ ID NO: 37171 - protein, 244 aa, Arabidopsis thaliana; identical to SEQ ID NO: 20888
  peptide (1)..(244): Ceres Seq. ID no. 12562372

SEQ ID NO: 37172 - protein, 238 aa, Arabidopsis thaliana; identical to SEQ ID NO: 20889
  peptide (1)..(238): Ceres Seq. ID no. 12562373

SEQ ID NO: 37173 - protein, 233 aa, Arabidopsis thaliana; identical to SEQ ID NO: 22033
  peptide (1)..(233): Ceres Seq. ID no. 12562374

SEQ ID NO: 37174 - DNA, 1006 bp, Arabidopsis thaliana
  misc_feature (1)..(1006): Ceres Seq. ID no. 13491607
  misc_feature (1)..(1006): Ortholog of  Ceres SEQ ID NO 15170745 as cited in SEQ ID NO 52595
tcgtatttcaagaaatgacgaccgatgggactccaccgagacgaagcgacggccatggaaacccttttcagagtctcacttcgtctacttccggtttccgccgccgtgacatgtcgctcgatccgattccccgtttcaagacccggttcctcacacttactgaaccgtaagctgtataatttgcctacttcttcttcctcctctttgtcgacaaaagccggttggttattgggtcttggtgagaagaaaaagaaagtggatttaccggagatagtggcatctggtgacccggttctgcacgagaaggcccgagaagttgacccgggagaaatcgggtcggagcgtattcagaagataattgatgatatgattaaagttatgagattggctcctggagttggcctcgctgctcctcaaattggtgttcccttaaggattattgtattggaagatacaaaagagtatataagttacgcaccaaaggaagagattcttgctcaagaaagacgtcattttgatctcatggtgatggtgaatccggttctcaaggagagaagcaacaagaaagctcttttctttgaaggatgcttgagtgttgatggattcagagctgcggtggagagataccttgaggtggtagtgacgggctacgatcgtcaaggaaagaggattgaagtgaatgcttcaggttggcaagctaggattttgcaacatgagtgtgatcatttggatggtaatctttacgttgataagatggtaccacgcacttttaggacagtcgacaacttggacttgcctttagctgagggctgccctaagctcggacctcaatgacagattcttcaacaaaagttgtaatcttctgttttgattctttactaaaactcttctagattgagcttgactcaaataatttcaaagatgaaactttgtcggaaagagggttcttttttcgggtttggtaatggattgaaagattttcatttaataaaatattataacttaa

SEQ ID NO: 37175 - protein, 269 aa, Arabidopsis thaliana
  peptide (1)..(269): Ceres Seq. ID no. 13491608
MGLHRDEATAMETLFRVSLRLLPVSAAVTCRSIRFPVSRPGSSHLLNRKLYNLPTSSSSSLSTKAGWLLGLGEKKKKVDLPEIVASGDPVLHEKAREVDPGEIGSERIQKIIDDMIKVMRLAPGVGLAAPQIGVPLRIIVLEDTKEYISYAPKEEILAQERRHFDLMVMVNPVLKERSNKKALFFEGCLSVDGFRAAVERYLEVVVTGYDRQGKRIEVNASGWQARILQHECDHLDGNLYVDKMVPRTFRTVDNLDLPLAEGCPKLGPQ

SEQ ID NO: 37176 - protein, 259 aa, Arabidopsis thaliana
  peptide (1)..(259): Ceres Seq. ID no. 13491609
METLFRVSLRLLPVSAAVTCRSIRFPVSRPGSSHLLNRKLYNLPTSSSSSLSTKAGWLLGLGEKKKKVDLPEIVASGDPVLHEKAREVDPGEIGSERIQKIIDDMIKVMRLAPGVGLAAPQIGVPLRIIVLEDTKEYISYAPKEEILAQERRHFDLMVMVNPVLKERSNKKALFFEGCLSVDGFRAAVERYLEVVVTGYDRQGKRIEVNASGWQARILQHECDHLDGNLYVDKMVPRTFRTVDNLDLPLAEGCPKLGPQ

SEQ ID NO: 37177 - protein, 155 aa, Arabidopsis thaliana
  peptide (1)..(155): Ceres Seq. ID no. 13491610
MIKVMRLAPGVGLAAPQIGVPLRIIVLEDTKEYISYAPKEEILAQERRHFDLMVMVNPVLKERSNKKALFFEGCLSVDGFRAAVERYLEVVVTGYDRQGKRIEVNASGWQARILQHECDHLDGNLYVDKMVPRTFRTVDNLDLPLAEGCPKLGPQ

SEQ ID NO: 37178 - DNA, 992 bp, Arabidopsis thaliana
  misc_feature (1)..(992): Ceres Seq. ID no. 12393868
  misc_feature (1)..(992): Ortholog of  Ceres SEQ ID NO 14307280 as cited in SEQ ID NO 59443
  misc_feature (1)..(992): Ortholog of  Ceres SEQ ID NO 14316536 as cited in SEQ ID NO 60272
  misc_feature (1)..(992): Ortholog of  Ceres SEQ ID NO 13597264 as cited in SEQ ID NO 63897
  misc_feature (1)..(992): Ortholog of  Ceres SEQ ID NO 13598570 as cited in SEQ ID NO 65434
  misc_feature (1)..(992): Ortholog of  Ceres SEQ ID NO 13656452 as cited in SEQ ID NO 65745
  misc_feature (1)..(992): Ortholog of  Ceres SEQ ID NO 13660333 as cited in SEQ ID NO 67464
  misc_feature (1)..(992): Ortholog of  Ceres SEQ ID NO 13596238 as cited in SEQ ID NO 68834
  misc_feature (1)..(992): Ortholog of  Ceres SEQ ID NO 15174329 as cited in SEQ ID NO 0
atcaagatcgatccctctctaaaaatggctcaacaacactcttttctcctcttatgcttcttcctctcaatctcttatttactatcttccgcccaaaccgaagccacctcaatcgagagattagtgccaagagacctctacaacaaaattttcatccacaaggacaataccgcttgtcccgcaaatggtttctatacttacgaatcatttgtccaagcgacgaggcggtttccgagattcgggagcgtaggaagccccgtgacacaacgactcgaagtggctgcatttttggctcagatttcacacgagacgaccggaggatgggcaacggcaccagacggaccgtacgcttggggattatgctttaaagaagaagtgagtccacaaagcacttattgtgattcttctaatacacagtggccttgtttccctaacaagacttatcaaggaagaggtccaattcaactatcgtggaactacaactacggaccggccggtcgagccttaggattcgacggtctaaggaatccagaaacggtgtcaaataattcagtgatagcttttcaaacagcactttggttttggatgacgccacagagtcccaaaccttcgtgccatgacgtcatgatcggaaaataccgacctacggcggcggatttggcagctaaccggaccggcgggtttggtttaaccacaaatataataaatggcggtttagagtgtgggattcctggagacggacgggtcaatgaccgaatcgggttttttcagagatatactgggctgtttaaagtagcaactgggccgaatttggactgtgaaaatcaaaggccttatgcttaaacaattaatttggttgacccgaaatatgtatgtttataaacaaaaagtcaacatgtatgtttatggcattgcccacacatgggagccataaaaggggtttatattcaataatgtaattcaatttaatgtgatttgatggttttaattcc

SEQ ID NO: 37179 - protein, 280 aa, Arabidopsis thaliana
  peptide (1)..(280): Ceres Seq. ID no. 12393869
IKIDPSLKMAQQHSFLLLCFFLSISYLLSSAQTEATSIERLVPRDLYNKIFIHKDNTACPANGFYTYESFVQATRRFPRFGSVGSPVTQRLEVAAFLAQISHETTGGWATAPDGPYAWGLCFKEEVSPQSTYCDSSNTQWPCFPNKTYQGRGPIQLSWNYNYGPAGRALGFDGLRNPETVSNNSVIAFQTALWFWMTPQSPKPSCHDVMIGKYRPTAADLAANRTGGFGLTTNIINGGLECGIPGDGRVNDRIGFFQRYTGLFKVATGPNLDCENQRPYA

SEQ ID NO: 37180 - protein, 272 aa, Arabidopsis thaliana
  peptide (1)..(272): Ceres Seq. ID no. 12393870
MAQQHSFLLLCFFLSISYLLSSAQTEATSIERLVPRDLYNKIFIHKDNTACPANGFYTYESFVQATRRFPRFGSVGSPVTQRLEVAAFLAQISHETTGGWATAPDGPYAWGLCFKEEVSPQSTYCDSSNTQWPCFPNKTYQGRGPIQLSWNYNYGPAGRALGFDGLRNPETVSNNSVIAFQTALWFWMTPQSPKPSCHDVMIGKYRPTAADLAANRTGGFGLTTNIINGGLECGIPGDGRVNDRIGFFQRYTGLFKVATGPNLDCENQRPYA

SEQ ID NO: 37181 - DNA, 693 bp, Arabidopsis thaliana
  misc_feature (1)..(693): Ceres Seq. ID no. 12603444
  misc_feature (1)..(693): Ortholog of  Ceres SEQ ID NO 13594363 as cited in SEQ ID NO 60250
  misc_feature (1)..(693): Ortholog of  Ceres SEQ ID NO 13596420 as cited in SEQ ID NO 68738
agttttctactaactctttccttattcttgtaccatcctaaatcagtaagtccttaacgtacgcaccatgtgtacgttagagaagcgcggcgatctctttctcctaaccctaaccggcgaagacgagcacagattccaccccgacacgatcgcctctgttctctcgcttcttgaacaagcaaagtctcaatccacaaaaggatccgtcctcatcactaccggtcacggaaagttcttctccaatggctttgacctcgcgtgggctcaatccgctggacacggtgctataaaacggatgcaccaaatggtcaaatcctttaaaccggtgttagccgccctcctcgatcttccaatgccgacgatcgccgccttgaacggccacgcggcagcctcggggctgatgtttgcgctgatagtgcggaaggtgtggtggaggctacagtgagccttggagaaagtttggccgctaagaaatggaatggtgaggtgtatgcaaccattaggaagagtttgtatccggagctttgtcggatggttgatttaacggcaaataacttggccactcacaacctctagaaactctcattgtcttgttgggagaaaaatggttgaaatatgaatattgccgacaaaagtcaacgtccatttcactaagcacgtatttgtttctcaccaataaaacataattaatct

SEQ ID NO: 37182 - protein, 125 aa, Arabidopsis thaliana
  peptide (1)..(125): Ceres Seq. ID no. 12603445
MCTLEKRGDLFLLTLTGEDEHRFHPDTIASVLSLLEQAKSQSTKGSVLITTGHGKFFSNGFDLAWAQSAGHGAIKRMHQMVKSFKPVLAALLDLPMPTIAALNGHAAASGLMFALIVRKVWWRLQ

SEQ ID NO: 37183 - DNA, 985 bp, Arabidopsis thaliana
  misc_feature (1)..(985): Ceres Seq. ID no. 12665934
  misc_feature (1)..(985): Ortholog of  Ceres SEQ ID NO 14316400 as cited in SEQ ID NO 57941
  misc_feature (1)..(985): Ortholog of  Ceres SEQ ID NO 12624328 as cited in SEQ ID NO 61700
gtaagagagacgaatctcacgccggaatctcttttacttcaccgtcgtttgttctccgtcgcgtcacctttcgattaattccttcacagggtagcaaaattttgttgatttcgggatgtcttcagctcaagatccattctacattgttaaagaagagattcaggattctattgataagttgcaatctacattccacaaatgggagcgtatctctcccgacatgggtgatcaagcacatgtggcgaaggagcttgttgctacttgtggaagcattgagtggcaggtagatgagctggaaaaagcgattactgttgcagcaaaagatccttcatggtatggcattgatgaagctgagcttgaaaaacggaggagatggactagtaatgctaggacacaggtgcggaatgtgaagtctggtgttttagctggaaaggttagttctggagcaggtcatgcaagtgaagtgcgtagagaactaatgagaatgccaaactcgggtgaagcaagtagatatgatcagtatggagggagagacgatgatggttttgtacagtcagaatcagataggcaaatgctgttgataaagcaacaagacgaagaattggatgagcttagtaaaagtgtacagagaattggaggagtggggctcactatacacgacgaactcgttgcacaggagagaataatagatgaattggatacggagatggacagcacaaagaaccgtcttgaatttgttcagaaaaaagtgggaatggtaatgaagaaagctggagcaaaaggtcaaatgatgatgatatgtttcttgctcgtcttgttcatcatcctattcgttcttgtcttcttgacctaaagaacagagccgcgggatcttatagatgggagtttaatgtcttacattatcatgtttgtggtgaaacaaatggaatatttacataaggttgtctgttttttcttctcctatccaatcccacatataattttg

SEQ ID NO: 37184 - protein, 245 aa, Arabidopsis thaliana
  peptide (1)..(245): Ceres Seq. ID no. 12665935
MSSAQDPFYIVKEEIQDSIDKLQSTFHKWERISPDMGDQAHVAKELVATCGSIEWQVDELEKAITVAAKDPSWYGIDEAELEKRRRWTSNARTQVRNVKSGVLAGKVSSGAGHASEVRRELMRMPNSGEASRYDQYGGRDDDGFVQSESDRQMLLIKQQDEELDELSKSVQRIGGVGLTIHDELVAQERIIDELDTEMDSTKNRLEFVQKKVGMVMKKAGAKGQMMMICFLLVLFIILFVLVFLT

SEQ ID NO: 37185 - protein, 210 aa, Arabidopsis thaliana
  peptide (1)..(210): Ceres Seq. ID no. 12665936
MGDQAHVAKELVATCGSIEWQVDELEKAITVAAKDPSWYGIDEAELEKRRRWTSNARTQVRNVKSGVLAGKVSSGAGHASEVRRELMRMPNSGEASRYDQYGGRDDDGFVQSESDRQMLLIKQQDEELDELSKSVQRIGGVGLTIHDELVAQERIIDELDTEMDSTKNRLEFVQKKVGMVMKKAGAKGQMMMICFLLVLFIILFVLVFLT

SEQ ID NO: 37186 - protein, 124 aa, Arabidopsis thaliana
  peptide (1)..(124): Ceres Seq. ID no. 12665937
MRMPNSGEASRYDQYGGRDDDGFVQSESDRQMLLIKQQDEELDELSKSVQRIGGVGLTIHDELVAQERIIDELDTEMDSTKNRLEFVQKKVGMVMKKAGAKGQMMMICFLLVLFIILFVLVFLT

SEQ ID NO: 37187 - DNA, 1846 bp, Arabidopsis thaliana
  misc_feature (1)..(1846): Ceres Seq. ID no. 13646141
  misc_feature (1)..(1846): Ortholog of  Ceres SEQ ID NO 14303627 as cited in SEQ ID NO 62070
  misc_feature (1)..(1846): Ortholog of  Ceres SEQ ID NO 13597546 as cited in SEQ ID NO 65017
  misc_feature (1)..(1846): Ortholog of  Ceres SEQ ID NO 15176077 as cited in SEQ ID NO 66728
  misc_feature (1)..(1846): Ortholog of  Ceres SEQ ID NO 13654353 as cited in SEQ ID NO 68318
aattttaagtctttgtccgtttactctcctttgtgtttaagaaacctccttttatagagatatttctcaccattttttatctatatgnagggtatgatataacatctagaggatacaagaggtggtcaggtgcaaaagattgagttttttttataggagagtgtttacgactgaagctatgacggaaacgggtttgattctcatgtggttccctttgataatattgggattgtttgttttgaaatgggtgctgaagagagtgaatgtttggatttatgtgtccaaacttggtgagaaaaaacactatctgccaccaggtgatttgggatggccagtcataggcaacatgtggtcctttcttagagctttcaaaacatctgatcctgaatccttcatccaatcctacatcaccaggtatgggcgtaccgggatttataaagcacacatgtttgggtacccatgtgtactagtaacaacaccagagacttgtaggcgagttctaacagatgatgatgccttccacataggttggccaaaatctaccatgaaactcattggcaggaagtcctttgttggtatctcctttgaagaacacaagaggctcaggcgtttgacttctgctcctgtcaatggccctgaagctctctctgtatacatacagttcattgaagaaactgttaatactgatctagaaaaatggtccaaaatgggagaaatcgagttcttatctcatttgcgtaagcttacgtttaaggtcattatgtacatatttctcagcagtgagagtgagcatgtcatggattcattggaacgggagtataccaaccttaactatggagttcgagcaatgggtattaatcttcctgggtttgcttatcatagagctttgaaggcaaggaaaaaacttgtagctgcctttcagtccatagtgactaaccgaagaaatcaaaggaagcagaatatttcatccaatagaaaagatatgctggataatctaatagatgttaaagatgaaaacggaagagtcttagatgatgaggaaattattgaccttttgttgatgtatcttaatgcgggtcatgaatcttctggacacctcactatgtgggctaccattttgatgcaagaacaccctatgattctgcaaaaggctaaggaagaacaagagaggatcgtaaaaaagagagcaccgggacagaagttgacgcttaaagagacacgtgaaatggtgtatctttctcaggttattgatgagacccttcgagtaattacattctctctgacggccttcagggaagcaaagagtgatgtccaaatggatggctatataattccaaaaggctggaaggttctgacttggtttaggaacgtccatttggaccctgaaatctacccggatccaaagaaatttgatccttcaagatgggagggatacacaccaaaagcaggcacattccttccttttggtttgggaagccacctatgcccgggaaacgatcttgccaagctcgagatttccatttttcttcatcatttcctcctcaaataccgggtggaaaggagcaatcccggatgtccggtgatgttcttgcctcacaatcgacccaaagataattgcctagcaagaatcaccagaacgatgccataatcatcatcttcaaactagtagaccccttagcaaatatataagcttcgtctcaggtttccattgtcttcatcttctcttagaacttgatccaaaccggttcggtttgtgaatttggtttactaggatgtatcaatagtttgaaggatttgtcaaagtaatgttgaaatttttctctggtttagcttcaaatttggttat

SEQ ID NO: 37188 - protein, 489 aa, Arabidopsis thaliana
  peptide (1)..(489): Ceres Seq. ID no. 13646142
MTETGLILMWFPLIILGLFVLKWVLKRVNVWIYVSKLGEKKHYLPPGDLGWPVIGNMWSFLRAFKTSDPESFIQSYITRYGRTGIYKAHMFGYPCVLVTTPETCRRVLTDDDAFHIGWPKSTMKLIGRKSFVGISFEEHKRLRRLTSAPVNGPEALSVYIQFIEETVNTDLEKWSKMGEIEFLSHLRKLTFKVIMYIFLSSESEHVMDSLEREYTNLNYGVRAMGINLPGFAYHRALKARKKLVAAFQSIVTNRRNQRKQNISSNRKDMLDNLIDVKDENGRVLDDEEIIDLLLMYLNAGHESSGHLTMWATILMQEHPMILQKAKEEQERIVKKRAPGQKLTLKETREMVYLSQVIDETLRVITFSLTAFREAKSDVQMDGYIIPKGWKVLTWFRNVHLDPEIYPDPKKFDPSRWEGYTPKAGTFLPFGLGSHLCPGNDLAKLEISIFLHHFLLKYRVERSNPGCPVMFLPHNRPKDNCLARITRTMP

SEQ ID NO: 37189 - protein, 481 aa, Arabidopsis thaliana
  peptide (1)..(481): Ceres Seq. ID no. 13646143
MWFPLIILGLFVLKWVLKRVNVWIYVSKLGEKKHYLPPGDLGWPVIGNMWSFLRAFKTSDPESFIQSYITRYGRTGIYKAHMFGYPCVLVTTPETCRRVLTDDDAFHIGWPKSTMKLIGRKSFVGISFEEHKRLRRLTSAPVNGPEALSVYIQFIEETVNTDLEKWSKMGEIEFLSHLRKLTFKVIMYIFLSSESEHVMDSLEREYTNLNYGVRAMGINLPGFAYHRALKARKKLVAAFQSIVTNRRNQRKQNISSNRKDMLDNLIDVKDENGRVLDDEEIIDLLLMYLNAGHESSGHLTMWATILMQEHPMILQKAKEEQERIVKKRAPGQKLTLKETREMVYLSQVIDETLRVITFSLTAFREAKSDVQMDGYIIPKGWKVLTWFRNVHLDPEIYPDPKKFDPSRWEGYTPKAGTFLPFGLGSHLCPGNDLAKLEISIFLHHFLLKYRVERSNPGCPVMFLPHNRPKDNCLARITRTMP

SEQ ID NO: 37190 - protein, 433 aa, Arabidopsis thaliana
  peptide (1)..(433): Ceres Seq. ID no. 13646144
MWSFLRAFKTSDPESFIQSYITRYGRTGIYKAHMFGYPCVLVTTPETCRRVLTDDDAFHIGWPKSTMKLIGRKSFVGISFEEHKRLRRLTSAPVNGPEALSVYIQFIEETVNTDLEKWSKMGEIEFLSHLRKLTFKVIMYIFLSSESEHVMDSLEREYTNLNYGVRAMGINLPGFAYHRALKARKKLVAAFQSIVTNRRNQRKQNISSNRKDMLDNLIDVKDENGRVLDDEEIIDLLLMYLNAGHESSGHLTMWATILMQEHPMILQKAKEEQERIVKKRAPGQKLTLKETREMVYLSQVIDETLRVITFSLTAFREAKSDVQMDGYIIPKGWKVLTWFRNVHLDPEIYPDPKKFDPSRWEGYTPKAGTFLPFGLGSHLCPGNDLAKLEISIFLHHFLLKYRVERSNPGCPVMFLPHNRPKDNCLARITRTMP

SEQ ID NO: 37191 - DNA, 1148 bp, Arabidopsis thaliana
  misc_feature (1)..(1148): Ceres Seq. ID no. 13622100
  misc_feature (1)..(1148): Ortholog of  Ceres SEQ ID NO 12616162 as cited in SEQ ID NO 63260
atagaccaatacagagatacaaagcaatagaacaacaagaacaagaaaacagagaaaaaaacaatggcttccttgtcggataagttagcggatgcttaccagaacgcaaggccgagatatccgatcgattggttcacgaaacttgctgctcgaaccggtcagcacaaatcagcttgggatgttggtactggcaacggtcaagcagctattggtcttgcagagtatttcgagaaagttacagcaaccgacataaacgaagcacagttaaaactagcggtaaaacacgaaagaatcagttaccatcacactcccacaacaatgtccgaagaccaaatggttgctctagtcggcggagataactccgttgatctaatcgtggcagcacaagccgttcactacttcgatctcgcaccattctacaacgtagcaaaacgtgttcttcgcaaagaaggaggattaatcgcagtttttgtctacaacgacataatcatctctcctgaagttgattccatcatgaaacgtcttgtggactccacgttcccgtttagaactcctgtaatgaatcttgctttcgacggttacaaaacgttgccgtttccgtttgaaagtatagggatgggatcagaagggaagcctataatgcttgacattcctcataagctatcgcttaaagggtttatcggtttcttgagatcgtggcagcccgcaatgaaagctaaagaacgtggagttgagcttgtgactgaagatttgatctccaaatttgaagatgcttggggtgatgatgatgatgttaaagatattttctacaaagctcatatgattgttggaaaactttcggcttcagatatagagcggcatcgaaagagatttgatacgaactgcgtagttacaacactaaaggatcataacaactcggctgttattgcttcagtgactgctgctgcatttgctggagtggcggcttactgtgcttactctgcaaggaagaacagttagatcctttgaaggacaaagaaacggttttctgaatctagtgaatgaaatcttttttattttacatgttgacatgttgtcatgtatttatttatgtcattgatatgagatggttaagtaatatctaaagatttaagagtcacccaacactc

SEQ ID NO: 37192 - protein, 311 aa, Arabidopsis thaliana
  peptide (1)..(311): Ceres Seq. ID no. 15219298
MASLSDKLADAYQNARPRYPIDWFTKLAARTGQHKSAWDVGTGNGQAAIGLAEYFEKVTATDINEAQLKLAVKHERISYHHTPTTMSEDQMVALVGGDNSVDLIVAAQAVHYFDLAPFYNVAKRVLRKEGGLIAVFVYNDIIISPEVDSIMKRLVDSTFPFRTPVMNLAFDGYKTLPFPFESIGMGSEGKPIMLDIPHKLSLKGFIGFLRSWQPAMKAKERGVELVTEDLISKFEDAWGDDDDVKDIFYKAHMIVGKLSASDIERHRKRFDTNCVVTTLKDHNNSAVIASVTAAAFAGVAAYCAYSARKNS

SEQ ID NO: 37193 - protein, 226 aa, Arabidopsis thaliana
  peptide (1)..(226): Ceres Seq. ID no. 15219299
MSEDQMVALVGGDNSVDLIVAAQAVHYFDLAPFYNVAKRVLRKEGGLIAVFVYNDIIISPEVDSIMKRLVDSTFPFRTPVMNLAFDGYKTLPFPFESIGMGSEGKPIMLDIPHKLSLKGFIGFLRSWQPAMKAKERGVELVTEDLISKFEDAWGDDDDVKDIFYKAHMIVGKLSASDIERHRKRFDTNCVVTTLKDHNNSAVIASVTAAAFAGVAAYCAYSARKNS

SEQ ID NO: 37194 - protein, 221 aa, Arabidopsis thaliana
  peptide (1)..(221): Ceres Seq. ID no. 15219300
MVALVGGDNSVDLIVAAQAVHYFDLAPFYNVAKRVLRKEGGLIAVFVYNDIIISPEVDSIMKRLVDSTFPFRTPVMNLAFDGYKTLPFPFESIGMGSEGKPIMLDIPHKLSLKGFIGFLRSWQPAMKAKERGVELVTEDLISKFEDAWGDDDDVKDIFYKAHMIVGKLSASDIERHRKRFDTNCVVTTLKDHNNSAVIASVTAAAFAGVAAYCAYSARKNS

SEQ ID NO: 37195 - DNA, 1104 bp, Arabidopsis thaliana
  misc_feature (1)..(1104): Ceres Seq. ID no. 12393770
  misc_feature (1)..(1104): Ortholog of  Ceres SEQ ID NO 12585444 as cited in SEQ ID NO 62814
ccctctctttaagctctctctctttctgtggctattctctttctctctttctctctgaatccgccgccacgccttcaccatggcctggcttagccgcgtgagaggagtttcgccggtgacaaggctcgcagcgattcgtcgatcttttggatcagcggccgcgttggagtttgactacgactccgatgacgagtacttgtacggagatgatcgccgcctcgcggaaccgaggcttgggttggatggatcggggccggatagaggagtgcagtgggtgcttatgggagcccctggagcatggaggcacgtcttcgccgagaggctctccaaactgcttgaagttcctcacatttccatggggtcccttgtccgtcaagaactcaaccctagatcttctctctacaaggagattgcaagtgctgtaaatgaacgaaagctggttccaaagagtgttgtgtttgcgttgctatcaaagaggctcgaagaaggctatgcaagaggggaaactggtttcattcttcatggcattcctcgcactcgttttcaagccgaaactcttgatcaaatcgctcaaattgaccttgtcgtcaatctcaaaggctctgaagaccatctggtaaaccggaatgctctcaatgaaacagctctgcctcagcaggagttcctcggctctatgttacactcacctgttgcaatcaatgctcggagggagagtgtcggtgtctacgcacaggaggtggaagaatactataggatcagaggaaactgctagactttcatgttggcggtgccacatcagcagacacatggcagggcttgttggcagctttacatctgaagcaggtgaatttgacgacttcacagaagctaactctgtgatgatgaactacaaaacagagctttgctttataaattttgatctttctctctcattttatgggtcttcttaacccctaatatgcaactttttttttgttttctttttctgtaattcaaagttttgcgagagatcaaacgtgatgaggatgataccactaaagcttgtaatgagtctattatatatacaacaaagattttccatctatgaaaaatagttcctatatc

SEQ ID NO: 37196 - protein, 230 aa, Arabidopsis thaliana
  peptide (1)..(230): Ceres Seq. ID no. 12393771
MAWLSRVRGVSPVTRLAAIRRSFGSAAALEFDYDSDDEYLYGDDRRLAEPRLGLDGSGPDRGVQWVLMGAPGAWRHVFAERLSKLLEVPHISMGSLVRQELNPRSSLYKEIASAVNERKLVPKSVVFALLSKRLEEGYARGETGFILHGIPRTRFQAETLDQIAQIDLVVNLKGSEDHLVNRNALNETALPQQEFLGSMLHSPVAINARRESVGVYAQEVEEYYRIRGNC

SEQ ID NO: 37197 - protein, 163 aa, Arabidopsis thaliana
  peptide (1)..(163): Ceres Seq. ID no. 12393772
MGAPGAWRHVFAERLSKLLEVPHISMGSLVRQELNPRSSLYKEIASAVNERKLVPKSVVFALLSKRLEEGYARGETGFILHGIPRTRFQAETLDQIAQIDLVVNLKGSEDHLVNRNALNETALPQQEFLGSMLHSPVAINARRESVGVYAQEVEEYYRIRGNC

SEQ ID NO: 37198 - protein, 138 aa, Arabidopsis thaliana
  peptide (1)..(138): Ceres Seq. ID no. 12393773
MGSLVRQELNPRSSLYKEIASAVNERKLVPKSVVFALLSKRLEEGYARGETGFILHGIPRTRFQAETLDQIAQIDLVVNLKGSEDHLVNRNALNETALPQQEFLGSMLHSPVAINARRESVGVYAQEVEEYYRIRGNC

SEQ ID NO: 37199 - DNA, 566 bp, Arabidopsis thaliana
  misc_feature (1)..(566): Ceres Seq. ID no. 12330413
  misc_feature (1)..(566): Ortholog of  Ceres SEQ ID NO 12388487 as cited in SEQ ID NO 20511
atcctctcctttctctctctagatttttatcccctttccctctctctctctcctagggttttcgtctctctcgttcactgttaatagtcttaacggagaggtttgattagcctccgggaagattctactgcgaactttggacacatctctctctgccatggcggctgagaagttaagggacttgagccagccgattgacgtcggtgtgctcgatgccactgttgcggccttctttgttaccggatctaaagaagaggtgcttcaatttctctgggttttgacttgttcaaggggctcgaccaatgattagtctatttcgcgggtctgttttattgtttgagcgtcttcttctcgattaggtgtgaggagtaggaattaggagcgtttcgttgttagggttttagcactctgatacatttttgtcttaagacgcttgtttcgggcagctcgagttttcaatttggatttttagggtcctagagttttagtaatgtattgaattacaatggtttagttgctcactgagactcgagattggtgaattaagtcccttgttcttttgtcgc

SEQ ID NO: 37200 - protein, 50 aa, Arabidopsis thaliana
  peptide (1)..(50): Ceres Seq. ID no. 12330414
MAAEKLRDLSQPIDVGVLDATVAAFFVTGSKEEVLQFLWVLTCSRGSTND

SEQ ID NO: 37201 - DNA, 2709 bp, Arabidopsis thaliana; identical to SEQ ID NO: 37146
  misc_feature (1)..(2709): Ceres Seq. ID no. 13591434
  misc_feature (1)..(2709): Ortholog of  Ceres SEQ ID NO 15177674 as cited in SEQ ID NO 52629
  misc_feature (1)..(2709): Ortholog of  Ceres SEQ ID NO 13596541 as cited in SEQ ID NO 62372

SEQ ID NO: 37202 - protein, 902 aa, Arabidopsis thaliana; identical to SEQ ID NO: 37147
  peptide (1)..(902): Ceres Seq. ID no. 13591435

SEQ ID NO: 37203 - protein, 851 aa, Arabidopsis thaliana; identical to SEQ ID NO: 37148
  peptide (1)..(851): Ceres Seq. ID no. 13591436

SEQ ID NO: 37204 - protein, 813 aa, Arabidopsis thaliana; identical to SEQ ID NO: 37149
  peptide (1)..(813): Ceres Seq. ID no. 13591437

SEQ ID NO: 37205 - DNA, 1376 bp, Arabidopsis thaliana
  misc_feature (1)..(1376): Ceres Seq. ID no. 13575567
  misc_feature (1)..(1376): Ortholog of  Ceres SEQ ID NO 13585976 as cited in SEQ ID NO 0
gcccctttgcgtgtttcagcttcttctttatgatctaattcatgtctatgtttcgtttgattctttgttcaattctgaattgagaaaatggcgattcgagatctgtctcttcggttttttagttcgactgatttgggaatgtgaagagatcagattgatttgttgacagagtcttgggggttttcaatcttattcctctagattttcgaaattcgattcctttacatcagatttcgcttaattctctgtcctaggtacaacaagaatggaagaagagtatgagagtcgtcgattgaggagatgggaagagttggacactgacatcttagtaagaattttccagaagtttagcgtctttgagttgacttcgggattagctcatgtttgtagaggatggagagctgcttgttgcgatccgattctttggaagacggtggatttgtcaaacatgagatctagtttcatcaagatcccattagagccttatgtctatgtggaacgccgatctgatgaggccctaacccgcatcctgaaactctccatgaaccttagcggaggaagcacgaggaccttgatttttcatttcaacttgttcttgagtgatgatcagcttacttacaccgcagaaaggtgtccagggttgagacgggtcgtcctaccggcttggaacagaataaagaagactggtatatgcaaagcgataagaatctggaaagatctagagtcactaacaatgccaagcatcgcaaacccgccttatctcttaacagaaattgccaagaactgcaagaattttaaagagctgaagatcatgggtccattcgaggtcttctttgcaaacacgctcatcacttgcctcccaaacatcaaaacactcagcatcagatgctcggcgataaagcgggaagcactgatgaaaatccttgacggattaccaagccttgaagtgctcaacatatcacactctcacctagtggagtacagcggttggcagcctcagcagaaggtgattgttagagagctcgataagacgataatggagaaaacagcaaggctaaagaaattcttgacttgcatggatcacaagacgtgtgtgatgtgtcagaggactgaaaacgatgaagggattgtgagatggtacaagtatgaggaaggagactggaaggttgatgaagtgagttctcttcatctttgatgtttctgctgtgatcattctctgtgaaggacttaacttgttattgttctcatctttgactgttgaattgtttatttctttgtgttgtttgttttgatttgaatcgtattatgtgtatatatctgtaggctatgccaatgaatgtatgtagtgatcaacttttgatcaccaccaaccttgc

SEQ ID NO: 37206 - protein, 309 aa, Arabidopsis thaliana
  peptide (1)..(309): Ceres Seq. ID no. 13575568
MEEEYESRRLRRWEELDTDILVRIFQKFSVFELTSGLAHVCRGWRAACCDPILWKTVDLSNMRSSFIKIPLEPYVYVERRSDEALTRILKLSMNLSGGSTRTLIFHFNLFLSDDQLTYTAERCPGLRRVVLPAWNRIKKTGICKAIRIWKDLESLTMPSIANPPYLLTEIAKNCKNFKELKIMGPFEVFFANTLITCLPNIKTLSIRCSAIKREALMKILDGLPSLEVLNISHSHLVEYSGWQPQQKVIVRELDKTIMEKTARLKKFLTCMDHKTCVMCQRTENDEGIVRWYKYEEGDWKVDEVSSLHL

SEQ ID NO: 37207 - protein, 248 aa, Arabidopsis thaliana
  peptide (1)..(248): Ceres Seq. ID no. 13575569
MRSSFIKIPLEPYVYVERRSDEALTRILKLSMNLSGGSTRTLIFHFNLFLSDDQLTYTAERCPGLRRVVLPAWNRIKKTGICKAIRIWKDLESLTMPSIANPPYLLTEIAKNCKNFKELKIMGPFEVFFANTLITCLPNIKTLSIRCSAIKREALMKILDGLPSLEVLNISHSHLVEYSGWQPQQKVIVRELDKTIMEKTARLKKFLTCMDHKTCVMCQRTENDEGIVRWYKYEEGDWKVDEVSSLHL

SEQ ID NO: 37208 - protein, 217 aa, Arabidopsis thaliana
  peptide (1)..(217): Ceres Seq. ID no. 13575570
MNLSGGSTRTLIFHFNLFLSDDQLTYTAERCPGLRRVVLPAWNRIKKTGICKAIRIWKDLESLTMPSIANPPYLLTEIAKNCKNFKELKIMGPFEVFFANTLITCLPNIKTLSIRCSAIKREALMKILDGLPSLEVLNISHSHLVEYSGWQPQQKVIVRELDKTIMEKTARLKKFLTCMDHKTCVMCQRTENDEGIVRWYKYEEGDWKVDEVSSLHL

SEQ ID NO: 37209 - DNA, 1187 bp, Arabidopsis thaliana
  misc_feature (1)..(1187): Ceres Seq. ID no. 12384786
  misc_feature (1)..(1187): Ortholog of  Ceres SEQ ID NO 13637939 as cited in SEQ ID NO 54930
  misc_feature (1)..(1187): Ortholog of  Ceres SEQ ID NO 13584164 as cited in SEQ ID NO 63681
atcattctcggtttaactgaaacacataataaaacaaagagaaagagatataatatgggtgggtgggcaatcgcagtacacggtggtgccggtatcgaccctaatcttccggcagagagacaagaagaggcgaaacagcttttaactcgttgtctcaacctcggcataatagctttgcgttccaatgtttccgccattgacgtcgttgagctcgtcattagagaattggagacggatcctctgtttaattcaggccgtggatcttctttgacggagaaaggaacggttgagatggaagctagcattatggacggtacgaagagacgatgcggtgccgtttcggggataaccaccgtgaaaaatcctatatctcttgctcgtctcgtcatggacaaatctccccactcttaccttgctttctcaggtgcagaggatttcgcccgcaaacagggagttgaaattgtggacaacgagtactttgtcacggacgacaacgtaggaatgctcaagttggccaaggaagctaactccatcttgtttgattaccggattccgccgatgggatgtgccggcgcagctgcgaccgacagtccaatccaaatgaacggtcttccgatcagcatttacgcaccggagacagtcgggtgcgttgtggttgacgggaaaggacattgtgccgccgggacatccacgggtggtttaatgaacaagatgatgggaaggattggtgactcgccgctgataggagccgggacgtatgcgtcggagttttgtggtgtgtcgtgtaccggagaaggagaagccattataagagcaaccctagctcgtgatgtgtcagctgttatggagtataaaggacttaacctccaagaagcggttgattacgtcatcaagcatcgacttgacgaagggttcgctggactcattgctgtctcgaataaaggagaggtggtttgtggttttaactctaatgggatgttcaggggatgtgcaactgaggatggattcatggacgttgctatttgggagtgagaaatattttagattaagaaaatgtcttactagtatttaatcagtcatcgctctattaatttggttattcattatcataaagctggagtagtaaatttagttctgtcgttatcaccagtcctatattgatttgtgtttaatgcggtttcaaatgg

SEQ ID NO: 37210 - protein, 343 aa, Arabidopsis thaliana
  peptide (1)..(343): Ceres Seq. ID no. 12384787
IILGLTETHNKTKRKRYNMGGWAIAVHGGAGIDPNLPAERQEEAKQLLTRCLNLGIIALRSNVSAIDVVELVIRELETDPLFNSGRGSSLTEKGTVEMEASIMDGTKRRCGAVSGITTVKNPISLARLVMDKSPHSYLAFSGAEDFARKQGVEIVDNEYFVTDDNVGMLKLAKEANSILFDYRIPPMGCAGAAATDSPIQMNGLPISIYAPETVGCVVVDGKGHCAAGTSTGGLMNKMMGRIGDSPLIGAGTYASEFCGVSCTGEGEAIIRATLARDVSAVMEYKGLNLQEAVDYVIKHRLDEGFAGLIAVSNKGEVVCGFNSNGMFRGCATEDGFMDVAIWE

SEQ ID NO: 37211 - protein, 325 aa, Arabidopsis thaliana
  peptide (1)..(325): Ceres Seq. ID no. 12384788
MGGWAIAVHGGAGIDPNLPAERQEEAKQLLTRCLNLGIIALRSNVSAIDVVELVIRELETDPLFNSGRGSSLTEKGTVEMEASIMDGTKRRCGAVSGITTVKNPISLARLVMDKSPHSYLAFSGAEDFARKQGVEIVDNEYFVTDDNVGMLKLAKEANSILFDYRIPPMGCAGAAATDSPIQMNGLPISIYAPETVGCVVVDGKGHCAAGTSTGGLMNKMMGRIGDSPLIGAGTYASEFCGVSCTGEGEAIIRATLARDVSAVMEYKGLNLQEAVDYVIKHRLDEGFAGLIAVSNKGEVVCGFNSNGMFRGCATEDGFMDVAIWE

SEQ ID NO: 37212 - protein, 246 aa, Arabidopsis thaliana
  peptide (1)..(246): Ceres Seq. ID no. 12384789
MEASIMDGTKRRCGAVSGITTVKNPISLARLVMDKSPHSYLAFSGAEDFARKQGVEIVDNEYFVTDDNVGMLKLAKEANSILFDYRIPPMGCAGAAATDSPIQMNGLPISIYAPETVGCVVVDGKGHCAAGTSTGGLMNKMMGRIGDSPLIGAGTYASEFCGVSCTGEGEAIIRATLARDVSAVMEYKGLNLQEAVDYVIKHRLDEGFAGLIAVSNKGEVVCGFNSNGMFRGCATEDGFMDVAIWE

SEQ ID NO: 37213 - DNA, 909 bp, Arabidopsis thaliana
  misc_feature (1)..(909): Ceres Seq. ID no. 13489143
  misc_feature (1)..(909): Ortholog of  Ceres SEQ ID NO 12626248 as cited in SEQ ID NO 65768
caaagagtataaaaaatatctcatcgagcttgaaaataattaatcacttgctaattctaagcttcttctctttccaaaaatggcgtcatcatcggctttagctctcaggagacttctctcttcttccaccgtcgccgtccctcgcgccttaagagccgttcgtccggtggctgcttcatctcgcctcttcaataccaacgccgccagaaactatgaagacggtgtcgataggaaccatcactcaaaccgacatgtttctcgccacggcggcgatttcttctcacatatactcgatccgtttactccaacgagaagcttgagccagatgctgaatttcatggaccaggtaagcgaaatccctttggtatcagctactcgtggaatgggagcttctggagttagacgtggttggaacgtgaaagagaaagacgacgcgttgcatctaaggatagatatgccgggactaagcagagaggatgtgaaattggctttggaacagaacacattggtgattagaggagaaggggaaacagaggagggagaagatgtttctggagatggacggaggtttacgagtaggattgagttaccggagaaagtatacaagactgatgagattaaggcggaaatgaagaatggtgtgttgaaagtggtgattccaaagattaaagaggatgagcgtaacaatattcgtcacataaacgttgactagagtgttttattttggattgtttgagatggaatggaagtaagtgagtgaatttgtgaactttaaggtgtcctttggtgaatcaaggagaatgacatttcccacggtcctatgtgttcgggattttgacttttttcgttacatcaatgatctatgtacgtttgactactttcatatcataggttcggattttgtttccc

SEQ ID NO: 37214 - protein, 210 aa, Arabidopsis thaliana
  peptide (1)..(210): Ceres Seq. ID no. 13489144
MASSSALALRRLLSSSTVAVPRALRAVRPVAASSRLFNTNAARNYEDGVDRNHHSNRHVSRHGGDFFSHILDPFTPTRSLSQMLNFMDQVSEIPLVSATRGMGASGVRRGWNVKEKDDALHLRIDMPGLSREDVKLALEQNTLVIRGEGETEEGEDVSGDGRRFTSRIELPEKVYKTDEIKAEMKNGVLKVVIPKIKEDERNNIRHINVD

SEQ ID NO: 37215 - protein, 128 aa, Arabidopsis thaliana
  peptide (1)..(128): Ceres Seq. ID no. 13489145
MLNFMDQVSEIPLVSATRGMGASGVRRGWNVKEKDDALHLRIDMPGLSREDVKLALEQNTLVIRGEGETEEGEDVSGDGRRFTSRIELPEKVYKTDEIKAEMKNGVLKVVIPKIKEDERNNIRHINVD

SEQ ID NO: 37216 - protein, 124 aa, Arabidopsis thaliana
  peptide (1)..(124): Ceres Seq. ID no. 13489146
MDQVSEIPLVSATRGMGASGVRRGWNVKEKDDALHLRIDMPGLSREDVKLALEQNTLVIRGEGETEEGEDVSGDGRRFTSRIELPEKVYKTDEIKAEMKNGVLKVVIPKIKEDERNNIRHINVD

SEQ ID NO: 37217 - DNA, 1076 bp, Arabidopsis thaliana
  misc_feature (1)..(1076): Ceres Seq. ID no. 13489405
  misc_feature (1)..(1076): Ortholog of  Ceres SEQ ID NO 14311912 as cited in SEQ ID NO 51609
  misc_feature (1)..(1076): Ortholog of  Ceres SEQ ID NO 14307377 as cited in SEQ ID NO 54487
  misc_feature (1)..(1076): Ortholog of  Ceres SEQ ID NO 14312933 as cited in SEQ ID NO 58936
aaatgtgtataaatgaaatctctttcttctttagaattactgtttctctccgctacaaataccagatttttctctctctcgtcgaaagcaaaacagtctcctttctctatcttctgctcatatcagccattgacacagttgctttgggtttccctcaaacggcgccgattgtctggattttgaccactgatggccttagatcaatcttttgaagatgctgctttacttggagaactctatggagaaggtgcattttgtttcaagagcaagaaacctgaacccattacagtctcggttccttctgatgatactgatgattcgaattttgactgcaatatttgcttagactcggtgcaagaacctgttgtgactctctgtggtcacctcttttgctggccttgtattcacaaatggcttgatgtacagagcttctcaacaagtgatgaataccaaagacatagacagtgtcctgtttgtaaatctaaagtttctcattctactttggttcctttgtatggtagaggccgttgtactactcaggaggaaggtaaaaacagtgtgcctaaaagacccgtaggaccggtttatcggcttgaaatgccgaattcaccttatgcaagtactgatctgcggttatcacaacgggttcatttcaatagcccacaggaaggttactaccctgtctcaggggtgatgagctcgaacagtttatcatactctgctgttttggatccggtgatggtgatggttggagaaatggtagctacgaggttgtttggaacacgagtgatggatagatttgcgtatccggacacttacaatctcgcagggactagcgggccgaggatgagaaggcggataatgcaggcagataaatcgctgggaagaatcttcttcttctttatgtgttgtgttgttctgtgtcttctcttgttttaggttttcatagctagcttggttctgctactgttcagtttcttcaggtgtaaggaaaacatagtcaaagaaatgtacatttgtgttggaaacaaatcaaagttgcttaatgttgaggaatgaggagtttatgttgggtt

SEQ ID NO: 37218 - protein, 249 aa, Arabidopsis thaliana
  peptide (1)..(249): Ceres Seq. ID no. 13489406
MALDQSFEDAALLGELYGEGAFCFKSKKPEPITVSVPSDDTDDSNFDCNICLDSVQEPVVTLCGHLFCWPCIHKWLDVQSFSTSDEYQRHRQCPVCKSKVSHSTLVPLYGRGRCTTQEEGKNSVPKRPVGPVYRLEMPNSPYASTDLRLSQRVHFNSPQEGYYPVSGVMSSNSLSYSAVLDPVMVMVGEMVATRLFGTRVMDRFAYPDTYNLAGTSGPRMRRRIMQADKSLGRIFFFFMCCVVLCLLLF

SEQ ID NO: 37219 - DNA, 1013 bp, Arabidopsis thaliana
  misc_feature (1)..(1013): Ceres Seq. ID no. 12420931
  misc_feature (1)..(1013): Ortholog of  Ceres SEQ ID NO 14304830 as cited in SEQ ID NO 54884
  misc_feature (1)..(1013): Ortholog of  Ceres SEQ ID NO 14316297 as cited in SEQ ID NO 57465
  misc_feature (1)..(1013): Ortholog of  Ceres SEQ ID NO 12784351 as cited in SEQ ID NO 60968
  misc_feature (1)..(1013): Ortholog of  Ceres SEQ ID NO 13584213 as cited in SEQ ID NO 63690
agtgaaccggagggagacagcgagatgaggccggagatagttctgttcggcgactcgatcacggcgcagtcttttaggtccggcggttggggatctgctcttgccgacgcttactctcgcaaggctgatgttgtggttcgaggctacggcggctacaacacccgatgggctctcttcttgcttcatcacatcttccctctcggctcttcgtctcctcctgttgctacgacgatattcttcggtgcaaacgatgcagctctcaaaggaagaaccagtgatagacaacatgtgccggtggaagagtacacagataatgtcagaaagattgttcagcatttgaagaaatgttcacctacaatgctaattgtgcttataactccaccaccaattgatgaagctggacgtcaaagttatgcagaatcaatctacggtgagaaagctatgaaagagcctgagagaacaaacgaaacaacaggggtatatgcacaacattgtgttgcattggccgaggaactcggtctgcgatgtgtcaacttatggtctaagatgcaggaaaccaatgattggcagaaaaagtacctaagtgatgggctccatctcacgcctgaaggcaatggggtagtttttgatgaagtctcgagagtttttagagaagcttggctctctcccgaagaaatgccgtttgatttcccccatcattcgcatatcgatggtaaaaacccatcgaaagcttttgaagagcgttgcttataacgatcatccccaaattcatgagcaggtttgttttgatttaaattcatgaacacgtttcaatgttgtgatttagaaaactctcggatgtgaataaatacctaaaaagtgcatcatcactagagatcgttttcaagagaaatgaacttatgatgtacttactatatgttgtgacttttgacttatgtacctgcactagctttctatcttccttgctatatatttcagtctgaaagattttttttaatcttcttttcaatgac

SEQ ID NO: 37220 - protein, 250 aa, Arabidopsis thaliana
  peptide (1)..(250): Ceres Seq. ID no. 12420932
SEPEGDSEMRPEIVLFGDSITAQSFRSGGWGSALADAYSRKADVVVRGYGGYNTRWALFLLHHIFPLGSSSPPVATTIFFGANDAALKGRTSDRQHVPVEEYTDNVRKIVQHLKKCSPTMLIVLITPPPIDEAGRQSYAESIYGEKAMKEPERTNETTGVYAQHCVALAEELGLRCVNLWSKMQETNDWQKKYLSDGLHLTPEGNGVVFDEVSRVFREAWLSPEEMPFDFPHHSHIDGKNPSKAFEERCL

SEQ ID NO: 37221 - protein, 242 aa, Arabidopsis thaliana
  peptide (1)..(242): Ceres Seq. ID no. 12420933
MRPEIVLFGDSITAQSFRSGGWGSALADAYSRKADVVVRGYGGYNTRWALFLLHHIFPLGSSSPPVATTIFFGANDAALKGRTSDRQHVPVEEYTDNVRKIVQHLKKCSPTMLIVLITPPPIDEAGRQSYAESIYGEKAMKEPERTNETTGVYAQHCVALAEELGLRCVNLWSKMQETNDWQKKYLSDGLHLTPEGNGVVFDEVSRVFREAWLSPEEMPFDFPHHSHIDGKNPSKAFEERCL

SEQ ID NO: 37222 - protein, 131 aa, Arabidopsis thaliana
  peptide (1)..(131): Ceres Seq. ID no. 12420934
MLIVLITPPPIDEAGRQSYAESIYGEKAMKEPERTNETTGVYAQHCVALAEELGLRCVNLWSKMQETNDWQKKYLSDGLHLTPEGNGVVFDEVSRVFREAWLSPEEMPFDFPHHSHIDGKNPSKAFEERCL

SEQ ID NO: 37223 - DNA, 3652 bp, Arabidopsis thaliana
  misc_feature (1)..(3652): Ceres Seq. ID no. 13648943
  misc_feature (1)..(3652): Ortholog of  Ceres SEQ ID NO 14303524 as cited in SEQ ID NO 59500
  misc_feature (1)..(3652): Ortholog of  Ceres SEQ ID NO 14313220 as cited in SEQ ID NO 66007
  misc_feature (1)..(3652): Ortholog of  Ceres SEQ ID NO 13658778 as cited in SEQ ID NO 66511
ggactcgcgcgcctgcaggtcgacactagtggatccaaagaattcgcggccgcgtcgactacggctgcgagaagacgacagaaggggatcccaagattctcctcttcgtcttccttataaactatctctctgtagagaagaaagcttggatccagattgagagagattcagagagtcacatcaccacactccatcttcagatctcatgatttaaactattccgacgtttcggtgttggaagcaactaagtgacgaatggaatccgaaggagaaaccgcgggaaagccgatgaagaacattgttccgcagacttgccagatctgtagtgacaatgttggcaagactgttgatggagatcgttttgtggcttgtgatatttgttcattcccagtttgtcggccttgctacgagtatgagaggaaagatgggaatcaatcttgtcctcagtgcaaaaccagatacaagaggctcaaaggtagtcctgctattcctggtgataaagacgaggatggcttagctgatgaaggtactgttgagttcaactaccctcagaaggagaaaatttcagagcggatgcttggttggcatcttactcgtgggaagggagaggaaatgggggaaccccagtatgataaagaggtctctcacaatcatcttcctcgtctcacgagcagacaagatacttcaggagagttttctgctgcctcacctgaacgcctctctgtatcttctactatcgctgggggaaagcgccttccctattcatcagatgtcaatcaatcaccaaatagaaggattgtggatcctgttggactcgggaatgtagcttggaaggagagagttgatggctggaaaatgaagcaagagaagaatactggtcctgtcagcacgcaggctgcttctgaaagaggtggagtagatattgatgccagcacagatatcctagcagatgaggctctgctgaatgacgaagcgaggcagcctctgtcaaggaaagtttcaattccttcatcacggatcaatccttacagaatggttattatgctgcggcttgttatcctttgtctcttcttgcattaccgtataacaaacccagtgccaaatgcctttgctctatggctggtctctgtgatatgtgagatctggtttgccttatcctggattttggatcagtttcccaagtggtttcctgtgaaccgtgaaacctacctcgacaggcttgctttaagatatgatcgtgaaggtgagccatcacagttagctgctgttgacattttcgtgagtactgttgaccccttgaaggagccaccccttgtgacagccaacacagtgctctctattctggctgttgactacccagttgacaaggtgtcctgttatgtttctgatgatggtgctgctatgttatcatttgaatcacttgcagaaacatcagagtttgctcgtaaatgggtaccattttgcaagaaatatagcatagagcctcgtgcaccagaatggtactttgctgcgaaaatagattacttgaaggataaagttcagacatcatttgtcaaagatcgtagagctatgaagagggaatatgaggaatttaaaatccgaatcaatgcacttgtttccaaagccctaaaatgtcctgaagaagggtgggttatgcaagatggcacaccgtggcctggaaataatacaagggaccatccaggaatgatccaggtcttcttagggcaaaatggtggacttgatgcagagggcaatgagctcccgcgtttggtatatgtttctcgagaaaagcgaccaggattccagcaccacaaaaaggctggtgctatgaatgcactggtgagagtttcagcagttcttaccaatggacctttcatcttgaatcttgattgtgatcattacataaataacagcaaagccttaagagaagcaatgtgcttcctgatggacccaaacctcgggaagcaagtttgttatgttcagttcccacaaagatttgatggtatcgataagaacgatagatatgctaatcgtaataccgtgttctttgatattaacttgagaggtttagatgggattcaaggacctgtatatgtcggaactggatgtgttttcaacagaacagcattatacggttatgaacctccaataaaagtaaaacacaagaagccaagtcttttatctaagctctgtggtggatcaagaaagaagaattccaaagctaagaaagagtcggacaaaaagaaatcaggcaggcatactgactcaactgttcctgtattcaacctcgatgacatagaagagggagttgaaggtgctggttttgatgatgaaaaggcgctcttaatgtcgcaaatgagcctggagaagcgatttggacagtctgctgtttttgttgcttctaccctaatggaaaatggtggtgttcctccttcagcaactccagaaaaccttctcaaagaggctatccatgtcattagttgtggttatgaggataagtcagattggggaatggagattggatggatctatggttctgtgacagaagatattctgactgggttcaaaatgcatgcccgtggatggcgatccatttactgcatgcctaagcttccagctttcaagggttctgctcctatcaatctttcagatcgtctgaaccaagtgctgaggtgggctttaggttcagttgagattctcttcagtcggcattgtcctatatggtatggttacaatgggaggctaaaatttcttgagaggtttgcgtatgtgaacaccaccatctaccctatcacctccattcctcttctcatgtattgtacattgccagccgtttgtctcttcaccaaccagtttattattcctcagattagtaacattgcaagtatatggtttctgtctctctttctctccattttcgccacgggtatactagaaatgaggtggagtggcgtaggcatagacgaatggtggagaaacgagcagttttgggtcattggtggagtatccgctcatttattcgctgtgtttcaaggtatcctcaaagtccttgccggtattgacacaaacttcacagttacctcaaaagcttcagatgaagacggagactttgctgagctctacttgttcaaatggacaacacttctgattccgccaacgacgctgctcattgtaaacttagtgggagttgttgcaggagtctcttatgctatcaacagtggataccaatcatggggaccactctttggtaagttgttctttgccttctgggtgattgttcacttgtaccctttcctcaagggtttgatgggtcgacagaaccggactcctaccattgttgtggtctggtctgttctcttggcttctatcttctcgttgttgtgggttaggattgatcccttcactagccgagtcactggcccggacattctggaatgtggaatcaactgttgagaagcgagcaaatatttacctgttttgagggttaaaaaaaacacagaatttaaattatttttcattgttttatttgttcacttttttacttttgttgtgtgtatctgtctgttcgttcttctgtcttggtgtcataaatttatgtgtagaatatatcttactctagttactttggaaagttataattaaagtgaaagcc

SEQ ID NO: 37224 - protein, 1065 aa, Arabidopsis thaliana
  peptide (1)..(1065): Ceres Seq. ID no. 13648944
MESEGETAGKPMKNIVPQTCQICSDNVGKTVDGDRFVACDICSFPVCRPCYEYERKDGNQSCPQCKTRYKRLKGSPAIPGDKDEDGLADEGTVEFNYPQKEKISERMLGWHLTRGKGEEMGEPQYDKEVSHNHLPRLTSRQDTSGEFSAASPERLSVSSTIAGGKRLPYSSDVNQSPNRRIVDPVGLGNVAWKERVDGWKMKQEKNTGPVSTQAASERGGVDIDASTDILADEALLNDEARQPLSRKVSIPSSRINPYRMVIMLRLVILCLFLHYRITNPVPNAFALWLVSVICEIWFALSWILDQFPKWFPVNRETYLDRLALRYDREGEPSQLAAVDIFVSTVDPLKEPPLVTANTVLSILAVDYPVDKVSCYVSDDGAAMLSFESLAETSEFARKWVPFCKKYSIEPRAPEWYFAAKIDYLKDKVQTSFVKDRRAMKREYEEFKIRINALVSKALKCPEEGWVMQDGTPWPGNNTRDHPGMIQVFLGQNGGLDAEGNELPRLVYVSREKRPGFQHHKKAGAMNALVRVSAVLTNGPFILNLDCDHYINNSKALREAMCFLMDPNLGKQVCYVQFPQRFDGIDKNDRYANRNTVFFDINLRGLDGIQGPVYVGTGCVFNRTALYGYEPPIKVKHKKPSLLSKLCGGSRKKNSKAKKESDKKKSGRHTDSTVPVFNLDDIEEGVEGAGFDDEKALLMSQMSLEKRFGQSAVFVASTLMENGGVPPSATPENLLKEAIHVISCGYEDKSDWGMEIGWIYGSVTEDILTGFKMHARGWRSIYCMPKLPAFKGSAPINLSDRLNQVLRWALGSVEILFSRHCPIWYGYNGRLKFLERFAYVNTTIYPITSIPLLMYCTLPAVCLFTNQFIIPQISNIASIWFLSLFLSIFATGILEMRWSGVGIDEWWRNEQFWVIGGVSAHLFAVFQGILKVLAGIDTNFTVTSKASDEDGDFAELYLFKWTTLLIPPTTLLIVNLVGVVAGVSYAINSGYQSWGPLFGKLFFAFWVIVHLYPFLKGLMGRQNRTPTIVVVWSVLLASIFSLLWVRIDPFTSRVTGPDILECGINC

SEQ ID NO: 37225 - protein, 1054 aa, Arabidopsis thaliana
  peptide (1)..(1054): Ceres Seq. ID no. 13648945
MKNIVPQTCQICSDNVGKTVDGDRFVACDICSFPVCRPCYEYERKDGNQSCPQCKTRYKRLKGSPAIPGDKDEDGLADEGTVEFNYPQKEKISERMLGWHLTRGKGEEMGEPQYDKEVSHNHLPRLTSRQDTSGEFSAASPERLSVSSTIAGGKRLPYSSDVNQSPNRRIVDPVGLGNVAWKERVDGWKMKQEKNTGPVSTQAASERGGVDIDASTDILADEALLNDEARQPLSRKVSIPSSRINPYRMVIMLRLVILCLFLHYRITNPVPNAFALWLVSVICEIWFALSWILDQFPKWFPVNRETYLDRLALRYDREGEPSQLAAVDIFVSTVDPLKEPPLVTANTVLSILAVDYPVDKVSCYVSDDGAAMLSFESLAETSEFARKWVPFCKKYSIEPRAPEWYFAAKIDYLKDKVQTSFVKDRRAMKREYEEFKIRINALVSKALKCPEEGWVMQDGTPWPGNNTRDHPGMIQVFLGQNGGLDAEGNELPRLVYVSREKRPGFQHHKKAGAMNALVRVSAVLTNGPFILNLDCDHYINNSKALREAMCFLMDPNLGKQVCYVQFPQRFDGIDKNDRYANRNTVFFDINLRGLDGIQGPVYVGTGCVFNRTALYGYEPPIKVKHKKPSLLSKLCGGSRKKNSKAKKESDKKKSGRHTDSTVPVFNLDDIEEGVEGAGFDDEKALLMSQMSLEKRFGQSAVFVASTLMENGGVPPSATPENLLKEAIHVISCGYEDKSDWGMEIGWIYGSVTEDILTGFKMHARGWRSIYCMPKLPAFKGSAPINLSDRLNQVLRWALGSVEILFSRHCPIWYGYNGRLKFLERFAYVNTTIYPITSIPLLMYCTLPAVCLFTNQFIIPQISNIASIWFLSLFLSIFATGILEMRWSGVGIDEWWRNEQFWVIGGVSAHLFAVFQGILKVLAGIDTNFTVTSKASDEDGDFAELYLFKWTTLLIPPTTLLIVNLVGVVAGVSYAINSGYQSWGPLFGKLFFAFWVIVHLYPFLKGLMGRQNRTPTIVVVWSVLLASIFSLLWVRIDPFTSRVTGPDILECGINC

SEQ ID NO: 37226 - protein, 959 aa, Arabidopsis thaliana
  peptide (1)..(959): Ceres Seq. ID no. 13648946
MLGWHLTRGKGEEMGEPQYDKEVSHNHLPRLTSRQDTSGEFSAASPERLSVSSTIAGGKRLPYSSDVNQSPNRRIVDPVGLGNVAWKERVDGWKMKQEKNTGPVSTQAASERGGVDIDASTDILADEALLNDEARQPLSRKVSIPSSRINPYRMVIMLRLVILCLFLHYRITNPVPNAFALWLVSVICEIWFALSWILDQFPKWFPVNRETYLDRLALRYDREGEPSQLAAVDIFVSTVDPLKEPPLVTANTVLSILAVDYPVDKVSCYVSDDGAAMLSFESLAETSEFARKWVPFCKKYSIEPRAPEWYFAAKIDYLKDKVQTSFVKDRRAMKREYEEFKIRINALVSKALKCPEEGWVMQDGTPWPGNNTRDHPGMIQVFLGQNGGLDAEGNELPRLVYVSREKRPGFQHHKKAGAMNALVRVSAVLTNGPFILNLDCDHYINNSKALREAMCFLMDPNLGKQVCYVQFPQRFDGIDKNDRYANRNTVFFDINLRGLDGIQGPVYVGTGCVFNRTALYGYEPPIKVKHKKPSLLSKLCGGSRKKNSKAKKESDKKKSGRHTDSTVPVFNLDDIEEGVEGAGFDDEKALLMSQMSLEKRFGQSAVFVASTLMENGGVPPSATPENLLKEAIHVISCGYEDKSDWGMEIGWIYGSVTEDILTGFKMHARGWRSIYCMPKLPAFKGSAPINLSDRLNQVLRWALGSVEILFSRHCPIWYGYNGRLKFLERFAYVNTTIYPITSIPLLMYCTLPAVCLFTNQFIIPQISNIASIWFLSLFLSIFATGILEMRWSGVGIDEWWRNEQFWVIGGVSAHLFAVFQGILKVLAGIDTNFTVTSKASDEDGDFAELYLFKWTTLLIPPTTLLIVNLVGVVAGVSYAINSGYQSWGPLFGKLFFAFWVIVHLYPFLKGLMGRQNRTPTIVVVWSVLLASIFSLLWVRIDPFTSRVTGPDILECGINC

SEQ ID NO: 37227 - DNA, 846 bp, Arabidopsis thaliana
  misc_feature (1)..(846): Ceres Seq. ID no. 12393939
  misc_feature (1)..(846): Ortholog of  Ceres SEQ ID NO 12624019 as cited in SEQ ID NO 61713
atcctgatcgggaaacccaaaacgagtggtcgaatagtttccgactgattcttccgaggcttgaagctcaatagctatggcttctctttcagtctcttcctcttcaaccatcatcgattcaagagctcctccttctcgactagcctccgcctccgcctcttctccgtcgtgcatttcacttcccacacttccgattcagtctcatacccgtgccgctaaagccactgcttactgtcggaagattgtgaggaacgttgtgacgagagctactactgaagttggtgaagctcctgccactactaccgaagctgagactactgagttacctgaaatcgtcaagactgctcaagaagcttgggagaaagtggatgacaagtacgctattggttctcttgcctttgctagtgtagtggctctttggggttctgctggaatgatttcggcaatcgataggcttccattggttcctggtgttcttgaacttgtaggcatcggttacacaggatggttcacttacaagaacctggtcttcaaaccagacagggaggctttgtttgagaaggtcaagagcacatacaaagacatattagggagcagctgaatcaaaggaggaagaagaagaagaagagcctttttgaggccattcatgaattggaatgaaggatatcaaaagaatctaacacaaaggccacgtccttccttcaatctttccttcttgtaactaaataattttcatcctttctctctctctgtctctggtcttttttagctcaaagtatcatccatttatgtcaaagtgttgtaaattcctcaagactatatatgagatgttttgtttcattttcc

SEQ ID NO: 37228 - protein, 174 aa, Arabidopsis thaliana
  peptide (1)..(174): Ceres Seq. ID no. 12393940
MASLSVSSSSTIIDSRAPPSRLASASASSPSCISLPTLPIQSHTRAAKATAYCRKIVRNVVTRATTEVGEAPATTTEAETTELPEIVKTAQEAWEKVDDKYAIGSLAFASVVALWGSAGMISAIDRLPLVPGVLELVGIGYTGWFTYKNLVFKPDREALFEKVKSTYKDILGSS

SEQ ID NO: 37229 - DNA, 757 bp, Arabidopsis thaliana
  misc_feature (1)..(757): Ceres Seq. ID no. 12673410
  misc_feature (1)..(757): Ortholog of  Ceres SEQ ID NO 13581866 as cited in SEQ ID NO 52179
  misc_feature (1)..(757): Ortholog of  Ceres SEQ ID NO 14315451 as cited in SEQ ID NO 59289
atgattccttgctctaagcttcaccactacctctgatctgatttataccaaatccaacttttcttctttcaaaaagtaaaaaaatcaatcatttataatttattatggagaagtgagagcaagtgttagcttttgatctttcttatattcttctctgaaatagtaacacactgtgaagagtttttcctacatctgaattttgtctgatccagctgagaacaggaaaaagaagaaaatggcgtttgtgacaactgcggaagtttgtgacgcgaatcaagagctgattcggagtggtcagctacgagctttgcaacccattttccagatttatggccgtcgacaaatattctcaggaccagttgtcactgtcaaagtttttgaagacaatggcttaatccgtcaattcatcgaggagaaaggaaacggtagagttcttgtggtggatggtggagggagtcaacgatgtgcaatactcggaggtaaccccgttgttcaagctcagaacaacggatgggcaggaatcgttgtgaacggatgcatcagagacgtcgatgagatcaacggttgtgatatcggagtgagagctttggcctctcatccgataaaagcgagtaagaaaggacttggagaacaacgagttccggtaaatatcgcagggactcggatttgtgatggtgaatggctttatgcagatactgatgggattcttgtctcccaaattgagttatccgtttaataaaaaaggctttgatcagtt

SEQ ID NO: 37230 - protein, 166 aa, Arabidopsis thaliana; identical to SEQ ID NO: 29350
  peptide (1)..(166): Ceres Seq. ID no. 12673411

SEQ ID NO: 37231 - DNA, 727 bp, Arabidopsis thaliana
  misc_feature (1)..(727): Ceres Seq. ID no. 12420803
  misc_feature (1)..(727): Ortholog of  Ceres SEQ ID NO 15172472 as cited in SEQ ID NO 55361
atgccttcttctcatttctcaccaactccctccaaacccaacaaaagtgtttatattagcaaagccgccaaagtgtaaacgaaagtttataaatttcatttctgtgatcttacgtaattggaggaagatcaaaattttcaatccccattcttcgattgcttcaattgaagtttctccgatggcgcaagttagcagaatctgcaatggtgtgcagaacccatctcttatctccaatctctcgaaatccagtcaacgcaaatctcccttatcggtttctctgaagacgcagcagcatccacgagcttatccgatttcgtcgtcgtggggattgaagaagagtgggatggacgttaattggctctgaccttcgtcctcttaaggtcatgtcttctgtttccacggcggagaaagcgtcggagattgtacttcaacccattagagaaatctccggtcttattaagcttcctggctccaagtctctatcaaatcggatcctgcttctcgctgctctatctgagggaacaactgtagtggacaacttgttgaatagcgatgacatcaattacatgcttgatgcgttgaagagattgggacttaatgtggaaactgacagtgaaaataatcgtgctgtagttgaaggatgtggcgggatattcccagcttccatagattcaaagagtgatatcgaactttacctcggtaatgcaggaacagcaatgcgtccact

SEQ ID NO: 37232 - protein, 120 aa, Arabidopsis thaliana
  peptide (1)..(120): Ceres Seq. ID no. 12420804
CLLLISHQLPPNPTKVFILAKPPKCKRKFINFISVILRNWRKIKIFNPHSSIASIEVSPMAQVSRICNGVQNPSLISNLSKSSQRKSPLSVSLKTQQHPRAYPISSSWGLKKSGMDVNWL

SEQ ID NO: 37233 - protein, 114 aa, Arabidopsis thaliana
  peptide (1)..(114): Ceres Seq. ID no. 12420805
MSSVSTAEKASEIVLQPIREISGLIKLPGSKSLSNRILLLAALSEGTTVVDNLLNSDDINYMLDALKRLGLNVETDSENNRAVVEGCGGIFPASIDSKSDIELYLGNAGTAMRP

SEQ ID NO: 37234 - protein, 61 aa, Arabidopsis thaliana
  peptide (1)..(61): Ceres Seq. ID no. 12420806
MAQVSRICNGVQNPSLISNLSKSSQRKSPLSVSLKTQQHPRAYPISSSWGLKKSGMDVNWL

SEQ ID NO: 37235 - DNA, 843 bp, Arabidopsis thaliana
  misc_feature (1)..(843): Ceres Seq. ID no. 13592896
  misc_feature (1)..(843): Ortholog of  Ceres SEQ ID NO 12585335 as cited in SEQ ID NO 62940
actcaaaacataatttgctctcaataagacattaacaaagtcccagaggcagagagagagaatcagagagagagaagtcgagatgtttttccacatagtattggagcggaacatgcagttgcatcctcgtttctttggtcgtaacctaaaagaaaacctcgtatctaagctcatgaaagatgtcgaaggcacttgcagtggccgacatggatttgtagtggcgataactggaatagatacaataggaaagggtttgatcagagatgggactggttttgtcacctttccagttaaataccaatgcgtcgttttcagacctttcaaaggcgagattttggaagctgttgtcactttggtcaataagatgggattcttcgctgaagctggccctgttcagatttttgtgtctaagcatttgattccagatgatatggagtttcaagctggagacatgcctaactataccacatcagatggatcagttaagatccagaaggagtgtgaagtgagactaaagattattggaacaagagttgatgccactgcgattttttgtgtgggtaccatcaaagacgattttttgggagtcataaacgaccctgcagcggcataaaaagtttcaagcagatttcaattttggtcttctttctttcacagagaatgctgtcttgtgataaagttgtattatagttgaagttttggatctatttaatccgaaagattggaaccacgcttgttggatttaacttatatgcaagtttagtgaactttgtatttgttcaaaactgttgtcattttgagaacaatatagtaccgagtggtggatcaaattctacatgtcac

SEQ ID NO: 37236 - protein, 176 aa, Arabidopsis thaliana
  peptide (1)..(176): Ceres Seq. ID no. 13592897
MFFHIVLERNMQLHPRFFGRNLKENLVSKLMKDVEGTCSGRHGFVVAITGIDTIGKGLIRDGTGFVTFPVKYQCVVFRPFKGEILEAVVTLVNKMGFFAEAGPVQIFVSKHLIPDDMEFQAGDMPNYTTSDGSVKIQKECEVRLKIIGTRVDATAIFCVGTIKDDFLGVINDPAAA

SEQ ID NO: 37237 - protein, 166 aa, Arabidopsis thaliana
  peptide (1)..(166): Ceres Seq. ID no. 13592898
MQLHPRFFGRNLKENLVSKLMKDVEGTCSGRHGFVVAITGIDTIGKGLIRDGTGFVTFPVKYQCVVFRPFKGEILEAVVTLVNKMGFFAEAGPVQIFVSKHLIPDDMEFQAGDMPNYTTSDGSVKIQKECEVRLKIIGTRVDATAIFCVGTIKDDFLGVINDPAAA

SEQ ID NO: 37238 - protein, 146 aa, Arabidopsis thaliana
  peptide (1)..(146): Ceres Seq. ID no. 13592899
MKDVEGTCSGRHGFVVAITGIDTIGKGLIRDGTGFVTFPVKYQCVVFRPFKGEILEAVVTLVNKMGFFAEAGPVQIFVSKHLIPDDMEFQAGDMPNYTTSDGSVKIQKECEVRLKIIGTRVDATAIFCVGTIKDDFLGVINDPAAA

SEQ ID NO: 37239 - DNA, 597 bp, Arabidopsis thaliana; identical to SEQ ID NO: 28582
  misc_feature (1)..(597): Ceres Seq. ID no. 12579462
  misc_feature (1)..(597): Ortholog of  Ceres SEQ ID NO 15179080 as cited in SEQ ID NO 0

SEQ ID NO: 37240 - protein, 99 aa, Arabidopsis thaliana; identical to SEQ ID NO: 24405
  peptide (1)..(99): Ceres Seq. ID no. 12579463

SEQ ID NO: 37241 - protein, 71 aa, Arabidopsis thaliana; identical to SEQ ID NO: 24406
  peptide (1)..(71): Ceres Seq. ID no. 12579464

SEQ ID NO: 37242 - protein, 56 aa, Arabidopsis thaliana; identical to SEQ ID NO: 24407
  peptide (1)..(56): Ceres Seq. ID no. 12579465

SEQ ID NO: 37243 - DNA, 1136 bp, Arabidopsis thaliana
  misc_feature (1)..(1136): Ceres Seq. ID no. 13489147
  misc_feature (1)..(1136): Ortholog of  Ceres SEQ ID NO 13595532 as cited in SEQ ID NO 56705
tgattcttctcttgatctcttcttctttaacgtttatactttatatacatcgaaagcatttcttctttgtccgttcacatcattttcgaatttgtgttttccctagaaattgtctttttttttttctttcttatagagaaaatcaagaaaatgtaaaaaagattgatatatttatttattctcgttcaaatgaatcactctttatttgactcgttagtccatgtctcgtctcactctcttaatctctatttcctctcagatctctcaaaaagtgtagttttgtgacaaaaactgttttttaaagttagctataagaagatgaggaagatcatagggtttagaatcgggagacgagtctcaagatggatctttcgcaaaacccggatccaacgttcaggatacaaccggatacactcgacccagcaagcttgcatgctgatgagaccattagccaaactcaaaagttggggccaacgtctcaagcaaagtttcagacgcaggtctacgagaagatccgcatacatacccgttgatcataagaaagccgacccggttccaaggggacacttagctatctacgtgggtcaaaaagacggcgactgtcatagagttttggtacccatcgtttactttaaccatcctttgttcggtgagctgcttcgagaagccgaaaaagagtacggattttgccacgaaggaggtatcactattccttgtctgtattcagatttcgaacgggtcaagacccggatcgcatcggggtcaagttctcgggtatttccatggggccgtcattgccgcaattgaagacaattatggaaatagttcttaggattttcaagcttttattttctttgtagatattgttccctttcatttaccattttctaatcttgttactttttgtcactttacacttttcttgtgatagtctcaattatacagtaagctgataacgtaaataattattaagagtctaatagtgattatcgataatgatgtgattagcatggggacacttagtggtatactgtctttggacattgatataaagatgaaatggaaattggtgatgaaacaccaaaggaaaagtgtaacacgattctattctctatatgggtctactcaagattttt

SEQ ID NO: 37244 - protein, 162 aa, Arabidopsis thaliana
  peptide (1)..(162): Ceres Seq. ID no. 13489148
MRKIIGFRIGRRVSRWIFRKTRIQRSGYNRIHSTQQACMLMRPLAKLKSWGQRLKQSFRRRSTRRSAYIPVDHKKADPVPRGHLAIYVGQKDGDCHRVLVPIVYFNHPLFGELLREAEKEYGFCHEGGITIPCLYSDFERVKTRIASGSSSRVFPWGRHCRN

SEQ ID NO: 37245 - protein, 124 aa, Arabidopsis thaliana
  peptide (1)..(124): Ceres Seq. ID no. 13489149
MLMRPLAKLKSWGQRLKQSFRRRSTRRSAYIPVDHKKADPVPRGHLAIYVGQKDGDCHRVLVPIVYFNHPLFGELLREAEKEYGFCHEGGITIPCLYSDFERVKTRIASGSSSRVFPWGRHCRN

SEQ ID NO: 37246 - protein, 122 aa, Arabidopsis thaliana
  peptide (1)..(122): Ceres Seq. ID no. 13489150
MRPLAKLKSWGQRLKQSFRRRSTRRSAYIPVDHKKADPVPRGHLAIYVGQKDGDCHRVLVPIVYFNHPLFGELLREAEKEYGFCHEGGITIPCLYSDFERVKTRIASGSSSRVFPWGRHCRN

SEQ ID NO: 37247 - DNA, 913 bp, Arabidopsis thaliana
  misc_feature (1)..(913): Ceres Seq. ID no. 12604865
  misc_feature (1)..(913): Ortholog of  Ceres SEQ ID NO 13661548 as cited in SEQ ID NO 61474
accaaagatcggatttttatcagacggaaaggaggagacggaagaaaatgccggtgagagttgttgagagcaacacgcctgctcaagtttcaggaactgatcctgggaatcgatcaccacttccccctagttcacttctcggcgctggccaggcattttctggtacgcaaaatgtctctaatcaacagaaggaggaagcttggagagtcaacgtccagatacagggtattgaccttgaacatggttatctttgtggcaccatggaagctctaaacgttcccatggcagacactcctgtcataacattctgggaaggggaaatcgttgatggaaagaattataccttttacaccggaaaatgggaagcaacgagggaagatgatatgagacattggtcaaagttcccgtctttttcgcctcttcagggacaagttgaatctgatggtggcaggcaattggatcttaacaattatccttatatatttatgagatggaaagagcaatactttgtaaacgttggcacagattgtggactaacaatagctggattttactacgtatgcttctcctgcagcgatggttccatcagcggtttctattatgatccaaacagcagtccgtttcagaagctggagctgaaaacagttaacgaaggaagatctggtttcagcttttcttcttacgagttgcaatgatgaatgctaccaaaatcatcagacagcgccatatgatactctcgtctaaacatgcgatgcacgtgatccagtacattatgacgtgtcaattattataaattattagtaagatatttttttgcttagctagtagaccagaccaagtaaagaactaaaaatactattttgtcattatggtaccaagctaatagtttatctggaaaaagaacaaattgtcc

SEQ ID NO: 37248 - protein, 230 aa, Arabidopsis thaliana
  peptide (1)..(230): Ceres Seq. ID no. 12604866
QRSDFYQTERRRRKKMPVRVVESNTPAQVSGTDPGNRSPLPPSSLLGAGQAFSGTQNVSNQQKEEAWRVNVQIQGIDLEHGYLCGTMEALNVPMADTPVITFWEGEIVDGKNYTFYTGKWEATREDDMRHWSKFPSFSPLQGQVESDGGRQLDLNNYPYIFMRWKEQYFVNVGTDCGLTIAGFYYVCFSCSDGSISGFYYDPNSSPFQKLELKTVNEGRSGFSFSSYELQ

SEQ ID NO: 37249 - protein, 215 aa, Arabidopsis thaliana
  peptide (1)..(215): Ceres Seq. ID no. 12604867
MPVRVVESNTPAQVSGTDPGNRSPLPPSSLLGAGQAFSGTQNVSNQQKEEAWRVNVQIQGIDLEHGYLCGTMEALNVPMADTPVITFWEGEIVDGKNYTFYTGKWEATREDDMRHWSKFPSFSPLQGQVESDGGRQLDLNNYPYIFMRWKEQYFVNVGTDCGLTIAGFYYVCFSCSDGSISGFYYDPNSSPFQKLELKTVNEGRSGFSFSSYELQ

SEQ ID NO: 37250 - protein, 144 aa, Arabidopsis thaliana
  peptide (1)..(144): Ceres Seq. ID no. 12604868
MEALNVPMADTPVITFWEGEIVDGKNYTFYTGKWEATREDDMRHWSKFPSFSPLQGQVESDGGRQLDLNNYPYIFMRWKEQYFVNVGTDCGLTIAGFYYVCFSCSDGSISGFYYDPNSSPFQKLELKTVNEGRSGFSFSSYELQ

SEQ ID NO: 37251 - DNA, 919 bp, Arabidopsis thaliana
  misc_feature (1)..(919): Ceres Seq. ID no. 12489522
  misc_feature (1)..(919): Ortholog of  Ceres SEQ ID NO 15176514 as cited in SEQ ID NO 1114
  misc_feature (1)..(919): Ortholog of  Ceres SEQ ID NO 15173688 as cited in SEQ ID NO 61918
  misc_feature (1)..(919): Ortholog of  Ceres SEQ ID NO 13662513 as cited in SEQ ID NO 63303
  misc_feature (1)..(919): Ortholog of  Ceres SEQ ID NO 12616929 as cited in SEQ ID NO 63962
  misc_feature (1)..(919): Ortholog of  Ceres SEQ ID NO 15225803 as cited in SEQ ID NO 67623
  misc_feature (1)..(919): Ortholog of  Ceres SEQ ID NO 15174088 as cited in SEQ ID NO 0
acttaaaccctagtctagtcatttctcagactctgacctcactgatctccaatggcgaaaaccctagctcgctccacagcgtcacgcatcaccaagcgcttaatctccacctccggagccaccactccttccccttcttatatcctctcccgtcgatcaaccccggtgttctcccatgccgtcggattcatctcttccttgaatcgtttcacaacgattcgaactcgaatggataggtccggtggatcgtactctcctctaaaatccggttcgaatttcagcgaccgagcacccactgagatggcgccgttgtttcctggctgcgattatgagcattggttgattgtaatggacaaacctggaggcgaaaacgctactaagcagcaaatgattgattgttatgttcaaaccctagctaaaattatcggcagtgaggaagaagctaagaagaagatttataatgtatcgtgtgaaaggtattttggatttggttgtgagattgatgaagagacatcaaacaaacttgaaggacttcctggtgttctcttcattttaccagactcttatgttgatcaagagaacaaagattacggagctgagctgtttgtgaatggagaaatagttcaacgtcctccagagagacagagaaagatcattgagttaacgacccagagaaccaatgataaaccaaagtaccacgacaagaccagatatgtccgaagaagagagaacatgcgttgaatccaaatctgatatcagaccatacagaagttgttgttcaatgttcatgtgtctgcaagcaacagatgttttctgttttgaggtctctctctccttatgtaatggctttgtagtttggattttagaacttggaattggctaaaactattatcattgcatatacataatttggcctttg

SEQ ID NO: 37252 - protein, 229 aa, Arabidopsis thaliana
  peptide (1)..(229): Ceres Seq. ID no. 12489523
MAKTLARSTASRITKRLISTSGATTPSPSYILSRRSTPVFSHAVGFISSLNRFTTIRTRMDRSGGSYSPLKSGSNFSDRAPTEMAPLFPGCDYEHWLIVMDKPGGENATKQQMIDCYVQTLAKIIGSEEEAKKKIYNVSCERYFGFGCEIDEETSNKLEGLPGVLFILPDSYVDQENKDYGAELFVNGEIVQRPPERQRKIIELTTQRTNDKPKYHDKTRYVRRRENMR

SEQ ID NO: 37253 - protein, 170 aa, Arabidopsis thaliana
  peptide (1)..(170): Ceres Seq. ID no. 12489524
MDRSGGSYSPLKSGSNFSDRAPTEMAPLFPGCDYEHWLIVMDKPGGENATKQQMIDCYVQTLAKIIGSEEEAKKKIYNVSCERYFGFGCEIDEETSNKLEGLPGVLFILPDSYVDQENKDYGAELFVNGEIVQRPPERQRKIIELTTQRTNDKPKYHDKTRYVRRRENMR

SEQ ID NO: 37254 - protein, 146 aa, Arabidopsis thaliana
  peptide (1)..(146): Ceres Seq. ID no. 12489525
MAPLFPGCDYEHWLIVMDKPGGENATKQQMIDCYVQTLAKIIGSEEEAKKKIYNVSCERYFGFGCEIDEETSNKLEGLPGVLFILPDSYVDQENKDYGAELFVNGEIVQRPPERQRKIIELTTQRTNDKPKYHDKTRYVRRRENMR

SEQ ID NO: 37255 - DNA, 985 bp, Arabidopsis thaliana
  misc_feature (1)..(985): Ceres Seq. ID no. 12330438
  misc_feature (1)..(985): Ortholog of  Ceres SEQ ID NO 15178359 as cited in SEQ ID NO 0
aaagccctaaaaatcagagattccattttctcttatctctctctctctctttctctttttccgattctgattctattttttcttcaccaaccacacaaaacaattctacgtttgatctcttcttctttctccgtccaaattaatctctacgtttaatttctcttgttcaatcatgggacacgaaacaatgacgccggcaacaacaacgctcgtgttcacgtacggaactctaaagagaggattctcaaatcatgtcctgatgcaagatctgatccgatctggtgacgcttctttcaaaggtgtttaccaaactctagacaaatatcctctcgtctgtggaccttaccgagtccctttcctcctcaacaaacctggatcgggctatcacgtcaacggcgagctttacgcggtttctcctcgcggtctctctcgtctcgacgagctcgaaggaatcagtcgcggtcattacatccggcaaccgatacgtctcgcggcggcggaggaagaagaagaagaagaaggagatctggaaacagaggcgccgtcgtcgtgcgtggtggaggcgtattacgctcataagagttatgaggaagagctgtggaggaggaatagaggaagatcattcggcgcgtacacggaaaacgaagcgcgtggatatgtgaaacgcaatgataggcctcagcatcttagcttcttggatcatatccgtattttcgtatcttctccatgtgattgatttttatttctttcgtggtctctcccgctcgtcgcttttctatgtttgtttgtttttttctcgggacaaaagaaacaaaaaaaaaaacacaaacacaaactagttttacaacttgtaagggtcccaccagtccgtccgtccgtcgtctccgtatcgatttgattagagagattgttgggtgtaaaacttatgattcccatcttaaataagttttaggttgtttttgagtttatggttaattttccagtt

SEQ ID NO: 37256 - protein, 187 aa, Arabidopsis thaliana
  peptide (1)..(187): Ceres Seq. ID no. 12330439
MGHETMTPATTTLVFTYGTLKRGFSNHVLMQDLIRSGDASFKGVYQTLDKYPLVCGPYRVPFLLNKPGSGYHVNGELYAVSPRGLSRLDELEGISRGHYIRQPIRLAAAEEEEEEEGDLETEAPSSCVVEAYYAHKSYEEELWRRNRGRSFGAYTENEARGYVKRNDRPQHLSFLDHIRIFVSSPCD

SEQ ID NO: 37257 - protein, 182 aa, Arabidopsis thaliana
  peptide (1)..(182): Ceres Seq. ID no. 12330440
MTPATTTLVFTYGTLKRGFSNHVLMQDLIRSGDASFKGVYQTLDKYPLVCGPYRVPFLLNKPGSGYHVNGELYAVSPRGLSRLDELEGISRGHYIRQPIRLAAAEEEEEEEGDLETEAPSSCVVEAYYAHKSYEEELWRRNRGRSFGAYTENEARGYVKRNDRPQHLSFLDHIRIFVSSPCD

SEQ ID NO: 37258 - protein, 158 aa, Arabidopsis thaliana
  peptide (1)..(158): Ceres Seq. ID no. 12330441
MQDLIRSGDASFKGVYQTLDKYPLVCGPYRVPFLLNKPGSGYHVNGELYAVSPRGLSRLDELEGISRGHYIRQPIRLAAAEEEEEEEGDLETEAPSSCVVEAYYAHKSYEEELWRRNRGRSFGAYTENEARGYVKRNDRPQHLSFLDHIRIFVSSPCD

SEQ ID NO: 37259 - DNA, 2127 bp, Arabidopsis thaliana; identical to SEQ ID NO: 35399
  misc_feature (1)..(2127): Ceres Seq. ID no. 13576329
  misc_feature (1)..(2127): Ortholog of  Ceres SEQ ID NO 12625251 as cited in SEQ ID NO 62125
  misc_feature (1)..(2127): Ortholog of  Ceres SEQ ID NO 15179096 as cited in SEQ ID NO 0

SEQ ID NO: 37260 - protein, 614 aa, Arabidopsis thaliana; identical to SEQ ID NO: 35400
  peptide (1)..(614): Ceres Seq. ID no. 13576330

SEQ ID NO: 37261 - protein, 613 aa, Arabidopsis thaliana; identical to SEQ ID NO: 35401
  peptide (1)..(613): Ceres Seq. ID no. 13576331

SEQ ID NO: 37262 - protein, 458 aa, Arabidopsis thaliana; identical to SEQ ID NO: 35402
  peptide (1)..(458): Ceres Seq. ID no. 13576332

SEQ ID NO: 37263 - DNA, 1198 bp, Arabidopsis thaliana
  misc_feature (1)..(1198): Ceres Seq. ID no. 12422047
  misc_feature (1)..(1198): Ortholog of  Ceres SEQ ID NO 13581579 as cited in SEQ ID NO 58361
  misc_feature (1)..(1198): Ortholog of  Ceres SEQ ID NO 13596474 as cited in SEQ ID NO 62169
  misc_feature (1)..(1198): Ortholog of  Ceres SEQ ID NO 13598714 as cited in SEQ ID NO 62656
  misc_feature (1)..(1198): Ortholog of  Ceres SEQ ID NO 13596969 as cited in SEQ ID NO 63375
  misc_feature (1)..(1198): Ortholog of  Ceres SEQ ID NO 13597519 as cited in SEQ ID NO 64759
  misc_feature (1)..(1198): Ortholog of  Ceres SEQ ID NO 13597870 as cited in SEQ ID NO 64982
  misc_feature (1)..(1198): Ortholog of  Ceres SEQ ID NO 13595926 as cited in SEQ ID NO 67778
  misc_feature (1)..(1198): Ortholog of  Ceres SEQ ID NO 12567001 as cited in SEQ ID NO 0
acaagtcacaaccccaccatgcatgtcatatctctttcgttatcctcaatattctttttcctcttcctcacatcaaccattttgatttctccggtacaacccacaacctctaagcctccggcaccacggccccacagagagctctccgccgattactactccaagaaatgtcctcagcttgaaactctcgtcggttccgtcacttctcagcggttcaaagaagtccccatctcagctccagccaccattcgcctcttctttcacgactgcttcgttgagggttgtgatgggtcgatattgatagaaacaaagaaaggaagcaagaaattagcagagagagaagcatatgagaataaggaattgagagaggaaggatttgatagtatcatcaaggcgaaggccttggttgagtctcattgcccttctctcgtctcttgctctgatattctcgctattgccgctcgagatttcattcatctggcaggtgggccttactatcaagtgaaaaaaggaaggtgggacggaaaaagatcaacggcaaagaacgtccctccaaacatacctcgatcaaactccaccgttgatcaactcatcaagctcttcgcgtccaaaggactaaccgtagaggaactcgtcgtcctttctggttcccacaccatcggcttcgcccattgtaaaaatttccttggtcgtctctacgactacaaaggcacaaaacgacccgacccgagtcttgaccaaagattactaaaagagctccggatgtcttgtcctttttccggcggaagctctggagtcgtccttccgctcgacgctacaactccgtttgtgtttgataatggatatttcacaggtctaggaaccaacatgggccttctcgggtcggaccaagctttgttccttgacccgaggacgaagcccattgcacttgagatggcaagagataagcagaagtttctcaaggcgtttggagacgctatggataaaatgggttccattggtgtaaagagagggaagagacatggggaaatacgtacggattgtcgagtctttttatagattttctttattgtcttgtctgatggtttttgtcttgatcttgatgtgttctgtgtcatgtgtcctttaatttattagcattttcgtgattgttttgttgatagtataaggtatttttttaaagcaacactaacttatc

SEQ ID NO: 37264 - protein, 352 aa, Arabidopsis thaliana
  peptide (1)..(352): Ceres Seq. ID no. 12422048
TSHNPTMHVISLSLSSIFFFLFLTSTILISPVQPTTSKPPAPRPHRELSADYYSKKCPQLETLVGSVTSQRFKEVPISAPATIRLFFHDCFVEGCDGSILIETKKGSKKLAEREAYENKELREEGFDSIIKAKALVESHCPSLVSCSDILAIAARDFIHLAGGPYYQVKKGRWDGKRSTAKNVPPNIPRSNSTVDQLIKLFASKGLTVEELVVLSGSHTIGFAHCKNFLGRLYDYKGTKRPDPSLDQRLLKELRMSCPFSGGSSGVVLPLDATTPFVFDNGYFTGLGTNMGLLGSDQALFLDPRTKPIALEMARDKQKFLKAFGDAMDKMGSIGVKRGKRHGEIRTDCRVFL

SEQ ID NO: 37265 - protein, 346 aa, Arabidopsis thaliana
  peptide (1)..(346): Ceres Seq. ID no. 12422049
MHVISLSLSSIFFFLFLTSTILISPVQPTTSKPPAPRPHRELSADYYSKKCPQLETLVGSVTSQRFKEVPISAPATIRLFFHDCFVEGCDGSILIETKKGSKKLAEREAYENKELREEGFDSIIKAKALVESHCPSLVSCSDILAIAARDFIHLAGGPYYQVKKGRWDGKRSTAKNVPPNIPRSNSTVDQLIKLFASKGLTVEELVVLSGSHTIGFAHCKNFLGRLYDYKGTKRPDPSLDQRLLKELRMSCPFSGGSSGVVLPLDATTPFVFDNGYFTGLGTNMGLLGSDQALFLDPRTKPIALEMARDKQKFLKAFGDAMDKMGSIGVKRGKRHGEIRTDCRVFL

SEQ ID NO: 37266 - DNA, 1830 bp, Arabidopsis thaliana
  misc_feature (1)..(1830): Ceres Seq. ID no. 13592216
  misc_feature (1)..(1830): Ortholog of  Ceres SEQ ID NO 13599324 as cited in SEQ ID NO 0
gaacaactaaactaattgacatttgacaataaaaagctgaactttattatgcatctctaggctttttccttgagagtttctctctttgaagtcatttacgtatatatatataaacccttgcaccattcttcttcgtcttgttaagcttttaagaatctctactcacattttctctgtaaaaatgggaactaggttccaatcattcttgctcgtgttcttgctttcatgtttaatcctcatatcaactgcctcgtgtgagcgaaatggtgatggaacgattagaattggattgaagaagaggaaactagaccggagcaacaggctagcttctcagctttttttgaaaaaccgagggtctcattggtctcccaaacactattttcgcctgaacgatgaaaatgcggatatggttccgctgaaaaactatttggatgctcaatactatggtgacattaccattggtactcctcctcagaagttcactgtgatctttgatactggtagctccaatctctggataccatctactaaatgttacctatcggttgcttgttatttccactccaagtacaaggctagccagtcatcgtcatatagaaagaacggaaaacccgcgtctatccgctatgggacgggtgctatttctggttactttagcaatgatgatgttaaagttggtgatattgttgtgaaagagcaggaattcatagaggctactagtgagcctggtataacattcttgctagcaaagtttgatggtatcctcggtttgggtttcaaagagatttctgtaggaaactcaactccggtttggtataacatggtagaaaaaggtttagttaaggaaccgattttttcgttctggcttaaccgtaacccgaaagatccagaaggcggtgagattgttttcggtggagtcgacccgaagcacttcaaaggagagcatacttttgttcctgtgacacataaaggttactggcagtttgacatgggtgatctccaaattgctggcaaaccaaccggatattgtgctaaaggttgttctgctattgctgattccggaacttctctgctcaccggtccatcgactgtcatcacgatgatcaatcacgcgataggagcacaaggaattgtaagccgtgaatgcaaggccgtggtggatcaatacggaaaaaccatgttgaattctcttctagctcaggaggatccgaagaaagtatgctcacaaattggagtctgcgcttatgatggtacacagagtgtgagtatggggatccagtcagttgtagacgatggaacatcgggtcttttaaaccaagcgatgtgcagtgcttgcgaaatggcagccgtgtggatggagagcgaattgactcagaatcaaacacaagaacgcatactcgcttatgctgctgagctatgtgaccatataccaacccaaaaccaacaatcagcagtggactgtgggagggtttcgtcgatgcctatagtcacattctcaattggtggcagaagctttgatctaactcctcaagactatatattcaagatcggggaaggagttgagtctcagtgcaccagcggtttcacggcaatggatattgctccgcctcgtggacctctctggatcttgggtgatatcttcatgggaccataccacacagtgttcgattatgggaaaggaagagttggattcgccaaagctgcttaaacaatatctcttctttaataccctcgttttttatatgatgtttgtgaatgtgtttgtaataacttaaaacatattgctatcctagaatggtatcatcttaatacagatttttatttggtttc

SEQ ID NO: 37267 - protein, 508 aa, Arabidopsis thaliana
  peptide (1)..(508): Ceres Seq. ID no. 13592217
MGTRFQSFLLVFLLSCLILISTASCERNGDGTIRIGLKKRKLDRSNRLASQLFLKNRGSHWSPKHYFRLNDENADMVPLKNYLDAQYYGDITIGTPPQKFTVIFDTGSSNLWIPSTKCYLSVACYFHSKYKASQSSSYRKNGKPASIRYGTGAISGYFSNDDVKVGDIVVKEQEFIEATSEPGITFLLAKFDGILGLGFKEISVGNSTPVWYNMVEKGLVKEPIFSFWLNRNPKDPEGGEIVFGGVDPKHFKGEHTFVPVTHKGYWQFDMGDLQIAGKPTGYCAKGCSAIADSGTSLLTGPSTVITMINHAIGAQGIVSRECKAVVDQYGKTMLNSLLAQEDPKKVCSQIGVCAYDGTQSVSMGIQSVVDDGTSGLLNQAMCSACEMAAVWMESELTQNQTQERILAYAAELCDHIPTQNQQSAVDCGRVSSMPIVTFSIGGRSFDLTPQDYIFKIGEGVESQCTSGFTAMDIAPPRGPLWILGDIFMGPYHTVFDYGKGRVGFAKAA

SEQ ID NO: 37268 - protein, 433 aa, Arabidopsis thaliana
  peptide (1)..(433): Ceres Seq. ID no. 13592218
MVPLKNYLDAQYYGDITIGTPPQKFTVIFDTGSSNLWIPSTKCYLSVACYFHSKYKASQSSSYRKNGKPASIRYGTGAISGYFSNDDVKVGDIVVKEQEFIEATSEPGITFLLAKFDGILGLGFKEISVGNSTPVWYNMVEKGLVKEPIFSFWLNRNPKDPEGGEIVFGGVDPKHFKGEHTFVPVTHKGYWQFDMGDLQIAGKPTGYCAKGCSAIADSGTSLLTGPSTVITMINHAIGAQGIVSRECKAVVDQYGKTMLNSLLAQEDPKKVCSQIGVCAYDGTQSVSMGIQSVVDDGTSGLLNQAMCSACEMAAVWMESELTQNQTQERILAYAAELCDHIPTQNQQSAVDCGRVSSMPIVTFSIGGRSFDLTPQDYIFKIGEGVESQCTSGFTAMDIAPPRGPLWILGDIFMGPYHTVFDYGKGRVGFAKAA

SEQ ID NO: 37269 - protein, 295 aa, Arabidopsis thaliana
  peptide (1)..(295): Ceres Seq. ID no. 13592219
MVEKGLVKEPIFSFWLNRNPKDPEGGEIVFGGVDPKHFKGEHTFVPVTHKGYWQFDMGDLQIAGKPTGYCAKGCSAIADSGTSLLTGPSTVITMINHAIGAQGIVSRECKAVVDQYGKTMLNSLLAQEDPKKVCSQIGVCAYDGTQSVSMGIQSVVDDGTSGLLNQAMCSACEMAAVWMESELTQNQTQERILAYAAELCDHIPTQNQQSAVDCGRVSSMPIVTFSIGGRSFDLTPQDYIFKIGEGVESQCTSGFTAMDIAPPRGPLWILGDIFMGPYHTVFDYGKGRVGFAKAA

SEQ ID NO: 37270 - DNA, 1706 bp, Arabidopsis thaliana
  misc_feature (1)..(1706): Ceres Seq. ID no. 12336441
  misc_feature (1)..(1706): Ortholog of  Ceres SEQ ID NO 14304220 as cited in SEQ ID NO 53418
acacacacctctctttcctcaaaaaccctagatctctccctctctctctctctctctctccatctcttgtctttgccttttacgaagcttcccttcccttagtttatacattactctcagctctctttatttcactcagcttcacgttgaagacgagtttctctatttgccagatctgttatctttcacatttctggtgattgcttctctaatttcgttctgggttttactgtttccatctgaaatttacctcatttcttcgtgggttttatctgaattccgttaattcccaagttctagtgtatgatctcgttgaaatcgagttaaaaatctgatctttactcttgattctgcagatctgtttgaagaaagctatgacttgtgtttgataaagagagaagcaaaaaaaggaacagtttttatataaagatatttgctttatttgtttgttcttaattgttgccacgaaaatggcaatgccaccacctggaaatgttactactccgtctgagaaattgcagtttcctcctccggcaaattggatcccagacgagcgagatgggtttatctcctggcttcgtgcggagttcgctgcggctaacgcgatcatcgattcgctttgtcagcatctacaagcggttggggatcacaacgagtacgaatccgtgatcggaagcattcatcatcgtcgcttagcctggtctcaagtgcttactatgcagcagtttttcccagttgcagatgtttcttacaatcttcagcagattgcttggaaaaggcaacagcaaatgccacctcaaaggcattacaattctgatcaagttgggaaatttggagcaaggagatcagggcctgggtttaacaagcatcatggtggtggtgggggttacagaggagctgattcgatggcgagaaatgggcataatttcaatggcgttaacagtgatcgtgttgagcatcgggaggaagctaagttggcaagtgatgttaaggcattgtctgttgcagaagagaagagagatggtagcgagaaaccgaggagtgatagtaaagttgagaaaaaattggaagaatctgaaactcaagaggagatagtgaagaaccataagtgtaactcgggttctaaagataacagtctcatttctgagcaaaagcaggaggagaacgataaagagtgtcctgcaagcatggcaaagacttttgtggttcaagagatgtatgatgcaaaaatggttaatgttgtcgaaggattgaagctatacgacaaaatgcttgacgcaaacgaagtttctcaactcgtttctcttgtaaccaatctgagacttgctggaagaagaggtcaacttcaaagtgaggcatatgtgggttataaacggccaaatagaggacatggacgtgagatgatccaactcggtcttcctatagctgatacgccgcctgatgatgatagtatcaaagatcgaagaatagagccaatcccatcagctctttcagacatcattgaacgtttggtctcaaagcaaatcatacctgtgaaaccagacgcatgcatcattgatttcttcagcgagggagatcactcgcagcctcatatgtttgttccctggtttggacgacccatcagtgtcttgtccttgtctgaatctgattatacatttggaagagtcattgtctctgaaaatcccggcgactacaaaggctctctc

SEQ ID NO: 37271 - protein, 412 aa, Arabidopsis thaliana
  peptide (1)..(412): Ceres Seq. ID no. 12336442
MAMPPPGNVTTPSEKLQFPPPANWIPDERDGFISWLRAEFAAANAIIDSLCQHLQAVGDHNEYESVIGSIHHRRLAWSQVLTMQQFFPVADVSYNLQQIAWKRQQQMPPQRHYNSDQVGKFGARRSGPGFNKHHGGGGGYRGADSMARNGHNFNGVNSDRVEHREEAKLASDVKALSVAEEKRDGSEKPRSDSKVEKKLEESETQEEIVKNHKCNSGSKDNSLISEQKQEENDKECPASMAKTFVVQEMYDAKMVNVVEGLKLYDKMLDANEVSQLVSLVTNLRLAGRRGQLQSEAYVGYKRPNRGHGREMIQLGLPIADTPPDDDSIKDRRIEPIPSALSDIIERLVSKQIIPVKPDACIIDFFSEGDHSQPHMFVPWFGRPISVLSLSESDYTFGRVIVSENPGDYKGSL

SEQ ID NO: 37272 - protein, 410 aa, Arabidopsis thaliana
  peptide (1)..(410): Ceres Seq. ID no. 12336443
MPPPGNVTTPSEKLQFPPPANWIPDERDGFISWLRAEFAAANAIIDSLCQHLQAVGDHNEYESVIGSIHHRRLAWSQVLTMQQFFPVADVSYNLQQIAWKRQQQMPPQRHYNSDQVGKFGARRSGPGFNKHHGGGGGYRGADSMARNGHNFNGVNSDRVEHREEAKLASDVKALSVAEEKRDGSEKPRSDSKVEKKLEESETQEEIVKNHKCNSGSKDNSLISEQKQEENDKECPASMAKTFVVQEMYDAKMVNVVEGLKLYDKMLDANEVSQLVSLVTNLRLAGRRGQLQSEAYVGYKRPNRGHGREMIQLGLPIADTPPDDDSIKDRRIEPIPSALSDIIERLVSKQIIPVKPDACIIDFFSEGDHSQPHMFVPWFGRPISVLSLSESDYTFGRVIVSENPGDYKGSL

SEQ ID NO: 37273 - protein, 330 aa, Arabidopsis thaliana
  peptide (1)..(330): Ceres Seq. ID no. 12336444
MQQFFPVADVSYNLQQIAWKRQQQMPPQRHYNSDQVGKFGARRSGPGFNKHHGGGGGYRGADSMARNGHNFNGVNSDRVEHREEAKLASDVKALSVAEEKRDGSEKPRSDSKVEKKLEESETQEEIVKNHKCNSGSKDNSLISEQKQEENDKECPASMAKTFVVQEMYDAKMVNVVEGLKLYDKMLDANEVSQLVSLVTNLRLAGRRGQLQSEAYVGYKRPNRGHGREMIQLGLPIADTPPDDDSIKDRRIEPIPSALSDIIERLVSKQIIPVKPDACIIDFFSEGDHSQPHMFVPWFGRPISVLSLSESDYTFGRVIVSENPGDYKGSL

SEQ ID NO: 37274 - DNA, 1235 bp, Arabidopsis thaliana
  misc_feature (1)..(1235): Ceres Seq. ID no. 12329563
  misc_feature (1)..(1235): Ortholog of  Ceres SEQ ID NO 12562215 as cited in SEQ ID NO 20489
  misc_feature (1)..(1235): Ortholog of  Ceres SEQ ID NO 13595548 as cited in SEQ ID NO 51024
  misc_feature (1)..(1235): Ortholog of  Ceres SEQ ID NO 13582350 as cited in SEQ ID NO 56734
  misc_feature (1)..(1235): Ortholog of  Ceres SEQ ID NO 12476493 as cited in SEQ ID NO 58163
  misc_feature (1)..(1235): Ortholog of  Ceres SEQ ID NO 13597295 as cited in SEQ ID NO 63743
  misc_feature (1)..(1235): Ortholog of  Ceres SEQ ID NO 12617090 as cited in SEQ ID NO 64005
  misc_feature (1)..(1235): Ortholog of  Ceres SEQ ID NO 13597439 as cited in SEQ ID NO 64081
  misc_feature (1)..(1235): Ortholog of  Ceres SEQ ID NO 13597233 as cited in SEQ ID NO 64370
  misc_feature (1)..(1235): Ortholog of  Ceres SEQ ID NO 13623850 as cited in SEQ ID NO 0
  misc_feature (1)..(1235): Ortholog of  Ceres SEQ ID NO 14309162 as cited in SEQ ID NO 0
aactaaatcagaagattactactaaacagagtcttttttgacttgccaaaaacacatctgtctctctctctctttgcggatctgaaatggcgattcctgttatcgatttctccaaactcaatggtgaagaaagagagaagacactgtctgaaatcgctagagcttgcgaagagtggggattttttcagctggtgaaccatggtattccattggagcttctaaataaggtgaagaagctgagctcagattgctacaaaacagagagagaagaagcattcaagacttctaatcccgtgaagttgctcaacgaattggttcaaaagaactctggcgagaagctagaaaacgtggactgggaagatgtcttcactctcttggaccataaccaaaacgaatggccatccaaaattaaagagactatgggagaatacagagaagaagtgaggaagctagcgagcaagatgatggaagtgatggatgagaatttgggtttgcctaaaggttacataaagaaagctttcaatgaaggaatggaagatggagaagagacagctttctttgggactaaagtcagccattaccctccttgtcctcatcctgagctagtcaatggccttcgagctcatactgatgcaggaggtgtcgttttgcttttccaagacgatgaatatgatggccttcaggtcttgaaagacggcgagtggatcgatgttcagcctctacctaatgccattgttatcaacactggtgatcagattgaagttcttagcaacggaaggtacaagagtgcgtggcacagggtggtggcgagggaggaaggaaacagaaggtctatagcttccttctacaatccgtcgtacaaggcggcgatagggccagccacggtggcggaagaggaaggaagtgagaagaagtatccaaagtttgtgtttggagattacatggatgtttatgcaaaccagaagttcatgcctaaagagcctcgttttctagctgtaaagtctctctaaatgtactattttatttatttttacagtactatcactgttttatctacacccattatgtattttctcttaagctataaatgccaaattatatagttaaaaatttggcatctgctctccaggctttatatttttttgtttttttttgttttgccatgtgatgtatgaatctttcttgtgtgacctatgttcttagtttttgaatataaatgtgtgtgcctttttctt

SEQ ID NO: 37275 - protein, 307 aa, Arabidopsis thaliana
  peptide (1)..(307): Ceres Seq. ID no. 12329564
MAIPVIDFSKLNGEEREKTLSEIARACEEWGFFQLVNHGIPLELLNKVKKLSSDCYKTEREEAFKTSNPVKLLNELVQKNSGEKLENVDWEDVFTLLDHNQNEWPSKIKETMGEYREEVRKLASKMMEVMDENLGLPKGYIKKAFNEGMEDGEETAFFGTKVSHYPPCPHPELVNGLRAHTDAGGVVLLFQDDEYDGLQVLKDGEWIDVQPLPNAIVINTGDQIEVLSNGRYKSAWHRVVAREEGNRRSIASFYNPSYKAAIGPATVAEEEGSEKKYPKFVFGDYMDVYANQKFMPKEPRFLAVKSL

SEQ ID NO: 37276 - protein, 196 aa, Arabidopsis thaliana
  peptide (1)..(196): Ceres Seq. ID no. 12329565
MGEYREEVRKLASKMMEVMDENLGLPKGYIKKAFNEGMEDGEETAFFGTKVSHYPPCPHPELVNGLRAHTDAGGVVLLFQDDEYDGLQVLKDGEWIDVQPLPNAIVINTGDQIEVLSNGRYKSAWHRVVAREEGNRRSIASFYNPSYKAAIGPATVAEEEGSEKKYPKFVFGDYMDVYANQKFMPKEPRFLAVKSL

SEQ ID NO: 37277 - protein, 182 aa, Arabidopsis thaliana
  peptide (1)..(182): Ceres Seq. ID no. 12329566
MMEVMDENLGLPKGYIKKAFNEGMEDGEETAFFGTKVSHYPPCPHPELVNGLRAHTDAGGVVLLFQDDEYDGLQVLKDGEWIDVQPLPNAIVINTGDQIEVLSNGRYKSAWHRVVAREEGNRRSIASFYNPSYKAAIGPATVAEEEGSEKKYPKFVFGDYMDVYANQKFMPKEPRFLAVKSL

SEQ ID NO: 37278 - DNA, 1810 bp, Arabidopsis thaliana
  misc_feature (1)..(1810): Ceres Seq. ID no. 12329567
  misc_feature (1)..(1810): Ortholog of  Ceres SEQ ID NO 14305500 as cited in SEQ ID NO 0
accggaggcaaaaatcgtctctcgcttgagctgcgaagatgcaagcagtaaaaagatccaggagacatgttgaagaagagccaacaatggtagaacctaaaaccaagtacgatcgtcagctcaggatttggggggaggtaggtcaagcggccttggaagaagcgagtatctgtttactcaattgtggccctactggttccgaggctttgaagaatctcgtacttggtggtgttggtagcatcaccgttgttgatggatctaaggttcaatttggtgaccttgggaacaatttcatggtcgatgcgaagagtgttggccaatcaaaagccaaatctgtttgtgcgtttctccaagagcttaatgattctgttaacgccaagtttattgaggagaatccagacacgttgattactactaacccatctttcttctctcagttcactctcgttatagccactcagctggtggaagattcaatgttgaaacttgatagaatctgtcgagatgcaaacgttaagttggttttggttcgctcttatggccttgctgggtttgttcgcatctctgtaaaggagcaccccataattgactcaaaacctgatcattttcttgacgacctccgcctgaataatccatggcctgaactcaagagttttgtggagaccattgatctgaatgtatcagagccggccgctgcacataagcacataccttacgtcgtcattcttgtaaagatggctgaggagtgggctcaatcccatagtggtaatcttccctcaaccagggaagagaaaaaagagtttaaggatttggttaagtccaagatggtatctacggatgaagataactacaaagaagccattgaagccgctttcaaagtttttgctcctcgaggaatcagctcagaggttcaaaaattaattaatgatagttgtgctgaagtgaattcaaactcctcagctttttgggtgatggtagcggctctgaaggagtttgttttaaatgaaggtggtggagaggcaccccttgaaggttctataccagatatgacctcttcaacagaacactatatcaatttgcagaaaatctatttagccaaagccgaggctgattttcttgtcattgaggaacgagttaaaaacattttaaagaaaatcggtcgagatccgagcagcatcccaaaaccaacaatcaagagcttctgcaagaatgcaaggaaacttaaattgtgcagatatcgtatggtagaggacgagttcagaaatccttctgtaactgaaattcaaaagtatttagcggacgaggattacagtggtgcaatgggattttatattcttcttagagctgcggacagatttgctgccaactataacaagtttcctgggcagtttgatggaggaatggatgaggacatttctcgattaaaaactactgccttgagtcttcttaccgacttgggctgtaacggctcagtactcccagatgaccttatccatgagatgtgtcgctttggtgcctcagagattcatgtggtttctgcctttgttggaggaatcgcatctcaagaagtcatcaagcttgtcacaaagcagtttgttccgatgttggggacttacatcttcaatggcattgatcacaagtctcagttattgaaattgtagaagatctttccttaacacattggcttgaaacagagagaaagagctctatcatatattattcttctgattaaaagataatctttttgctactactgagaaacaaaattttcaatgacagttcagctgagaccatccgactcagaatcttc

SEQ ID NO: 37279 - protein, 540 aa, Arabidopsis thaliana
  peptide (1)..(540): Ceres Seq. ID no. 12329568
MQAVKRSRRHVEEEPTMVEPKTKYDRQLRIWGEVGQAALEEASICLLNCGPTGSEALKNLVLGGVGSITVVDGSKVQFGDLGNNFMVDAKSVGQSKAKSVCAFLQELNDSVNAKFIEENPDTLITTNPSFFSQFTLVIATQLVEDSMLKLDRICRDANVKLVLVRSYGLAGFVRISVKEHPIIDSKPDHFLDDLRLNNPWPELKSFVETIDLNVSEPAAAHKHIPYVVILVKMAEEWAQSHSGNLPSTREEKKEFKDLVKSKMVSTDEDNYKEAIEAAFKVFAPRGISSEVQKLINDSCAEVNSNSSAFWVMVAALKEFVLNEGGGEAPLEGSIPDMTSSTEHYINLQKIYLAKAEADFLVIEERVKNILKKIGRDPSSIPKPTIKSFCKNARKLKLCRYRMVEDEFRNPSVTEIQKYLADEDYSGAMGFYILLRAADRFAANYNKFPGQFDGGMDEDISRLKTTALSLLTDLGCNGSVLPDDLIHEMCRFGASEIHVVSAFVGGIASQEVIKLVTKQFVPMLGTYIFNGIDHKSQLLKL

SEQ ID NO: 37280 - protein, 524 aa, Arabidopsis thaliana
  peptide (1)..(524): Ceres Seq. ID no. 12329569
MVEPKTKYDRQLRIWGEVGQAALEEASICLLNCGPTGSEALKNLVLGGVGSITVVDGSKVQFGDLGNNFMVDAKSVGQSKAKSVCAFLQELNDSVNAKFIEENPDTLITTNPSFFSQFTLVIATQLVEDSMLKLDRICRDANVKLVLVRSYGLAGFVRISVKEHPIIDSKPDHFLDDLRLNNPWPELKSFVETIDLNVSEPAAAHKHIPYVVILVKMAEEWAQSHSGNLPSTREEKKEFKDLVKSKMVSTDEDNYKEAIEAAFKVFAPRGISSEVQKLINDSCAEVNSNSSAFWVMVAALKEFVLNEGGGEAPLEGSIPDMTSSTEHYINLQKIYLAKAEADFLVIEERVKNILKKIGRDPSSIPKPTIKSFCKNARKLKLCRYRMVEDEFRNPSVTEIQKYLADEDYSGAMGFYILLRAADRFAANYNKFPGQFDGGMDEDISRLKTTALSLLTDLGCNGSVLPDDLIHEMCRFGASEIHVVSAFVGGIASQEVIKLVTKQFVPMLGTYIFNGIDHKSQLLKL

SEQ ID NO: 37281 - protein, 455 aa, Arabidopsis thaliana
  peptide (1)..(455): Ceres Seq. ID no. 12329570
MVDAKSVGQSKAKSVCAFLQELNDSVNAKFIEENPDTLITTNPSFFSQFTLVIATQLVEDSMLKLDRICRDANVKLVLVRSYGLAGFVRISVKEHPIIDSKPDHFLDDLRLNNPWPELKSFVETIDLNVSEPAAAHKHIPYVVILVKMAEEWAQSHSGNLPSTREEKKEFKDLVKSKMVSTDEDNYKEAIEAAFKVFAPRGISSEVQKLINDSCAEVNSNSSAFWVMVAALKEFVLNEGGGEAPLEGSIPDMTSSTEHYINLQKIYLAKAEADFLVIEERVKNILKKIGRDPSSIPKPTIKSFCKNARKLKLCRYRMVEDEFRNPSVTEIQKYLADEDYSGAMGFYILLRAADRFAANYNKFPGQFDGGMDEDISRLKTTALSLLTDLGCNGSVLPDDLIHEMCRFGASEIHVVSAFVGGIASQEVIKLVTKQFVPMLGTYIFNGIDHKSQLLKL

SEQ ID NO: 37282 - DNA, 1264 bp, Arabidopsis thaliana
  misc_feature (1)..(1264): Ceres Seq. ID no. 12562497
  misc_feature (1)..(1264): Ortholog of  Ceres SEQ ID NO 13596803 as cited in SEQ ID NO 62267
tagagcttcataatccctagttgcccaaaaggattctgggttttgtgagaatgatgacgtcatgtcggaatatagatttaggtacgatgatgatggcatgtggttgtggccgtcgtcagtttccttcattagcgaagactgtttgtaagtttggtagcagcaatagaagctatggcggtctggtgactctgtttgagctagtagctgttgatctgcagactttgaatgacaatcttttatcgattgttggtgcggaaaatccggttttgatatctgcggctgagcagatttncggagctggtggtanaagaatgagaccgggtttggtattccttcacatgccacggcggaattagcaggcctaaatgaactaacaacagaacaccggcgtttggctgagatcatcgagatgatacacactgcaagcttgatacacgacgatgtgttagacgagagtgacatgcgaagaggaaaggaaacagttcatgagcttttcggcacaagagtagcggtgctagctggagatttcatgtttgctcaagcgtcatggtacttagcaaatctcgagaatcttgaagttattaagctcatcagtcaggtgatcaaagactttgcaagcggagagataaagcaggcgtccagcttatttgactgcgacaccaagctcgacgagtacttactcaaaagtttctacaagacagcctctttagtggctgcgagcaccaaaggagctgccattttcagcagagttgagcctgatgtgacagaacaaatgtacgagtttgggaagaatctcggtctctctttccagatagttgatgatattttggatttcactcagtcgacagagcagctcgggaagccagcagggagtgatttggctaaaggtaacttaacagcacctgtgattttcgctctggagagggagccaaggctaagagagatcattgagtcagagttttgtgaggcgggttctctggaagaagcgattgaagcggtgacaaaaggtggggggattaagagagcacaagaattggctagggagaaagctgatgacgctataaagaatctacagtgtctacctcgaagtggcttcaggtcggctctagaagatatggtgttgtataacctcgaaagaattgattagctttccaaaagaagttggaaacactgagacatgcttatagacttatagtacagtaaaacacacacaaaagaggaatgattgtaactcctatttcaaaagtaacaacacatgatttcg

SEQ ID NO: 37283 - protein, 245 aa, Arabidopsis thaliana
  peptide (1)..(245): Ceres Seq. ID no. 12562498
MIHTASLIHDDVLDESDMRRGKETVHELFGTRVAVLAGDFMFAQASWYLANLENLEVIKLISQVIKDFASGEIKQASSLFDCDTKLDEYLLKSFYKTASLVAASTKGAAIFSRVEPDVTEQMYEFGKNLGLSFQIVDDILDFTQSTEQLGKPAGSDLAKGNLTAPVIFALEREPRLREIIESEFCEAGSLEEAIEAVTKGGGIKRAQELAREKADDAIKNLQCLPRSGFRSALEDMVLYNLERID

SEQ ID NO: 37284 - protein, 228 aa, Arabidopsis thaliana
  peptide (1)..(228): Ceres Seq. ID no. 12562499
MRRGKETVHELFGTRVAVLAGDFMFAQASWYLANLENLEVIKLISQVIKDFASGEIKQASSLFDCDTKLDEYLLKSFYKTASLVAASTKGAAIFSRVEPDVTEQMYEFGKNLGLSFQIVDDILDFTQSTEQLGKPAGSDLAKGNLTAPVIFALEREPRLREIIESEFCEAGSLEEAIEAVTKGGGIKRAQELAREKADDAIKNLQCLPRSGFRSALEDMVLYNLERID

SEQ ID NO: 37285 - protein, 205 aa, Arabidopsis thaliana
  peptide (1)..(205): Ceres Seq. ID no. 12562500
MFAQASWYLANLENLEVIKLISQVIKDFASGEIKQASSLFDCDTKLDEYLLKSFYKTASLVAASTKGAAIFSRVEPDVTEQMYEFGKNLGLSFQIVDDILDFTQSTEQLGKPAGSDLAKGNLTAPVIFALEREPRLREIIESEFCEAGSLEEAIEAVTKGGGIKRAQELAREKADDAIKNLQCLPRSGFRSALEDMVLYNLERID

SEQ ID NO: 37286 - DNA, 1776 bp, Arabidopsis thaliana
  misc_feature (1)..(1776): Ceres Seq. ID no. 12562519
  misc_feature (1)..(1776): Ortholog of  Ceres SEQ ID NO 12611314 as cited in SEQ ID NO 56535
  misc_feature (1)..(1776): Ortholog of  Ceres SEQ ID NO 15178046 as cited in SEQ ID NO 60380
  misc_feature (1)..(1776): Ortholog of  Ceres SEQ ID NO 14312016 as cited in SEQ ID NO 60412
  misc_feature (1)..(1776): Ortholog of  Ceres SEQ ID NO 13661438 as cited in SEQ ID NO 61414
gtctcatcacttcccactttcctctctgcatttgttgtctctctctcctgaaaacccttgaattttgctacacgatctctgaaacgtgtctctttgactgacttcaatcttctttatcacttaccgtttctgggttttatgaagcaactgagctaataaaaagcttcttcttagactcggaagaagaaaaaaaacagaatctttattgtttaaagcttccaaattcgagaagagaatttgaaacgaccaagttcaggatattcgtttcttcgtctactttggtctcttcctcttctctttcgaaaagggtttattctgtcttaaaagaaacctttttgagagggtaaaaaaagcttcaattttcagagaaacacaaaaggcagaaacagagaaaaacaaatcatctaattcatgaaacagggttcaatgaatagatcgtgtctctgtagtgtcttaatcaccactgctctgatttgtggtgcttacttcatttgcaatgcttatcttgctaaagactttaaagagaagttgctgaagtgggaaatcactgataagatgcataacagtactgataagatgcagaatgcaacaacaaccagtacatgcaagaatttcaataagccagtgggtactgaagcactaccgcaaggaattatcgagaaaacatcgaacctggaaacacaacatctatggaactacgatgacacaaaaaagagaaggcctaaccattcgatgagtttgttagccatggcggtcggtatcaagcaaaaggagctagttaacaaagttatccaaaagtttcctcctcgagatttcgcggtcatgctttttcattatgatggtgttgtcgatgactggaagcagtatccatggaataatcatgcgattcatgtttccgtgatgaatcaaacaaaatggtggttcgccaagcgattcttgcatcccgatatagttgcagagtacgagtatatatttctttgggacgaagatcttggtgttggtcatttcaatcctcaacgatatctatctattgtcaaagaagaggggcttgagatatcgcaacctgctcttgacacttcaaaatcagaagtgcatcatcctataaccgctcgtcaaaaaaaatcaaaagttcatagaagaatgtataaatacaaaggtagcgggcgatgtgatgaccatagcaccaatcctccttgcatcgggtgggtggaaatgatggcacctgttttctctagagctgcatggagatgttcttggtatatgattcagaatgatttgatccatgcttggggtctggatacgcagcttggttattgtgctcaaggtgaccgaaagaaaaatgtcggtgttgttgatgcggagtacataattcattatggtcttccaacactcggtgtggttgaaaccgcttcaagcgctttgcggaatgagacagactcgaaatcaacggaatcattagagtctcgtgaagtggataatagaccagaagtgaggatgaaatcatttgtggagatgaagagattcaaggaacgttggaagaaagctgtgagggatgatacatgttgggttgatccgtattgaaatccgagcggtttaagtaaaccgaatcgaaccggattcttttccttgttgagtgtgctttgtggtccattgtataccattattttggtacatagattttgttttacttcgagaaaaattagtgtatttatgtgttttatggaccacagtgtagatttaacattttggagcattatacaaaagtgtttttgtgcc

SEQ ID NO: 37287 - protein, 389 aa, Arabidopsis thaliana
  peptide (1)..(389): Ceres Seq. ID no. 12562520
MKQGSMNRSCLCSVLITTALICGAYFICNAYLAKDFKEKLLKWEITDKMHNSTDKMQNATTTSTCKNFNKPVGTEALPQGIIEKTSNLETQHLWNYDDTKKRRPNHSMSLLAMAVGIKQKELVNKVIQKFPPRDFAVMLFHYDGVVDDWKQYPWNNHAIHVSVMNQTKWWFAKRFLHPDIVAEYEYIFLWDEDLGVGHFNPQRYLSIVKEEGLEISQPALDTSKSEVHHPITARQKKSKVHRRMYKYKGSGRCDDHSTNPPCIGWVEMMAPVFSRAAWRCSWYMIQNDLIHAWGLDTQLGYCAQGDRKKNVGVVDAEYIIHYGLPTLGVVETASSALRNETDSKSTESLESREVDNRPEVRMKSFVEMKRFKERWKKAVRDDTCWVDPY

SEQ ID NO: 37288 - protein, 384 aa, Arabidopsis thaliana
  peptide (1)..(384): Ceres Seq. ID no. 12562521
MNRSCLCSVLITTALICGAYFICNAYLAKDFKEKLLKWEITDKMHNSTDKMQNATTTSTCKNFNKPVGTEALPQGIIEKTSNLETQHLWNYDDTKKRRPNHSMSLLAMAVGIKQKELVNKVIQKFPPRDFAVMLFHYDGVVDDWKQYPWNNHAIHVSVMNQTKWWFAKRFLHPDIVAEYEYIFLWDEDLGVGHFNPQRYLSIVKEEGLEISQPALDTSKSEVHHPITARQKKSKVHRRMYKYKGSGRCDDHSTNPPCIGWVEMMAPVFSRAAWRCSWYMIQNDLIHAWGLDTQLGYCAQGDRKKNVGVVDAEYIIHYGLPTLGVVETASSALRNETDSKSTESLESREVDNRPEVRMKSFVEMKRFKERWKKAVRDDTCWVDPY

SEQ ID NO: 37289 - protein, 341 aa, Arabidopsis thaliana
  peptide (1)..(341): Ceres Seq. ID no. 12562522
MHNSTDKMQNATTTSTCKNFNKPVGTEALPQGIIEKTSNLETQHLWNYDDTKKRRPNHSMSLLAMAVGIKQKELVNKVIQKFPPRDFAVMLFHYDGVVDDWKQYPWNNHAIHVSVMNQTKWWFAKRFLHPDIVAEYEYIFLWDEDLGVGHFNPQRYLSIVKEEGLEISQPALDTSKSEVHHPITARQKKSKVHRRMYKYKGSGRCDDHSTNPPCIGWVEMMAPVFSRAAWRCSWYMIQNDLIHAWGLDTQLGYCAQGDRKKNVGVVDAEYIIHYGLPTLGVVETASSALRNETDSKSTESLESREVDNRPEVRMKSFVEMKRFKERWKKAVRDDTCWVDPY

SEQ ID NO: 37290 - DNA, 1351 bp, Arabidopsis thaliana
  misc_feature (1)..(1351): Ceres Seq. ID no. 13509099
  misc_feature (1)..(1351): Ortholog of  Ceres SEQ ID NO 13596816 as cited in SEQ ID NO 62287
aacctccactgttaataaactcaaacctctgcaattgtcttcttctcttcaactccatcatctccaccaccggcattctcgccggaatccaatggagcttaccagcttccatcgctcttctctcttattcctcatctcactaacattgatcattctcccgacgacaacaacttcaatcggagtaaactacggtcaaatcggagacaacctcccctccccaaccgacgtaatcccactaataaaatcaatcggagcaacaaaagtaaaactctacgacgcaaatccacaaatcctcaaagctttctccaacaccggaatcgaattcatcatcggactcggcaacgaatacctctccaaaatgaaagatccttcaaaagccttaacatggatcaaacaaaacgttactccatttttacctgcgactaacatcacatgcataactatcggtaacgaaatcctcgctctcaacgactcttcactcactaccaatctcctcccagcgatgcaaggagttcactctgctttaatcaccgccggtctctccgatcaaatctccgtcaccaccgcgcattctctctcgatcctcaaatcctcattcccaccttccgccggcgagtttcaaccggatctactcgattcgctaactccgatcttagaatttcaccggaaaactgattctccgttcttaatcaacgcgtatcctttcttcgcttacaaaggaaaccctaaagaagttcctttagatttcgttctgtttcaacctaatcaaggaatcgtagatccggccaccggttttcactacgataacatgttgttcgctcagatcgacgctgtctactctgctttagcggcggcggggtttaaatcgttgagagttgagatatcggagactgggtggccatcgaaaggtgacgacgatgaggtcggagctacgccggagaatgcgaagaggtataacggaaacttgattaagatgatgatgagtggtaaaaagactaaaacgcccttgaagcctaataatgatctaagtatttacgtttttgccctttttaatgagaatttgaaacctggtccgacgtcggagaggaattatggcttgtttaaacctgatgggactcaggcttattcacttgggtttgctttaaacgatgtcgtgagaggtgctagtggtggtggtaccggtggtgggaatagtagtagcggtggaggaagggataagtcaccggtgtttccggtttctccggtggccccggatagtgcgtccactggttatttagcaatttcggcttctccggtaacggtaagattcttcgaattttctttttcgttaaagttgatatcttttttttaa

SEQ ID NO: 37291 - protein, 449 aa, Arabidopsis thaliana
  peptide (1)..(449): Ceres Seq. ID no. 13509100
TSTVNKLKPLQLSSSLQLHHLHHRHSRRNPMELTSFHRSSLLFLISLTLIILPTTTTSIGVNYGQIGDNLPSPTDVIPLIKSIGATKVKLYDANPQILKAFSNTGIEFIIGLGNEYLSKMKDPSKALTWIKQNVTPFLPATNITCITIGNEILALNDSSLTTNLLPAMQGVHSALITAGLSDQISVTTAHSLSILKSSFPPSAGEFQPDLLDSLTPILEFHRKTDSPFLINAYPFFAYKGNPKEVPLDFVLFQPNQGIVDPATGFHYDNMLFAQIDAVYSALAAAGFKSLRVEISETGWPSKGDDDEVGATPENAKRYNGNLIKMMMSGKKTKTPLKPNNDLSIYVFALFNENLKPGPTSERNYGLFKPDGTQAYSLGFALNDVVRGASGGGTGGGNSSSGGGRDKSPVFPVSPVAPDSASTGYLAISASPVTVRFFEFSFSLKLISFF

SEQ ID NO: 37292 - protein, 419 aa, Arabidopsis thaliana
  peptide (1)..(419): Ceres Seq. ID no. 13509101
MELTSFHRSSLLFLISLTLIILPTTTTSIGVNYGQIGDNLPSPTDVIPLIKSIGATKVKLYDANPQILKAFSNTGIEFIIGLGNEYLSKMKDPSKALTWIKQNVTPFLPATNITCITIGNEILALNDSSLTTNLLPAMQGVHSALITAGLSDQISVTTAHSLSILKSSFPPSAGEFQPDLLDSLTPILEFHRKTDSPFLINAYPFFAYKGNPKEVPLDFVLFQPNQGIVDPATGFHYDNMLFAQIDAVYSALAAAGFKSLRVEISETGWPSKGDDDEVGATPENAKRYNGNLIKMMMSGKKTKTPLKPNNDLSIYVFALFNENLKPGPTSERNYGLFKPDGTQAYSLGFALNDVVRGASGGGTGGGNSSSGGGRDKSPVFPVSPVAPDSASTGYLAISASPVTVRFFEFSFSLKLISFF

SEQ ID NO: 37293 - protein, 330 aa, Arabidopsis thaliana
  peptide (1)..(330): Ceres Seq. ID no. 13509102
MKDPSKALTWIKQNVTPFLPATNITCITIGNEILALNDSSLTTNLLPAMQGVHSALITAGLSDQISVTTAHSLSILKSSFPPSAGEFQPDLLDSLTPILEFHRKTDSPFLINAYPFFAYKGNPKEVPLDFVLFQPNQGIVDPATGFHYDNMLFAQIDAVYSALAAAGFKSLRVEISETGWPSKGDDDEVGATPENAKRYNGNLIKMMMSGKKTKTPLKPNNDLSIYVFALFNENLKPGPTSERNYGLFKPDGTQAYSLGFALNDVVRGASGGGTGGGNSSSGGGRDKSPVFPVSPVAPDSASTGYLAISASPVTVRFFEFSFSLKLISFF

SEQ ID NO: 37294 - DNA, 730 bp, Arabidopsis thaliana
  misc_feature (1)..(730): Ceres Seq. ID no. 13509103
  misc_feature (1)..(730): Ortholog of  Ceres SEQ ID NO 15168904 as cited in SEQ ID NO 20611
  misc_feature (1)..(730): Ortholog of  Ceres SEQ ID NO 15172900 as cited in SEQ ID NO 51859
accatcacaacaatcaatcgcagcgccgattctccttcaaaaacttttcctaagtcgtcactttttacgatggcagaaacgaagaagatgatcatccttaagagctccgacggtgaatccttcgagatcgaggaagccgtcgctgttaagtcccagacgattaagcacatgattgaggacgactgtgccgataacggaattccacttcccaatgtcaccggagccatcctcgccaaggttattgagtattgcaagaagcacgttgaagccgctgctgaagctggtggagacaaggatttctatggttccgctgagaacgacgagcttaagaattgggacagcgaattcgtcaaagtcgatcagcctactctcttcgatctcatcttggctgcgaactatttgaacatcggtggacttcttgaccttacgtgcaaggccgtggctgatcagatgagaggcaaaactccagagcagatgcgtgcacacttcaacatcaagaacgattacacacctgaggaagaggcggaggttcgcaatgagaacaagtgggcgttcgagtgattggatcggatctgaagggtgtttaggaatctctagtctttctatttagatgtgtttagctttcaagatttcggattgttttttttttctttctttttctcttcgattggagttgtccttgtcgatgaaaacctaatgctttgttctactaacaacatctattggtttt

SEQ ID NO: 37295 - protein, 186 aa, Arabidopsis thaliana
  peptide (1)..(186): Ceres Seq. ID no. 13509104
TITTINRSADSPSKTFPKSSLFTMAETKKMIILKSSDGESFEIEEAVAVKSQTIKHMIEDDCADNGIPLPNVTGAILAKVIEYCKKHVEAAAEAGGDKDFYGSAENDELKNWDSEFVKVDQPTLFDLILAANYLNIGGLLDLTCKAVADQMRGKTPEQMRAHFNIKNDYTPEEEAEVRNENKWAFE

SEQ ID NO: 37296 - protein, 163 aa, Arabidopsis thaliana
  peptide (1)..(163): Ceres Seq. ID no. 13509105
MAETKKMIILKSSDGESFEIEEAVAVKSQTIKHMIEDDCADNGIPLPNVTGAILAKVIEYCKKHVEAAAEAGGDKDFYGSAENDELKNWDSEFVKVDQPTLFDLILAANYLNIGGLLDLTCKAVADQMRGKTPEQMRAHFNIKNDYTPEEEAEVRNENKWAFE

SEQ ID NO: 37297 - protein, 157 aa, Arabidopsis thaliana
  peptide (1)..(157): Ceres Seq. ID no. 13509106
MIILKSSDGESFEIEEAVAVKSQTIKHMIEDDCADNGIPLPNVTGAILAKVIEYCKKHVEAAAEAGGDKDFYGSAENDELKNWDSEFVKVDQPTLFDLILAANYLNIGGLLDLTCKAVADQMRGKTPEQMRAHFNIKNDYTPEEEAEVRNENKWAFE

SEQ ID NO: 37298 - DNA, 1661 bp, Arabidopsis thaliana
  misc_feature (1)..(1661): Ceres Seq. ID no. 12394544
  misc_feature (1)..(1661): Ortholog of  Ceres SEQ ID NO 13593889 as cited in SEQ ID NO 53305
  misc_feature (1)..(1661): Ortholog of  Ceres SEQ ID NO 13581959 as cited in SEQ ID NO 56156
  misc_feature (1)..(1661): Ortholog of  Ceres SEQ ID NO 15171809 as cited in SEQ ID NO 57329
atcaagaagaagtctctgctagttccaaaacagaacaagtgaatccctcaagtttcttattacaaaacccaaaaaccaaagtgaaccagtgttgttgtttgtactcacagatccatcctccactgattcatttcttgctctgcttcttctctcttagttttgttaagaatcttctcttatccattgtgttttttctattttataaatacatatataattttagttgggggagagcttgcctggtgtcgccttcttctctctctaagacttgtgcttaatttacggacatgtgaagatacttcgcttttgcctcatcgaagggcatgttagctatttacttatctcttctcttctcttctttgtcttgtgagctctcaaatcttcatagatacaaatcaagaaagtgatcaaacaaaaaaagaacaagtctttttggtatttcagatcgagaaaaaatgtggttgcaaggtttgaagtaatcttgcaatggattctttgactggatttagaatggaacccaaatggcaaattgatcctcagcttctctttgttggtccaaagattggtgaaggagctcatgctaaagtctatgagggaaaatacaagaatcagacagttgctataaagatagttcacagaggagaaacaccagaagagattgctaaaagagattcaagattccttagagaagtagaaatgctctcacgtgttcaacacaagaatttggtcaagttcattggtgcttgcaaggagcctgtaatggtgatagttacagaacttcttcaaggcggtacattgcgtaaatatctattaaacttgagacccgcatgtttggagactcgtgtggctatcggttttgcgcttgatattgctcgtggtatggaatgcttgcattcccatgggatcattcaccgtgatctcaaacccgagaacttgcttttaactgcagaccataaaacagtaaaactagcagattttggattagcaagagaagagtcactgactgagatgatgacggctgagacaggaacataccgatggatggcacctgagttgtacagcacggtaactcttcgattgggagagaagaagcactacaatcataaagtcgacgcctatagctttgcaatagttctttgggagcttttacacaataaattgccttttgagggaatgtcaaatctccaagcagcatatgcagcagccttcaaaaatgtgagaccaagcgcggagagcttaccggaggagttgggcgacattgtaacatcatgttggaatgaggatccgaatgctcggcccaacttcacgcatatcattgagttacttcttaactatctctctaaagttggatctccgatatccgctattccacaacggattcttgcttcgaagaacacgctattgccaccggattctcctggaactagctctttgatggctaagcttgatgaatgtggggaaactccaaaggccaaaagtgaagacaaacgaaaaggtttgtttttctgcttcaatcaatgttattaaccttgaaatcacagagtggttttaggaccagagatttggtagacatcactcaaattattcatgtaataatatcctccctaccatatgaatttagcaagaagttcatttatataaataaatagttatgtaactgt

SEQ ID NO: 37299 - protein, 346 aa, Arabidopsis thaliana
  peptide (1)..(346): Ceres Seq. ID no. 12394545
MDSLTGFRMEPKWQIDPQLLFVGPKIGEGAHAKVYEGKYKNQTVAIKIVHRGETPEEIAKRDSRFLREVEMLSRVQHKNLVKFIGACKEPVMVIVTELLQGGTLRKYLLNLRPACLETRVAIGFALDIARGMECLHSHGIIHRDLKPENLLLTADHKTVKLADFGLAREESLTEMMTAETGTYRWMAPELYSTVTLRLGEKKHYNHKVDAYSFAIVLWELLHNKLPFEGMSNLQAAYAAAFKNVRPSAESLPEELGDIVTSCWNEDPNARPNFTHIIELLLNYLSKVGSPISAIPQRILASKNTLLPPDSPGTSSLMAKLDECGETPKAKSEDKRKGLFFCFNQCY

SEQ ID NO: 37300 - protein, 338 aa, Arabidopsis thaliana
  peptide (1)..(338): Ceres Seq. ID no. 12394546
MEPKWQIDPQLLFVGPKIGEGAHAKVYEGKYKNQTVAIKIVHRGETPEEIAKRDSRFLREVEMLSRVQHKNLVKFIGACKEPVMVIVTELLQGGTLRKYLLNLRPACLETRVAIGFALDIARGMECLHSHGIIHRDLKPENLLLTADHKTVKLADFGLAREESLTEMMTAETGTYRWMAPELYSTVTLRLGEKKHYNHKVDAYSFAIVLWELLHNKLPFEGMSNLQAAYAAAFKNVRPSAESLPEELGDIVTSCWNEDPNARPNFTHIIELLLNYLSKVGSPISAIPQRILASKNTLLPPDSPGTSSLMAKLDECGETPKAKSEDKRKGLFFCFNQCY

SEQ ID NO: 37301 - protein, 276 aa, Arabidopsis thaliana
  peptide (1)..(276): Ceres Seq. ID no. 12394547
MLSRVQHKNLVKFIGACKEPVMVIVTELLQGGTLRKYLLNLRPACLETRVAIGFALDIARGMECLHSHGIIHRDLKPENLLLTADHKTVKLADFGLAREESLTEMMTAETGTYRWMAPELYSTVTLRLGEKKHYNHKVDAYSFAIVLWELLHNKLPFEGMSNLQAAYAAAFKNVRPSAESLPEELGDIVTSCWNEDPNARPNFTHIIELLLNYLSKVGSPISAIPQRILASKNTLLPPDSPGTSSLMAKLDECGETPKAKSEDKRKGLFFCFNQCY

SEQ ID NO: 37302 - DNA, 889 bp, Arabidopsis thaliana
  misc_feature (1)..(889): Ceres Seq. ID no. 13575783
  misc_feature (1)..(889): Ortholog of  Ceres SEQ ID NO 15173847 as cited in SEQ ID NO 61751
gtttcacgaacaaagaggcctgagtataaaaaaacaaatcggacgcttcgagtttttcttgaggaagaatccacacacacacagaagaagaatctcatcacgaattttagctatgggttggatctggattgacgattcatccgcctctaaagccggtgctgatctcaccgataaaccgctcggagattctgccgccgccgccgaaaattgctccacgaccacggtggtaagatctcagtgcaagacggaggaggtcgagcctggaaagttcgtcaggaaatgcgacaaaacagaagaaatcctccgccactgttttgggaagccctctgaagtcgttcaatccaacacagagcacacagaagaggatgtgacagaccagatggtgggaagatccgctcttccgaatcagtttgaggataaaaacccgctaaacttcccgggactccgcagagatgtagacgcgatcgaacgccatttcttgagcggaatgaagagtttctttgatgcggctgaagagatgacaagcagcttatttgatatcatgggagaccatcacccaagcaccaggagaggagggatacccattgaaaaccatcccaaggtagaggagcaccgcaatgacgaaactgcccctacacgaccacactcctctggcgagattgatctctcgggcttggccaaggacgtttgagaaaggtcgtctgcttcttcttcttcttctttttttttttcacaaaggtcgtcttgttctagcttttggcatatataatcttaaaaatgtaatgtgactttctaagaagcgtggggattgtagtctaatgttagcggcttgcacgtttttccgagtgggtgctactactatctatcaatatcatcatactactatatt

SEQ ID NO: 37303 - protein, 229 aa, Arabidopsis thaliana
  peptide (1)..(229): Ceres Seq. ID no. 13575784
FHEQRGLSIKKQIGRFEFFLRKNPHTHRRRISSRILAMGWIWIDDSSASKAGADLTDKPLGDSAAAAENCSTTTVVRSQCKTEEVEPGKFVRKCDKTEEILRHCFGKPSEVVQSNTEHTEEDVTDQMVGRSALPNQFEDKNPLNFPGLRRDVDAIERHFLSGMKSFFDAAEEMTSSLFDIMGDHHPSTRRGGIPIENHPKVEEHRNDETAPTRPHSSGEIDLSGLAKDV

SEQ ID NO: 37304 - protein, 192 aa, Arabidopsis thaliana
  peptide (1)..(192): Ceres Seq. ID no. 13575785
MGWIWIDDSSASKAGADLTDKPLGDSAAAAENCSTTTVVRSQCKTEEVEPGKFVRKCDKTEEILRHCFGKPSEVVQSNTEHTEEDVTDQMVGRSALPNQFEDKNPLNFPGLRRDVDAIERHFLSGMKSFFDAAEEMTSSLFDIMGDHHPSTRRGGIPIENHPKVEEHRNDETAPTRPHSSGEIDLSGLAKDV

SEQ ID NO: 37305 - DNA, 845 bp, Arabidopsis thaliana
  misc_feature (1)..(845): Ceres Seq. ID no. 12560096
  misc_feature (1)..(845): Ortholog of  Ceres SEQ ID NO 13585222 as cited in SEQ ID NO 68696
aaatggcgatcatgcgataatcgtgtagccgaagaagaagaagaagaagaagaaagaagatggtgttttgggagataactctaggaacagcttacttcttgggactgagacggacttataggctcgctctgaagatccagcgtcggcttgttactccgaaacatcccaaaatccgtcaatttcttcatcggaggactcgtaaaatcttcgatgtggcgatttcggttcacaagaacatacaagaaagagacatagaagttggtaggaatctcggaaattggattcttcgttggctcgataagatgaaaccagcagctcagatccgtactcggccagaactaccacacaacagcaattccaacatggacaaggcaaagagactaacggaattgtcccgtcccaaatcgcacacgaacacgacgcagactccacaaaaccgtgaatccgataggcatttgtttacctcgttgaaagacttccggcacaagccattcccgtctgtctctatgatgatccaaccgccgagacccaatggaactacgactcagtacagacattactacagtggcggtctagcagcaagtctgattcaacccgagctatgttacaggtggcgggttcaatggtgtagtcaggaaagacattttgcagtggatggcacaaagatgaaagatgatgcagctaagtcccatctttctctgacataattgagcctctctcttttctttttttaacttttaattgcagaaattaatgtgattgttgatagatcctgaagcaactatgtagtaaacatgacaatgtctttttctttctaacgcttgaataaagtttcatatactttg

SEQ ID NO: 37306 - protein, 215 aa, Arabidopsis thaliana
  peptide (1)..(215): Ceres Seq. ID no. 12560097
MVFWEITLGTAYFLGLRRTYRLALKIQRRLVTPKHPKIRQFLHRRTRKIFDVAISVHKNIQERDIEVGRNLGNWILRWLDKMKPAAQIRTRPELPHNSNSNMDKAKRLTELSRPKSHTNTTQTPQNRESDRHLFTSLKDFRHKPFPSVSMMIQPPRPNGTTTQYRHYYSGGLAASLIQPELCYRWRVQWCSQERHFAVDGTKMKDDAAKSHLSLT

SEQ ID NO: 37307 - protein, 134 aa, Arabidopsis thaliana
  peptide (1)..(134): Ceres Seq. ID no. 12560098
MKPAAQIRTRPELPHNSNSNMDKAKRLTELSRPKSHTNTTQTPQNRESDRHLFTSLKDFRHKPFPSVSMMIQPPRPNGTTTQYRHYYSGGLAASLIQPELCYRWRVQWCSQERHFAVDGTKMKDDAAKSHLSLT

SEQ ID NO: 37308 - protein, 114 aa, Arabidopsis thaliana
  peptide (1)..(114): Ceres Seq. ID no. 12560099
MDKAKRLTELSRPKSHTNTTQTPQNRESDRHLFTSLKDFRHKPFPSVSMMIQPPRPNGTTTQYRHYYSGGLAASLIQPELCYRWRVQWCSQERHFAVDGTKMKDDAAKSHLSLT

SEQ ID NO: 37309 - DNA, 831 bp, Arabidopsis thaliana
  misc_feature (1)..(831): Ceres Seq. ID no. 13576640
  misc_feature (1)..(831): Ortholog of  Ceres SEQ ID NO 15174289 as cited in SEQ ID NO 1129
  misc_feature (1)..(831): Ortholog of  Ceres SEQ ID NO 12484054 as cited in SEQ ID NO 14991
  misc_feature (1)..(831): Ortholog of  Ceres SEQ ID NO 13591179 as cited in SEQ ID NO 64412
aaaaatcgatcgaaacggttagcgaatcgaagcagagagagcttcaatggctgtcacttcttcctctatgctgctgcttcggaacttctctacggtgggaagagttgctcaatctgttcgtgtgacttcgaggatcttcttctccaccggagaattgattagggttcttccttatactcgttctaaaagattgatctgttctactcgtgctgctcataatgaagaagccgccgcgaaagctgcggcttctgttgctgacaccggagctccgaccatatttgacaagattatagcaaaagagattccctcagatattgtctatgaagatgaaaacgttttggcattcagagacattaaccctcaggctcctgttcatgttttggtcattcccaagttgagagatggcttgacctcgcttggcaaggctgaaccaagacacgtagaggttcttggccaacttctacatgcatcgaagattgttgctgagaaagaaggaatccttgatgggttccgtgtggttatcaacaacggtgttgaagcctgccaatctgtttaccatcttcatctgcacgtcctcggaggccgacagatgaaatggccacccggttaagaagaaagattcatgtcaacccaaagccaacgtgctccaaaattgtcaactacaatcctttcttatatggtttatgagtttttaccactatcggattttatccagttgtgaattcctagagattagatagcttccatttccaattgttatcgaattctttttcttttttcattgttagaaataaatactaacaatttatatgatatgagtagtttctctcc

SEQ ID NO: 37310 - protein, 187 aa, Arabidopsis thaliana
  peptide (1)..(187): Ceres Seq. ID no. 13576641
MAVTSSSMLLLRNFSTVGRVAQSVRVTSRIFFSTGELIRVLPYTRSKRLICSTRAAHNEEAAAKAAASVADTGAPTIFDKIIAKEIPSDIVYEDENVLAFRDINPQAPVHVLVIPKLRDGLTSLGKAEPRHVEVLGQLLHASKIVAEKEGILDGFRVVINNGVEACQSVYHLHLHVLGGRQMKWPPG

SEQ ID NO: 37311 - protein, 180 aa, Arabidopsis thaliana
  peptide (1)..(180): Ceres Seq. ID no. 13576642
MLLLRNFSTVGRVAQSVRVTSRIFFSTGELIRVLPYTRSKRLICSTRAAHNEEAAAKAAASVADTGAPTIFDKIIAKEIPSDIVYEDENVLAFRDINPQAPVHVLVIPKLRDGLTSLGKAEPRHVEVLGQLLHASKIVAEKEGILDGFRVVINNGVEACQSVYHLHLHVLGGRQMKWPPG

SEQ ID NO: 37312 - DNA, 845 bp, Arabidopsis thaliana
  misc_feature (1)..(845): Ceres Seq. ID no. 12357707
  misc_feature (1)..(845): Ortholog of  Ceres SEQ ID NO 13595067 as cited in SEQ ID NO 55857
  misc_feature (1)..(845): Ortholog of  Ceres SEQ ID NO 12635516 as cited in SEQ ID NO 0
  misc_feature (1)..(845): Ortholog of  Ceres SEQ ID NO 15179376 as cited in SEQ ID NO 0
acaagtcaccaccatttctctctagaaaaaatctgaaaaacaaaaccatctcaaagtttcttgagaagaaaaaaagggtcaagaaagatgcctaaagacaggaatatcggaatcgccatggatttctcagagagcagcaagaacgctctgaaatgggcgatcgagaacttagcagacaaaggagacacgatttacatcatccacactctaccactctctggcgatgaatctcgtaactccctctggttcaaatccggttctcctctcataccgttggcagagtttagggaaccggagattatggagaaatacggtgtcaaaaccgacatcgcatgtcttgatatgctcgacactggttcgaggcagaaagaggtttttatccgaatcaacaatacatttttgttcaaagactctttggcaaagacaataactaatggtggttttgttgaaataaaaaggtgcatgtagtgaccaagttatactggggagatgcaagagagaagcttgttgatgctgttaaagatcttaaactcgattctattgtcatgggaagcagaggactcagtgctcttcaaaggataataatgggaagcgtgagcagctttgtgatccaacacgcgccttgccctgtcaccgttgtcaaggataacgaataaacgattctcactacaaaaaaaaaaaaaaaactgtctttatcttataagtcctaccaaataatcatcgcaatttatgctttttattttttattaataaaagaatctttatgttggttttatttgtaatttgactacaacaaaaaaagaacccagagtgttttcatcttctagttttgagagtttcttgct

SEQ ID NO: 37313 - protein, 126 aa, Arabidopsis thaliana
  peptide (1)..(126): Ceres Seq. ID no. 12357708
MPKDRNIGIAMDFSESSKNALKWAIENLADKGDTIYIIHTLPLSGDESRNSLWFKSGSPLIPLAEFREPEIMEKYGVKTDIACLDMLDTGSRQKEVFIRINNTFLFKDSLAKTITNGGFVEIKRCM

SEQ ID NO: 37314 - protein, 116 aa, Arabidopsis thaliana
  peptide (1)..(116): Ceres Seq. ID no. 12357709
MDFSESSKNALKWAIENLADKGDTIYIIHTLPLSGDESRNSLWFKSGSPLIPLAEFREPEIMEKYGVKTDIACLDMLDTGSRQKEVFIRINNTFLFKDSLAKTITNGGFVEIKRCM

SEQ ID NO: 37315 - protein, 68 aa, Arabidopsis thaliana
  peptide (1)..(68): Ceres Seq. ID no. 12357710
MNLVTPSGSNPVLLSYRWQSLGNRRLWRNTVSKPTSHVLICSTLVRGRKRFLSESTIHFCSKTLWQRQ

SEQ ID NO: 37316 - DNA, 1885 bp, Arabidopsis thaliana
  misc_feature (1)..(1885): Ceres Seq. ID no. 12394454
  misc_feature (1)..(1885): Ortholog of  Ceres SEQ ID NO 15172472 as cited in SEQ ID NO 55361
cacacattcttgcagaaggttttagaatcacaaagcataactcacctacccctaaaccaactccaatttctctcctcctctattaaatctttctcaatcatctttctttgagtcttttgccttggaatcctgatcatggcgtcttctctcacttccaaatccattctcggatgcaccaaacccgcttcttcttcttttcttccgtcggagctccgtcgtctctcttctcccgccgttcagatatctctccattcacaaaccaggaagaacttccggcagtcgtggggattgaagaagagtgatctgatgctaaatggttctgagattcgtcctgtgaaggttagggcttctgtttccacggcggagaaagcttcggagattgtgcttcaacccattagagaaatctcgggtctcattaagcttcctggctccaagtctctctctaatcgaattctgcttctcgctgctctatctgagggaactactgtagtggacaacttgttgaacagtgatgacatcaattacatgcttgatgcgttgaagatattgggacttaatgtggaaactcacagtgaaaacaatcgtgctgtagttgaaggatgtggcggggtatttccagcttccattgattccaagagtgatatcgaactttacctcggcaatgcaggaacagcaatgcgtccacttaccgccgcagttactgctgcaggtggcaacgcaagttatgtccttgatggggtgcctcggatgagagagagacctataggggatttggttgttggtcttaagcagcttggtgctgatgttgaatgtactcttggcactaactgccctcctgttcgtgtcaacgctaatggtggccttcctggtggaaaggtgaagctttctggatctattagtagtcagtacttgaccgctctgctcatggcagctcccttagctcttggagacgtcgaaattgaaattgtcgataaattgatttctgttccgtatgttgaaatgacattgaagttgatggaacgttttggggtaagtgctgagcatagtgaaagctgggatcgtttctttgttaagggtgggcaaaaatacaagtcgccgggtaatgcttacgtagaaggtgatgcttctagtgctagttatttcctggctggtgctgccattaccggtgaaactgtcactgttgaaggttgtggaacgaccagtttgcagggagatgtgaaatttgccgaggttcttgagaaaatgggatgtaaagtgtcctggacagagaacagtgtgactgtgacagggccgtctagagatgcttttggaatgagacacttgcgggctattgatgtcaacatgaacaaaatgcctgatgtagcaatgactcttgccgtcgttgctctctttgccgatggtccaaccaccattagagatgtggctagctggagagtaaaggagacggaaaggatgattgccatttgcacagagcttagaaaactgggagctacagtggaagaaggttcagattattgtgtgattactccgccgaaaaaggtgaaaccggcagagattgatacatatgatgatcatagaatggcaatggcattctctcttgcagcttgtgctgatgttccaatcaccatcaatgaccccggttgcaccaggaaaaccttccccgactacttccaagtccttgaaagaatcacaaagcattaaacaaaaaaactctaaaatctccactgttttttcttctgatccaagcttatctgtttccatttttcttgtctctgtaacattattagaaagcaagagtagtgtttgtttgtgtgtacctgaactgagtgagatttgagatgcaatcattgaatcggctttggtatatcattttactctgttttcc

SEQ ID NO: 37317 - protein, 521 aa, Arabidopsis thaliana
  peptide (1)..(521): Ceres Seq. ID no. 12394455
MASSLTSKSILGCTKPASSSFLPSELRRLSSPAVQISLHSQTRKNFRQSWGLKKSDLMLNGSEIRPVKVRASVSTAEKASEIVLQPIREISGLIKLPGSKSLSNRILLLAALSEGTTVVDNLLNSDDINYMLDALKILGLNVETHSENNRAVVEGCGGVFPASIDSKSDIELYLGNAGTAMRPLTAAVTAAGGNASYVLDGVPRMRERPIGDLVVGLKQLGADVECTLGTNCPPVRVNANGGLPGGKVKLSGSISSQYLTALLMAAPLALGDVEIEIVDKLISVPYVEMTLKLMERFGVSAEHSESWDRFFVKGGQKYKSPGNAYVEGDASSASYFLAGAAITGETVTVEGCGTTSLQGDVKFAEVLEKMGCKVSWTENSVTVTGPSRDAFGMRHLRAIDVNMNKMPDVAMTLAVVALFADGPTTIRDVASWRVKETERMIAICTELRKLGATVEEGSDYCVITPPKKVKPAEIDTYDDHRMAMAFSLAACADVPITINDPGCTRKTFPDYFQVLERITKH

SEQ ID NO: 37318 - protein, 464 aa, Arabidopsis thaliana
  peptide (1)..(464): Ceres Seq. ID no. 12394456
MLNGSEIRPVKVRASVSTAEKASEIVLQPIREISGLIKLPGSKSLSNRILLLAALSEGTTVVDNLLNSDDINYMLDALKILGLNVETHSENNRAVVEGCGGVFPASIDSKSDIELYLGNAGTAMRPLTAAVTAAGGNASYVLDGVPRMRERPIGDLVVGLKQLGADVECTLGTNCPPVRVNANGGLPGGKVKLSGSISSQYLTALLMAAPLALGDVEIEIVDKLISVPYVEMTLKLMERFGVSAEHSESWDRFFVKGGQKYKSPGNAYVEGDASSASYFLAGAAITGETVTVEGCGTTSLQGDVKFAEVLEKMGCKVSWTENSVTVTGPSRDAFGMRHLRAIDVNMNKMPDVAMTLAVVALFADGPTTIRDVASWRVKETERMIAICTELRKLGATVEEGSDYCVITPPKKVKPAEIDTYDDHRMAMAFSLAACADVPITINDPGCTRKTFPDYFQVLERITKH

SEQ ID NO: 37319 - protein, 391 aa, Arabidopsis thaliana
  peptide (1)..(391): Ceres Seq. ID no. 12394457
MLDALKILGLNVETHSENNRAVVEGCGGVFPASIDSKSDIELYLGNAGTAMRPLTAAVTAAGGNASYVLDGVPRMRERPIGDLVVGLKQLGADVECTLGTNCPPVRVNANGGLPGGKVKLSGSISSQYLTALLMAAPLALGDVEIEIVDKLISVPYVEMTLKLMERFGVSAEHSESWDRFFVKGGQKYKSPGNAYVEGDASSASYFLAGAAITGETVTVEGCGTTSLQGDVKFAEVLEKMGCKVSWTENSVTVTGPSRDAFGMRHLRAIDVNMNKMPDVAMTLAVVALFADGPTTIRDVASWRVKETERMIAICTELRKLGATVEEGSDYCVITPPKKVKPAEIDTYDDHRMAMAFSLAACADVPITINDPGCTRKTFPDYFQVLERITKH

SEQ ID NO: 37320 - DNA, 1533 bp, Arabidopsis thaliana
  misc_feature (1)..(1533): Ceres Seq. ID no. 13647140
  misc_feature (1)..(1533): Ortholog of  Ceres SEQ ID NO 14308430 as cited in SEQ ID NO 55350
  misc_feature (1)..(1533): Ortholog of  Ceres SEQ ID NO 15177799 as cited in SEQ ID NO 59221
  misc_feature (1)..(1533): Ortholog of  Ceres SEQ ID NO 13662846 as cited in SEQ ID NO 65519
ccgatcaagaactcataattattgtaacagataaaatcaaatttgagagatctactactaaatctaacttaaagcattgtactttcttttatctcattctcctttgctctgctttcttctggtcaacccccacgagattccttcttatgtgattgtaaagagaagatttttcagagatgggtctcttcgaatcggtgaaatcaatcgattgggaacaagaatcgttcccaacttatcaagatttagggtttttgcctctctttgcagtgttcttccctacaattcgatttctacttgacagattcgtcttcgagaaattggcaagtcttgtgatctatggaaggatgagtacgaataagagtgacaacataaaagacaggaagaaaaatagtccaaaagttcgaaaatttaaagaatcagcttggaagtgtatttactatctatcagctgagctacttgctttatctgtcacatataatgaaccttggttttcaaatactctctacttttggattggtcctggagatcagatttggcctgatcaaccaatgaagatgaagttgaagtttttatatatgtttgctgctggattctacacgtactctatattcgcgttggtgttttgggaaacaagacggtctgatttcggagtttccatgggtcatcatatcacaacgcttgttctcattgtcctctcctatatctgcagattaactcgtgctggttctgttattcttgcacttcatgatgcgagcgatgtgttccttgaaattgggaaaatgtctaaatattgcggagcggaaagtctcgcgagcatttcgtttgttcttttcgcgctgtcttgggtcgttctacgtctcatttactatcctttttggatcctgtggagcacgagctatcaaatcattatgactgtggacaaagaaaagcatcctaatggaccaatcttgtactatatgttcaacacacttttgtatttcttgcttgttcttcacatattctggtgggttttgatttaccggatgcttgtgaaacaagtgcaagatcgaggcaagcttagcgaagatgttagatccgattctgaaagcgatgatgaacacgaggattaatcgcatgttgggaatattagtagtgcacacgctctatatctcatgaatctgaaccacacggagactaggaatttcaacatcaagtaggatgcattgcagtatttgaacagttggttcatcatcttccagaggatcgtaaccggatcaaaccgttttgaatgaatcggtttctcaatctgaatttttgagtttattgttttctctaaagtttgagcaaattcaagattttgatcaaactgctccacgttctattgttttttcttctataatttttaatttacgcttttgcaataacacaattccttgtatcattatactaatgtcatctcaaaattagctcccttcaacatctatgcaacagactaacaactaaatgaattttcttggggttttttttggttcattgcataatttgataaaatcc

SEQ ID NO: 37321 - protein, 310 aa, Arabidopsis thaliana
  peptide (1)..(310): Ceres Seq. ID no. 13647141
MGLFESVKSIDWEQESFPTYQDLGFLPLFAVFFPTIRFLLDRFVFEKLASLVIYGRMSTNKSDNIKDRKKNSPKVRKFKESAWKCIYYLSAELLALSVTYNEPWFSNTLYFWIGPGDQIWPDQPMKMKLKFLYMFAAGFYTYSIFALVFWETRRSDFGVSMGHHITTLVLIVLSYICRLTRAGSVILALHDASDVFLEIGKMSKYCGAESLASISFVLFALSWVVLRLIYYPFWILWSTSYQIIMTVDKEKHPNGPILYYMFNTLLYFLLVLHIFWWVLIYRMLVKQVQDRGKLSEDVRSDSESDDEHED

SEQ ID NO: 37322 - protein, 254 aa, Arabidopsis thaliana
  peptide (1)..(254): Ceres Seq. ID no. 13647142
MSTNKSDNIKDRKKNSPKVRKFKESAWKCIYYLSAELLALSVTYNEPWFSNTLYFWIGPGDQIWPDQPMKMKLKFLYMFAAGFYTYSIFALVFWETRRSDFGVSMGHHITTLVLIVLSYICRLTRAGSVILALHDASDVFLEIGKMSKYCGAESLASISFVLFALSWVVLRLIYYPFWILWSTSYQIIMTVDKEKHPNGPILYYMFNTLLYFLLVLHIFWWVLIYRMLVKQVQDRGKLSEDVRSDSESDDEHED

SEQ ID NO: 37323 - protein, 186 aa, Arabidopsis thaliana
  peptide (1)..(186): Ceres Seq. ID no. 13647143
MKMKLKFLYMFAAGFYTYSIFALVFWETRRSDFGVSMGHHITTLVLIVLSYICRLTRAGSVILALHDASDVFLEIGKMSKYCGAESLASISFVLFALSWVVLRLIYYPFWILWSTSYQIIMTVDKEKHPNGPILYYMFNTLLYFLLVLHIFWWVLIYRMLVKQVQDRGKLSEDVRSDSESDDEHED

SEQ ID NO: 37324 - DNA, 1089 bp, Arabidopsis thaliana
  misc_feature (1)..(1089): Ceres Seq. ID no. 12339248
  misc_feature (1)..(1089): Ortholog of  Ceres SEQ ID NO 13638510 as cited in SEQ ID NO 51436
aaaagctagtcaattgtttaactcacactctctcgccctctctctctccctctctcaaattctcaaaaattggctttgagcagatgaaaagaatctccatcttcttctctatctcttggctatctctctctctaaactattcactcacacagtcattcttcgtcttcttctgtttcatgcaagattcaaaggcctcacctgcaagaaaaccttggtaccagagagctatggcggtcgccagattcgcaacgaattggagaacaatccctaaatcatcgtcacaacaaccagagaattttcgtccgtctcgaaaccctagcgtcaacagcaagtcatccaatcataaccaaatttatcaccagctgagaaaatgctcgtctctaaaggtagctgcgaattcgttcactagggtttgcctctgcgctccgattggtccatacgacgacgtttttcggaatcacgtcccgccgagaagaagttcaagctatcctccgtcgaagcctcttcctatggagacggcggtggcggtggcgacggccaggatgagtgtggattcagggaggaggatatttagagggaagtcgttgagggaaaacgcgttgatgaggagattcgtggtggcagaagaagaagcgataatggagaatagaaagagagatcaaatggagattgtgaggaagagaaatcagatgaggaggaagaagaagcttggacctagtcctcttagtcgtatggttatcgctgaagatcaagaagtttgtcttctttgaaactttttcatcaagaacagagaaacaaaaaaaaaaagttttttttggttattgtaattgtgtttttatttttcaattggattcagagataattaagcaaaatacgctgccgtttaatacctctttgtaaacggtgccccttttgtttatttagttgtttttgggagttttgaatgaaggatggagctaaagagaattaatatggtttactaattctctttttggtttctttactatgcataccggtgattaaattattcaactgattaactttgttgatagtttaatattcatatctattaatggattcttaagattg

SEQ ID NO: 37325 - protein, 255 aa, Arabidopsis thaliana
  peptide (1)..(255): Ceres Seq. ID no. 12339249
KLVNCLTHTLSPSLSPSLKFSKIGFEQMKRISIFFSISWLSLSLNYSLTQSFFVFFCFMQDSKASPARKPWYQRAMAVARFATNWRTIPKSSSQQPENFRPSRNPSVNSKSSNHNQIYHQLRKCSSLKVAANSFTRVCLCAPIGPYDDVFRNHVPPRRSSSYPPSKPLPMETAVAVATARMSVDSGRRIFRGKSLRENALMRRFVVAEEEAIMENRKRDQMEIVRKRNQMRRKKKLGPSPLSRMVIAEDQEVCLL

SEQ ID NO: 37326 - protein, 228 aa, Arabidopsis thaliana
  peptide (1)..(228): Ceres Seq. ID no. 12339250
MKRISIFFSISWLSLSLNYSLTQSFFVFFCFMQDSKASPARKPWYQRAMAVARFATNWRTIPKSSSQQPENFRPSRNPSVNSKSSNHNQIYHQLRKCSSLKVAANSFTRVCLCAPIGPYDDVFRNHVPPRRSSSYPPSKPLPMETAVAVATARMSVDSGRRIFRGKSLRENALMRRFVVAEEEAIMENRKRDQMEIVRKRNQMRRKKKLGPSPLSRMVIAEDQEVCLL

SEQ ID NO: 37327 - protein, 197 aa, Arabidopsis thaliana
  peptide (1)..(197): Ceres Seq. ID no. 12339251
MQDSKASPARKPWYQRAMAVARFATNWRTIPKSSSQQPENFRPSRNPSVNSKSSNHNQIYHQLRKCSSLKVAANSFTRVCLCAPIGPYDDVFRNHVPPRRSSSYPPSKPLPMETAVAVATARMSVDSGRRIFRGKSLRENALMRRFVVAEEEAIMENRKRDQMEIVRKRNQMRRKKKLGPSPLSRMVIAEDQEVCLL

SEQ ID NO: 37328 - DNA, 2263 bp, Arabidopsis thaliana; identical to SEQ ID NO: 36601
  misc_feature (1)..(2263): Ceres Seq. ID no. 13591438
  misc_feature (1)..(2263): Ortholog of  Ceres SEQ ID NO 13584744 as cited in SEQ ID NO 69137

SEQ ID NO: 37329 - protein, 683 aa, Arabidopsis thaliana; identical to SEQ ID NO: 36602
  peptide (1)..(683): Ceres Seq. ID no. 13591439

SEQ ID NO: 37330 - protein, 561 aa, Arabidopsis thaliana; identical to SEQ ID NO: 36603
  peptide (1)..(561): Ceres Seq. ID no. 13591440

SEQ ID NO: 37331 - protein, 510 aa, Arabidopsis thaliana; identical to SEQ ID NO: 36604
  peptide (1)..(510): Ceres Seq. ID no. 13591441

SEQ ID NO: 37332 - DNA, 1671 bp, Arabidopsis thaliana
  misc_feature (1)..(1671): Ceres Seq. ID no. 12394614
  misc_feature (1)..(1671): Ortholog of  Ceres SEQ ID NO 13597574 as cited in SEQ ID NO 64677
  misc_feature (1)..(1671): Ortholog of  Ceres SEQ ID NO 13597843 as cited in SEQ ID NO 64850
  misc_feature (1)..(1671): Ortholog of  Ceres SEQ ID NO 13597678 as cited in SEQ ID NO 65375
  misc_feature (1)..(1671): Ortholog of  Ceres SEQ ID NO 13596180 as cited in SEQ ID NO 67941
  misc_feature (1)..(1671): Ortholog of  Ceres SEQ ID NO 13591190 as cited in SEQ ID NO 68044
  misc_feature (1)..(1671): Ortholog of  Ceres SEQ ID NO 13595961 as cited in SEQ ID NO 68223
aacgaggctgtggagaaaagaaccaaaggtgactgttgttagagatgaggaatgcagagctcatcttcatcccaacaccaactgttggtcatcttgttccgtttcttgaatttgctaggcgtctcattgagcaggatgataaaatccgtatcaccttcctcttgatgaagcaacaaggtcagtctcatctggattcctatgttaagacaatttcctcgtctctgccgtttgttagatttattgatgtccctgagttagaggagaaaccaacacttggtacacagtctgtggaagcctatgtgtacgattttattgaaacaaatgtccctcttgtgcaaaatataatcatgggtatcctatcttctcctgcatttgatggagttacggtcaagggattcgttgctgattttttctgtctcccgatgattgatgttgcaaaagatgcaagtcttcctttttatgtgttcttgacttcaaattccggattcctagctatgatgcagtatctggcatatggacataagaaagatacctcagtttttgcaagaaactctgaagaaatgttgtcaattcctggatttgtaaaccctgtcccagccaaagtactgccgtcagctctgtttattgaggatggttatgatgctgacgttaaactggctatattgtttacaaaggctaatggaatcctagtgaatacctcctttgatattgagcctacctctctgaatcattttcttgaagaagagaattacccttctgtttatgctgttggccccatatttaacccgaaggcccatcctcatccagatcaagacctcgcctgttgtgacgagtcgatgaaatggcttgatgctcaacccgaggcatcagttgtattcctttgttttgggagtatgggtagcttaagaggtcctctagtgaaggaaatagcacatggacttgagctatgtcagtatagattcctctggtcactccgcacagaagaagtgacaaatgatgatcttttgccaganggattcatggaccgtgtcagtggacggggaatgatatgcggttggtctcctcaggtggaaatactggcccataaagcagtgggaggttttgtttctcattgtggatggaactcaatagtagagagtttatggtttggtgtgccaattgtgacatggccaatgtatgcagagcaacagctcaatgcgtttctgatggtgaaggaactgaagctcgcagtggagctgaaactcgattatagtgtacatagtggtgagattgtaagtgcaaacgagatagagacagcgatttcttgtgtaatgaacaaggataataatgttgtgaggaaacgagtgatggatatctcgcagatgatccagagagctacgaagaatggtggatcttcgtttgccgcaattgagaaattcatacatgacgtgataggaaccaggacttagcctttcttatcggattctccataaactgtaacctgattatgcaacagtcctttgaatctgctttgtttctaatatttttttctattcttttgtcatcagctttgcttttaactttgtctgtgttgattcctttatctaccaagctgtgagtttctttgttagccaatgctgcatttcttctgttatggattttgttcaaaattgggtacatctcttattcttt

SEQ ID NO: 37333 - protein, 467 aa, Arabidopsis thaliana
  peptide (1)..(467): Ceres Seq. ID no. 12394615
  misc_feature (323)..(323): Xaa is any aa, unknown or other
MRNAELIFIPTPTVGHLVPFLEFARRLIEQDDKIRITFLLMKQQGQSHLDSYVKTISSSLPFVRFIDVPELEEKPTLGTQSVEAYVYDFIETNVPLVQNIIMGILSSPAFDGVTVKGFVADFFCLPMIDVAKDASLPFYVFLTSNSGFLAMMQYLAYGHKKDTSVFARNSEEMLSIPGFVNPVPAKVLPSALFIEDGYDADVKLAILFTKANGILVNTSFDIEPTSLNHFLEEENYPSVYAVGPIFNPKAHPHPDQDLACCDESMKWLDAQPEASVVFLCFGSMGSLRGPLVKEIAHGLELCQYRFLWSLRTEEVTNDDLLPXGFMDRVSGRGMICGWSPQVEILAHKAVGGFVSHCGWNSIVESLWFGVPIVTWPMYAEQQLNAFLMVKELKLAVELKLDYSVHSGEIVSANEIETAISCVMNKDNNVVRKRVMDISQMIQRATKNGGSSFAAIEKFIHDVIGTRT

SEQ ID NO: 37334 - protein, 427 aa, Arabidopsis thaliana
  peptide (1)..(427): Ceres Seq. ID no. 12394616
  misc_feature (283)..(283): Xaa is any aa, unknown or other
MKQQGQSHLDSYVKTISSSLPFVRFIDVPELEEKPTLGTQSVEAYVYDFIETNVPLVQNIIMGILSSPAFDGVTVKGFVADFFCLPMIDVAKDASLPFYVFLTSNSGFLAMMQYLAYGHKKDTSVFARNSEEMLSIPGFVNPVPAKVLPSALFIEDGYDADVKLAILFTKANGILVNTSFDIEPTSLNHFLEEENYPSVYAVGPIFNPKAHPHPDQDLACCDESMKWLDAQPEASVVFLCFGSMGSLRGPLVKEIAHGLELCQYRFLWSLRTEEVTNDDLLPXGFMDRVSGRGMICGWSPQVEILAHKAVGGFVSHCGWNSIVESLWFGVPIVTWPMYAEQQLNAFLMVKELKLAVELKLDYSVHSGEIVSANEIETAISCVMNKDNNVVRKRVMDISQMIQRATKNGGSSFAAIEKFIHDVIGTRT

SEQ ID NO: 37335 - protein, 366 aa, Arabidopsis thaliana
  peptide (1)..(366): Ceres Seq. ID no. 12394617
  misc_feature (222)..(222): Xaa is any aa, unknown or other
MGILSSPAFDGVTVKGFVADFFCLPMIDVAKDASLPFYVFLTSNSGFLAMMQYLAYGHKKDTSVFARNSEEMLSIPGFVNPVPAKVLPSALFIEDGYDADVKLAILFTKANGILVNTSFDIEPTSLNHFLEEENYPSVYAVGPIFNPKAHPHPDQDLACCDESMKWLDAQPEASVVFLCFGSMGSLRGPLVKEIAHGLELCQYRFLWSLRTEEVTNDDLLPXGFMDRVSGRGMICGWSPQVEILAHKAVGGFVSHCGWNSIVESLWFGVPIVTWPMYAEQQLNAFLMVKELKLAVELKLDYSVHSGEIVSANEIETAISCVMNKDNNVVRKRVMDISQMIQRATKNGGSSFAAIEKFIHDVIGTRT

SEQ ID NO: 37336 - DNA, 537 bp, Arabidopsis thaliana
  misc_feature (1)..(537): Ceres Seq. ID no. 12393893
  misc_feature (1)..(537): Ortholog of  Ceres SEQ ID NO 13646254 as cited in SEQ ID NO 20314
  misc_feature (1)..(537): Ortholog of  Ceres SEQ ID NO 12323993 as cited in SEQ ID NO 20720
atcaaaacatcacatacactatttttctcctctccttattgtctatatatttttcctctttagctttttcatttcgaaatggccaccgttgaggttgaacaagtcactccagtagcagtagagaacgttgaggtaccaacaaagacagtggaggagacagtggtggagacagagaagaaagatgaagaaaccgagaagaaaacagaggagaaagacgagaagacagaagtgatcacggaaactccggtagttgaggaggaggagaagaaagctgaggaagtgaccgaaactccggcggttgtggaggaggagaagaagacagaggtggttgaggagaaacagactgaggttgcggctgctgaggaagtcgccgttgagaaggccgaggagtaaagaggaaggaagaagctatatatgaccttttttggtctcatatcgttttctgtttattttattttatcaacatttcataagtattttctatgtttgttgggtttgttatgatgaaatcagatgtttggatcttttaatggttgc

SEQ ID NO: 37337 - protein, 104 aa, Arabidopsis thaliana
  peptide (1)..(104): Ceres Seq. ID no. 12393894
MATVEVEQVTPVAVENVEVPTKTVEETVVETEKKDEETEKKTEEKDEKTEVITETPVVEEEEKKAEEVTETPAVVEEEKKTEVVEEKQTEVAAAEEVAVEKAEE

SEQ ID NO: 37338 - DNA, 1834 bp, Arabidopsis thaliana
  misc_feature (1)..(1834): Ceres Seq. ID no. 12603486
  misc_feature (1)..(1834): Ortholog of  Ceres SEQ ID NO 12611963 as cited in SEQ ID NO 53414
atggagtcgataacgttagatatagagctgttgcagttaccagagacatcgccaatgtcgatgaaatctaatcaagattttgttaagaagctctttgatcaatggcttgctcttcctgaaaccaatcgtttggttacatctttggtaaatgatgcaaaggcaggagtggctttgaatgttatgtgtggaggaggctcttctggcacgaattcagggtcgaatagtccattagcttcaatgtttccggcacgcaatgggcctcctctttctccaaggaattcaactggttctcctcggatcgccagacaaagaactggactatcaaatcttagttctcctctcaaagtagtttctgatcatgttaaagaactcattcctcagttttactttgaagatggtcggccaccaccaaatgatctaaaagagcagtgcatagctaagatcaatagtcttttctatggccacgaggatggtttgcaactccaagaatttaaattagtcactactgaaatatgcaaagttccatcatttttttccacctccattttcaagaaagttgataccaataacactggttttgtgaaaagagaagacttcattgattattgggttaagggaaatatgttaacaaaggagataacaagtcaagtatttacaatattgaagcagccagatcacaactaccttgtccaggatgatttcaagccagtgcttcaagaattattggcaacacaccctggtcttgaattcttgcaaggcacaccggaatttcaggatagatatgctgaaactgtaatatacagaatatattactacataaataggagtggaaatgggcatcttaccttgagagagcttaagcgaggaaatttagttgacgcaatgcagcatgccgatgaagaagaggacatcaataaggtgttgaggtacttctcgtatgaacatttctatgtcatatactgcaagttctgggagttggatacagatcatgatttcttaatcgacaaagagaatctcatccgatatagtaaccatgcgctcacctataggattgtcgatcgaatcttttcacaggtaccgaggaagtttactagtaaaaccgaaggaaagatgggttatgaggattttgtttacttcatattggctgaagaagacaagtcatcagaacctagtcttgagtattggttcaagtgcattgatttggatgcaaatggagttttgacgcggaacgagctgcaattcttttacgaggagcagctacatagaatggaatgcatggcgcaagaggcggtgttgtttgaggatattttgtgccaattattcgacatggtcaaaccagaggacgaagggttcatttgtctaaatgatttgaagggttctaaactttctggaaatgtcttcaacatactttttaacctcaacaagtttatggcgtttgaaacgcgtgatcccttcctcatccgccaggagcgcgcaaatccgacatggacagagtgggatcgttttgctcatagagaatatattaggctatcaatggaagaagatgtcgaagatgcttctaatggaagtgctgaagcatgggacgactcacttgaggtccccttttgagaattttatggtaagctctcactataaaaagcggaccaataatgagtaatataatcaaaaaaaaaaaggaagctagggtatggggcccttgattttcggataacattatttggtttattaatttgttcggtttatgatatataagggtgaatggaaactaaacaccattcggatttgtttgatacagttttgaactttgatttggattttatataaaaaacatatg

SEQ ID NO: 37339 - protein, 535 aa, Arabidopsis thaliana
  peptide (1)..(535): Ceres Seq. ID no. 12603487
MESITLDIELLQLPETSPMSMKSNQDFVKKLFDQWLALPETNRLVTSLVNDAKAGVALNVMCGGGSSGTNSGSNSPLASMFPARNGPPLSPRNSTGSPRIARQRTGLSNLSSPLKVVSDHVKELIPQFYFEDGRPPPNDLKEQCIAKINSLFYGHEDGLQLQEFKLVTTEICKVPSFFSTSIFKKVDTNNTGFVKREDFIDYWVKGNMLTKEITSQVFTILKQPDHNYLVQDDFKPVLQELLATHPGLEFLQGTPEFQDRYAETVIYRIYYYINRSGNGHLTLRELKRGNLVDAMQHADEEEDINKVLRYFSYEHFYVIYCKFWELDTDHDFLIDKENLIRYSNHALTYRIVDRIFSQVPRKFTSKTEGKMGYEDFVYFILAEEDKSSEPSLEYWFKCIDLDANGVLTRNELQFFYEEQLHRMECMAQEAVLFEDILCQLFDMVKPEDEGFICLNDLKGSKLSGNVFNILFNLNKFMAFETRDPFLIRQERANPTWTEWDRFAHREYIRLSMEEDVEDASNGSAEAWDDSLEVPF

SEQ ID NO: 37340 - protein, 517 aa, Arabidopsis thaliana
  peptide (1)..(517): Ceres Seq. ID no. 12603488
MSMKSNQDFVKKLFDQWLALPETNRLVTSLVNDAKAGVALNVMCGGGSSGTNSGSNSPLASMFPARNGPPLSPRNSTGSPRIARQRTGLSNLSSPLKVVSDHVKELIPQFYFEDGRPPPNDLKEQCIAKINSLFYGHEDGLQLQEFKLVTTEICKVPSFFSTSIFKKVDTNNTGFVKREDFIDYWVKGNMLTKEITSQVFTILKQPDHNYLVQDDFKPVLQELLATHPGLEFLQGTPEFQDRYAETVIYRIYYYINRSGNGHLTLRELKRGNLVDAMQHADEEEDINKVLRYFSYEHFYVIYCKFWELDTDHDFLIDKENLIRYSNHALTYRIVDRIFSQVPRKFTSKTEGKMGYEDFVYFILAEEDKSSEPSLEYWFKCIDLDANGVLTRNELQFFYEEQLHRMECMAQEAVLFEDILCQLFDMVKPEDEGFICLNDLKGSKLSGNVFNILFNLNKFMAFETRDPFLIRQERANPTWTEWDRFAHREYIRLSMEEDVEDASNGSAEAWDDSLEVPF

SEQ ID NO: 37341 - protein, 515 aa, Arabidopsis thaliana
  peptide (1)..(515): Ceres Seq. ID no. 12603489
MKSNQDFVKKLFDQWLALPETNRLVTSLVNDAKAGVALNVMCGGGSSGTNSGSNSPLASMFPARNGPPLSPRNSTGSPRIARQRTGLSNLSSPLKVVSDHVKELIPQFYFEDGRPPPNDLKEQCIAKINSLFYGHEDGLQLQEFKLVTTEICKVPSFFSTSIFKKVDTNNTGFVKREDFIDYWVKGNMLTKEITSQVFTILKQPDHNYLVQDDFKPVLQELLATHPGLEFLQGTPEFQDRYAETVIYRIYYYINRSGNGHLTLRELKRGNLVDAMQHADEEEDINKVLRYFSYEHFYVIYCKFWELDTDHDFLIDKENLIRYSNHALTYRIVDRIFSQVPRKFTSKTEGKMGYEDFVYFILAEEDKSSEPSLEYWFKCIDLDANGVLTRNELQFFYEEQLHRMECMAQEAVLFEDILCQLFDMVKPEDEGFICLNDLKGSKLSGNVFNILFNLNKFMAFETRDPFLIRQERANPTWTEWDRFAHREYIRLSMEEDVEDASNGSAEAWDDSLEVPF

SEQ ID NO: 37342 - DNA, 621 bp, Arabidopsis thaliana
  misc_feature (1)..(621): Ceres Seq. ID no. 12397236
  misc_feature (1)..(621): Ortholog of  Ceres SEQ ID NO 13599181 as cited in SEQ ID NO 0
ataaaaataaaaaagtaggagcatatcacacaaacaaacaacgtagaaagggttcgaatgacgagtaatggagaagggggagaggtggtggcgaagaggaggaggaagggaattaaggagctagtgcaggtggctctcaggggaggttgtttggctgcttcagccacggccatggcggtgatgctgaccgctactgaggagggagtggcagacatctacggcttcaagctcactctctcctccaactggtctttctctccctcctaccagtatgtggtgggggcatgcgcagggaccgtgctctactccctgttacagctctgcctcggtgtttacagactcgtcaccggatctcccatcacgccttcccgcttccaagcttggctttgcttcacctccgatcagctcttttgttatttgatgatgagcgctggatcagccggttccggagttaccaacctcaacaaaaccggcatcaggcacactcctctccccgacttctgcaagaccctttcttctttctgcaatcatgtcgccctgtctctcctcttagtcttcctctccttcatcttcctcgcttcctcttccttctttactgtccttgtgctctccactccctag

SEQ ID NO: 37343 - protein, 187 aa, Arabidopsis thaliana
  peptide (1)..(187): Ceres Seq. ID no. 12397237
MTSNGEGGEVVAKRRRKGIKELVQVALRGGCLAASATAMAVMLTATEEGVADIYGFKLTLSSNWSFSPSYQYVVGACAGTVLYSLLQLCLGVYRLVTGSPITPSRFQAWLCFTSDQLFCYLMMSAGSAGSGVTNLNKTGIRHTPLPDFCKTLSSFCNHVALSLLLVFLSFIFLASSSFFTVLVLSTP

SEQ ID NO: 37344 - protein, 149 aa, Arabidopsis thaliana
  peptide (1)..(149): Ceres Seq. ID no. 12397238
MAVMLTATEEGVADIYGFKLTLSSNWSFSPSYQYVVGACAGTVLYSLLQLCLGVYRLVTGSPITPSRFQAWLCFTSDQLFCYLMMSAGSAGSGVTNLNKTGIRHTPLPDFCKTLSSFCNHVALSLLLVFLSFIFLASSSFFTVLVLSTP

SEQ ID NO: 37345 - protein, 146 aa, Arabidopsis thaliana
  peptide (1)..(146): Ceres Seq. ID no. 12397239
MLTATEEGVADIYGFKLTLSSNWSFSPSYQYVVGACAGTVLYSLLQLCLGVYRLVTGSPITPSRFQAWLCFTSDQLFCYLMMSAGSAGSGVTNLNKTGIRHTPLPDFCKTLSSFCNHVALSLLLVFLSFIFLASSSFFTVLVLSTP

SEQ ID NO: 37346 - DNA, 875 bp, Arabidopsis thaliana
  misc_feature (1)..(875): Ceres Seq. ID no. 14306853
  misc_feature (1)..(875): Ortholog of  Ceres SEQ ID NO 13638849 as cited in SEQ ID NO 52046
  misc_feature (1)..(875): Ortholog of  Ceres SEQ ID NO 13599613 as cited in SEQ ID NO 0
acatcacataccaaaaaaaggcaaaacactcacgaaagaagaaacggagaggatgaagcattatgtgctagttcacggaggctgccacggtgcgtggtgttggtacaaggtgaagccgatgcttgaacattccggccaccgtgtcacggtttttgatcttacggcgcatggtgtgaacatgagcagagtagaagatattcagactttggaggatttcgctaagccgttgcttgaggttcttgagtcttttggctcggatgataaagtagtcctcgtcgcgcatagcctcggtggaataccggctgctcttgcagccgacatgtttcctagtaaaatctctgttgctgtcttcgttacttcttttatgcccgacacaacgaatccaccttcttacgtgttcgaaaagtttctcggaagcattacagaagaagaacgtatggacttcgagttagggagctatggaacagatgaccatccactaaagactgcttttcttggacctaactacttgaagaatatgtatctactttctcctatcgaagattatgaattggccaaaatgttgatgagagtcacaccggctattactagtaatctgacggggactaaaagcttaacggcacaaggatatggatcgattagtcgtgtgtatatcgtatgcggagaagataaaggtatacgtgtagatttccaacgatggatgattgagaactctccggttaaagaagtgatggagatcaaagatgcagatcatatgcctatgttttccaagcctcatgaactctgtgatcgtcttctaaagattgctgataaatatccctaagcaagaatatctatgacaatatcaataattttcatgggaataagtttttttg

SEQ ID NO: 37347 - protein, 273 aa, Arabidopsis thaliana
  peptide (1)..(273): Ceres Seq. ID no. 14306854
HHIPKKGKTLTKEETERMKHYVLVHGGCHGAWCWYKVKPMLEHSGHRVTVFDLTAHGVNMSRVEDIQTLEDFAKPLLEVLESFGSDDKVVLVAHSLGGIPAALAADMFPSKISVAVFVTSFMPDTTNPPSYVFEKFLGSITEEERMDFELGSYGTDDHPLKTAFLGPNYLKNMYLLSPIEDYELAKMLMRVTPAITSNLTGTKSLTAQGYGSISRVYIVCGEDKGIRVDFQRWMIENSPVKEVMEIKDADHMPMFSKPHELCDRLLKIADKYP

SEQ ID NO: 37348 - protein, 256 aa, Arabidopsis thaliana
  peptide (1)..(256): Ceres Seq. ID no. 14306855
MKHYVLVHGGCHGAWCWYKVKPMLEHSGHRVTVFDLTAHGVNMSRVEDIQTLEDFAKPLLEVLESFGSDDKVVLVAHSLGGIPAALAADMFPSKISVAVFVTSFMPDTTNPPSYVFEKFLGSITEEERMDFELGSYGTDDHPLKTAFLGPNYLKNMYLLSPIEDYELAKMLMRVTPAITSNLTGTKSLTAQGYGSISRVYIVCGEDKGIRVDFQRWMIENSPVKEVMEIKDADHMPMFSKPHELCDRLLKIADKYP

SEQ ID NO: 37349 - protein, 234 aa, Arabidopsis thaliana
  peptide (1)..(234): Ceres Seq. ID no. 14306856
MLEHSGHRVTVFDLTAHGVNMSRVEDIQTLEDFAKPLLEVLESFGSDDKVVLVAHSLGGIPAALAADMFPSKISVAVFVTSFMPDTTNPPSYVFEKFLGSITEEERMDFELGSYGTDDHPLKTAFLGPNYLKNMYLLSPIEDYELAKMLMRVTPAITSNLTGTKSLTAQGYGSISRVYIVCGEDKGIRVDFQRWMIENSPVKEVMEIKDADHMPMFSKPHELCDRLLKIADKYP

SEQ ID NO: 37350 - DNA, 1055 bp, Arabidopsis thaliana
  misc_feature (1)..(1055): Ceres Seq. ID no. 12393926
  misc_feature (1)..(1055): Ortholog of  Ceres SEQ ID NO 13660094 as cited in SEQ ID NO 60820
aaaaaacgataagggatctctctctaattggcgctcctttactaattgccctttaattccatccatcttcggattcttttcaaatcaacaaaaaaagtacaaatcggatacaaatcggatccctacaatatcctctccactcttcacaaatccttctccgagatctacaaacgctgtttcattcttccgattacaatggcgacgagaagacgtactttgctcaaggtcattgtcctcggtgacagtggggttggaaaaacctccttgatgaatcaatatgtgcataagaagtttagtatgcagtataaagcaacgattggtgctgattttgtaaccaaggagcttcagattggggaaaagcttgttactttacagatttgggatactgctggacaagagagattccagagtcttggtgctgctttttatagaggagctgattgttgtgctttggtttatgatgttaatgtgttgaggtcttttgataatctcgaaacttggcatgaggagtttcttaaacaggcaagtccatcagatccaaagacatttccgtttatagtgcttggaaacaagattgacgtagatggagggagcagtagagtggtctctgataagaaagcagctgactggtgtgcttcaaatggtaacataccctatttcgagacatcagcaaaagatgacttcaatgtcgatgaggcattcttaaccattgccaaaaccgcccttgctaacgaacatgaacaggatatatacttccaaggcataccagatgcagtgactgaaaacgagccaaaaggcggtggttgcgcttgctgaaccacagatttgaggattcaatgacattcgtttttttgatgcattcatttgaaggttggtgtactcttgagttgcagaacgataagcttgtagaagcaattttttgtcattccatcatatattaattgattggagaagtctgtgtatgatcaatcgattctgctggatacaaattttatttttgtaagaagaaccattattgctcttaatccctatggcgatataaagttgcatgctac

SEQ ID NO: 37351 - protein, 206 aa, Arabidopsis thaliana
  peptide (1)..(206): Ceres Seq. ID no. 12393927
MATRRRTLLKVIVLGDSGVGKTSLMNQYVHKKFSMQYKATIGADFVTKELQIGEKLVTLQIWDTAGQERFQSLGAAFYRGADCCALVYDVNVLRSFDNLETWHEEFLKQASPSDPKTFPFIVLGNKIDVDGGSSRVVSDKKAADWCASNGNIPYFETSAKDDFNVDEAFLTIAKTALANEHEQDIYFQGIPDAVTENEPKGGGCAC

SEQ ID NO: 37352 - protein, 182 aa, Arabidopsis thaliana
  peptide (1)..(182): Ceres Seq. ID no. 12393928
MNQYVHKKFSMQYKATIGADFVTKELQIGEKLVTLQIWDTAGQERFQSLGAAFYRGADCCALVYDVNVLRSFDNLETWHEEFLKQASPSDPKTFPFIVLGNKIDVDGGSSRVVSDKKAADWCASNGNIPYFETSAKDDFNVDEAFLTIAKTALANEHEQDIYFQGIPDAVTENEPKGGGCAC

SEQ ID NO: 37353 - protein, 172 aa, Arabidopsis thaliana
  peptide (1)..(172): Ceres Seq. ID no. 12393929
MQYKATIGADFVTKELQIGEKLVTLQIWDTAGQERFQSLGAAFYRGADCCALVYDVNVLRSFDNLETWHEEFLKQASPSDPKTFPFIVLGNKIDVDGGSSRVVSDKKAADWCASNGNIPYFETSAKDDFNVDEAFLTIAKTALANEHEQDIYFQGIPDAVTENEPKGGGCAC

SEQ ID NO: 37354 - DNA, 1559 bp, Arabidopsis thaliana
  misc_feature (1)..(1559): Ceres Seq. ID no. 12693600
  misc_feature (1)..(1559): Ortholog of  Ceres SEQ ID NO 15171884 as cited in SEQ ID NO 54505
  misc_feature (1)..(1559): Ortholog of  Ceres SEQ ID NO 13596515 as cited in SEQ ID NO 62306
  misc_feature (1)..(1559): Ortholog of  Ceres SEQ ID NO 14308999 as cited in SEQ ID NO 0
  misc_feature (1)..(1559): Ortholog of  Ceres SEQ ID NO 15225075 as cited in SEQ ID NO 0
aaagactcgacggtctaccggaaaaaatggctgccaatttctggaattcatctcactataaacagcttttggatccagaagaagtcgacgtagttcatgatctcgataaagaacgtggaatctcaattgatgattttaagctcatcaagttccatatgtctaatcatattatgaaattggctcagcacattaaagtgaggcaaagggttgtagctactgcaattacgtatatgagacgggtttatatcagaaagagtatggtagagtttgagcctcgacttgttgctcttacgtgcttgtacctggcatctaaagctgaagaaagcatagtgcaggccaggaatcttgttttttacatcaaaagattgtatcctgatgagtacaacaaatatgaactaaaggatatattaggaatggagatgaaggtgttagaagcactagattattatctggttgtgtttcacccttaccggtcattatcggagtttttgcaagatgctgcattaaacgatgtaaatatgaaccagattacatggggaattgttaatgatacttataagatggacctcattcttgtacaccctccctaccgcatagcgctagcatgcatatacatagcaagtgtccacagagagaaagatatcactgcatggtttgaagatcttcatgaggacatgaacttggtaaagaatattgccatggagatactggacttctatgagaactacagaacaatcacagaggaaaaagtgaattctgccttcagcaaattggctttgaagctgatcaaagaagctatggcttccaatttctggacttcgacgcactacaaagagcttaaggacccagaagaggttaatgttgttcatcctcttgatgctcagagaggaatctctgttgaagatttcagactcattaagcttcatatgtctaattatatatcgaaactggcacaacacattaagattaggcaaagagttgttgcaactgcagtaacctatatgcgtcgtgtttacacaagaaagagtttgacggaatatgagcctcggcttgttgctcctacatgcttgtatttggcttgcaaagcagaagagagtgtggtgcatgccaaacttcttgtcttctacatgaaaaaactttatgcggatgaaaagtttcgatatgagattaaagatattctggaaatggagatgaaggtcttggaagcattgaacttctatcttgttgtattccacccatatcgatctctgcctgagttcttgcaggattctggaatcaatgacactagtatgacccatctaacttggggtcttgtcaacgacacatatagaatggacctcatccttatacatccgccgtttctcataacactcgcttgcatttacattgcttctgtacacaaagagaaagacataaagacatggtttgaagagctttctgtcgacatgaacattgtgaagaatattgcaatggagatattagatttctatgaaaaccatagactgttcacggaagagagagttcacgccgccttcaacaaacttgctacaaacccataa

SEQ ID NO: 37355 - protein, 518 aa, Arabidopsis thaliana
  peptide (1)..(518): Ceres Seq. ID no. 12693601
RLDGLPEKMAANFWNSSHYKQLLDPEEVDVVHDLDKERGISIDDFKLIKFHMSNHIMKLAQHIKVRQRVVATAITYMRRVYIRKSMVEFEPRLVALTCLYLASKAEESIVQARNLVFYIKRLYPDEYNKYELKDILGMEMKVLEALDYYLVVFHPYRSLSEFLQDAALNDVNMNQITWGIVNDTYKMDLILVHPPYRIALACIYIASVHREKDITAWFEDLHEDMNLVKNIAMEILDFYENYRTITEEKVNSAFSKLALKLIKEAMASNFWTSTHYKELKDPEEVNVVHPLDAQRGISVEDFRLIKLHMSNYISKLAQHIKIRQRVVATAVTYMRRVYTRKSLTEYEPRLVAPTCLYLACKAEESVVHAKLLVFYMKKLYADEKFRYEIKDILEMEMKVLEALNFYLVVFHPYRSLPEFLQDSGINDTSMTHLTWGLVNDTYRMDLILIHPPFLITLACIYIASVHKEKDIKTWFEELSVDMNIVKNIAMEILDFYENHRLFTEERVHAAFNKLATNP

SEQ ID NO: 37356 - protein, 510 aa, Arabidopsis thaliana
  peptide (1)..(510): Ceres Seq. ID no. 12693602
MAANFWNSSHYKQLLDPEEVDVVHDLDKERGISIDDFKLIKFHMSNHIMKLAQHIKVRQRVVATAITYMRRVYIRKSMVEFEPRLVALTCLYLASKAEESIVQARNLVFYIKRLYPDEYNKYELKDILGMEMKVLEALDYYLVVFHPYRSLSEFLQDAALNDVNMNQITWGIVNDTYKMDLILVHPPYRIALACIYIASVHREKDITAWFEDLHEDMNLVKNIAMEILDFYENYRTITEEKVNSAFSKLALKLIKEAMASNFWTSTHYKELKDPEEVNVVHPLDAQRGISVEDFRLIKLHMSNYISKLAQHIKIRQRVVATAVTYMRRVYTRKSLTEYEPRLVAPTCLYLACKAEESVVHAKLLVFYMKKLYADEKFRYEIKDILEMEMKVLEALNFYLVVFHPYRSLPEFLQDSGINDTSMTHLTWGLVNDTYRMDLILIHPPFLITLACIYIASVHKEKDIKTWFEELSVDMNIVKNIAMEILDFYENHRLFTEERVHAAFNKLATNP

SEQ ID NO: 37357 - protein, 467 aa, Arabidopsis thaliana
  peptide (1)..(467): Ceres Seq. ID no. 12693603
MSNHIMKLAQHIKVRQRVVATAITYMRRVYIRKSMVEFEPRLVALTCLYLASKAEESIVQARNLVFYIKRLYPDEYNKYELKDILGMEMKVLEALDYYLVVFHPYRSLSEFLQDAALNDVNMNQITWGIVNDTYKMDLILVHPPYRIALACIYIASVHREKDITAWFEDLHEDMNLVKNIAMEILDFYENYRTITEEKVNSAFSKLALKLIKEAMASNFWTSTHYKELKDPEEVNVVHPLDAQRGISVEDFRLIKLHMSNYISKLAQHIKIRQRVVATAVTYMRRVYTRKSLTEYEPRLVAPTCLYLACKAEESVVHAKLLVFYMKKLYADEKFRYEIKDILEMEMKVLEALNFYLVVFHPYRSLPEFLQDSGINDTSMTHLTWGLVNDTYRMDLILIHPPFLITLACIYIASVHKEKDIKTWFEELSVDMNIVKNIAMEILDFYENHRLFTEERVHAAFNKLATNP

SEQ ID NO: 37358 - DNA, 606 bp, Arabidopsis thaliana
  misc_feature (1)..(606): Ceres Seq. ID no. 12329583
  misc_feature (1)..(606): Ortholog of  Ceres SEQ ID NO 15173990 as cited in SEQ ID NO 1070
  misc_feature (1)..(606): Ortholog of  Ceres SEQ ID NO 13594900 as cited in SEQ ID NO 52042
agaaaatcctaactccagtcttgcattctgggaatagtttagagatggggagattgttcttggtgaatttggaaggcaagtcttacagttgtaagcactgcaagaccaatcttgctctctgtgatgatgtcgtctctaagtcttttcagtcccgacatgggaaagcttacctcttcagtaaggtagtgaatgtgtatgctggcaagaaagaagataggatgatgatgacgggaatgcatacggtggtcgatatttactgtgtcaaatgcggctcttatgttggatggaaatatgagtttgcttttgagaagaatcaaaagtacaaggaaggaaaatctgttctcgaaaggtacaaggtctggggtccagatgggaacaattattgggtggctcaagaagttgaagccggagacagcgatactgatgatgcttgattctcatcattcatatctgatttgtacattccctccaactctttcatttttctttattcttttttcctcattttgtaaaccatctatcttacattagaacagcttccgagaccaattgtttggtcattgctgcaactaccttggacacataagttaaagatctcattatctc

SEQ ID NO: 37359 - protein, 143 aa, Arabidopsis thaliana
  peptide (1)..(143): Ceres Seq. ID no. 12329584
KILTPVLHSGNSLEMGRLFLVNLEGKSYSCKHCKTNLALCDDVVSKSFQSRHGKAYLFSKVVNVYAGKKEDRMMMTGMHTVVDIYCVKCGSYVGWKYEFAFEKNQKYKEGKSVLERYKVWGPDGNNYWVAQEVEAGDSDTDDA

SEQ ID NO: 37360 - protein, 129 aa, Arabidopsis thaliana
  peptide (1)..(129): Ceres Seq. ID no. 12329585
MGRLFLVNLEGKSYSCKHCKTNLALCDDVVSKSFQSRHGKAYLFSKVVNVYAGKKEDRMMMTGMHTVVDIYCVKCGSYVGWKYEFAFEKNQKYKEGKSVLERYKVWGPDGNNYWVAQEVEAGDSDTDDA

SEQ ID NO: 37361 - protein, 84 aa, Arabidopsis thaliana
  peptide (1)..(84): Ceres Seq. ID no. 12329586
MLDGNMSLLLRRIKSTRKENLFSKGTRSGVQMGTIIGWLKKLKPETAILMMLDSHHSYLICTFPPTLSFFFILFSSFCKPSILH

SEQ ID NO: 37362 - DNA, 1525 bp, Arabidopsis thaliana
  misc_feature (1)..(1525): Ceres Seq. ID no. 12329587
  misc_feature (1)..(1525): Ortholog of  Ceres SEQ ID NO 14304724 as cited in SEQ ID NO 53089
  misc_feature (1)..(1525): Ortholog of  Ceres SEQ ID NO 14316196 as cited in SEQ ID NO 57780
aaagaacacaaaagtacagtttctttattcccttttttgaacactttaaacatcatcactcttgaaacacttcaaatctccggtcaacaaaaaccatgacttcaatttcttaaacaaaaagtttcaatctttttccaaacaaaacccatttcagattttgttctttgagaaaccaacatgagaaagacttctgtttcatctaatagctttggtgggtttttaagtcccggagctccgagttacgctgacaacaaaggttggagctccgagagagttcctcatccttcctccactacttcctcctctgcaattaacggtggtcgtcgtcacatcggctcttcttccgctttaacgacgccgttttacagcggcagagcaattccttcgaaatgggaagatgctgagcggtggatttgtagccctgtgtcgacttacccacaaggtgtttgtttaaattcctcagtgagttctgaacagagaaggcagaaatctaaaagtggtccgattgttcctcctacgttgcctcatccgcatcctacgtcttcttcgtcggcgactgggtgttatcactattctccgaggatgatgatgcggtctatggatgctcctcctaagggtttaatggttgctggttctccgttttctactggagttttggaggcggatagggtttttagaggaagtgtcggtggtggtggttgtgatggctatggtcgtggacctggccatggacatagccggagctgggttgatttgatgagtgaagaaacttcttcacttagctccaaaactgatacagaggagaaagcagagatgacgacggcgatgcaatctccggtggtatcaagaagagatatggctactcagatgagtccagaagagacgagtcctaataacaataaccagtctccaccattggttgtttctgtgattgagccacctccttgtagaggtgaagtgagagaagtgaaaatggataaaggagcaagaatgattaagcgtccaaagagacgagtcatgtcttctaggattattaggagagagcaacctgaggttgaagacaattctgaagcttctgcttcttcttcttcttgggatatctcagaaccagccatgactctttctaagttgcaaagagaggaagcgaagattgcagcttgggaaaatctgcagaaggcgaaagcagaagccgctattagaaaacttgaggtgaagctggagaagaagaaatcagcatcaatggataagatcttgaacaagcttcaaacagctaagatcaaagcacaagagatgaggagaagttcagtatccagtgaacatgaacaacaacaagggaatcatcaaatctccagaaactcggtgaagatcacgcatcttgttcgaagacatactttcatgactcctttcatgacttgctttgctcctcgtgttgattgcagaaaatcttcttctgctctctgaatttttttattgaaaagacaatttgatcaaaagaaaaaaaaatgtacactgcgaatttttcttg

SEQ ID NO: 37363 - protein, 427 aa, Arabidopsis thaliana
  peptide (1)..(427): Ceres Seq. ID no. 12329588
MRKTSVSSNSFGGFLSPGAPSYADNKGWSSERVPHPSSTTSSSAINGGRRHIGSSSALTTPFYSGRAIPSKWEDAERWICSPVSTYPQGVCLNSSVSSEQRRQKSKSGPIVPPTLPHPHPTSSSSATGCYHYSPRMMMRSMDAPPKGLMVAGSPFSTGVLEADRVFRGSVGGGGCDGYGRGPGHGHSRSWVDLMSEETSSLSSKTDTEEKAEMTTAMQSPVVSRRDMATQMSPEETSPNNNNQSPPLVVSVIEPPPCRGEVREVKMDKGARMIKRPKRRVMSSRIIRREQPEVEDNSEASASSSSWDISEPAMTLSKLQREEAKIAAWENLQKAKAEAAIRKLEVKLEKKKSASMDKILNKLQTAKIKAQEMRRSSVSSEHEQQQGNHQISRNSVKITHLVRRHTFMTPFMTCFAPRVDCRKSSSAL

SEQ ID NO: 37364 - protein, 292 aa, Arabidopsis thaliana
  peptide (1)..(292): Ceres Seq. ID no. 12329589
MMMRSMDAPPKGLMVAGSPFSTGVLEADRVFRGSVGGGGCDGYGRGPGHGHSRSWVDLMSEETSSLSSKTDTEEKAEMTTAMQSPVVSRRDMATQMSPEETSPNNNNQSPPLVVSVIEPPPCRGEVREVKMDKGARMIKRPKRRVMSSRIIRREQPEVEDNSEASASSSSWDISEPAMTLSKLQREEAKIAAWENLQKAKAEAAIRKLEVKLEKKKSASMDKILNKLQTAKIKAQEMRRSSVSSEHEQQQGNHQISRNSVKITHLVRRHTFMTPFMTCFAPRVDCRKSSSAL

SEQ ID NO: 37365 - protein, 291 aa, Arabidopsis thaliana
  peptide (1)..(291): Ceres Seq. ID no. 12329590
MMRSMDAPPKGLMVAGSPFSTGVLEADRVFRGSVGGGGCDGYGRGPGHGHSRSWVDLMSEETSSLSSKTDTEEKAEMTTAMQSPVVSRRDMATQMSPEETSPNNNNQSPPLVVSVIEPPPCRGEVREVKMDKGARMIKRPKRRVMSSRIIRREQPEVEDNSEASASSSSWDISEPAMTLSKLQREEAKIAAWENLQKAKAEAAIRKLEVKLEKKKSASMDKILNKLQTAKIKAQEMRRSSVSSEHEQQQGNHQISRNSVKITHLVRRHTFMTPFMTCFAPRVDCRKSSSAL

SEQ ID NO: 37366 - DNA, 1002 bp, Arabidopsis thaliana
  misc_feature (1)..(1002): Ceres Seq. ID no. 12603466
  misc_feature (1)..(1002): Ortholog of  Ceres SEQ ID NO 12635696 as cited in SEQ ID NO 0
atacacaacccctcttcttctccaccttctctccattttctctttctctcatatctctctgtctacttctactcctctttctccatctgcaactcatatatttccaaaaagtgatcaagatcaacaaaatatccgaatcttgatccgaactttctttcttcgcttaacttcttgtaaatatatataactatagtctatactctatagagcatatatataaacatgaagcgaggtctagatatggcgagaagctacaatgatcatgaaagtagtcaagaaaccggacccgaatcaccaaattcttcaacctttaacggcatgaaagctcttatctcttctcattcgcctaaaagaagcaggagatccgtagagaagagagtagtgaacgtaccgatgaaagaaatggaaggatctcggcacaaaggggacacaactccgccctcagattcatgggcttggcgtaagtacggccaaaagcccattaagggatctccataccctagaggttattaccgttgtagtagcacaaaaggttgtccggcgaggaagcaagtcgagagaagcagagatgatccaacgatgattctcatcacttacacttctgagcataaccatccttggcctctcacttcttccacaagaaacgggcctaaacctaaacccgagcccaaacccgaacctgagcctgaggtagagccagaggcggaggaggaggataataagtttatggttcttggaagggggattgaaacgacgccatcatgtgtcgacgagttcgcatggtttacggagatggagacaacatcttcgacgattcttgagagcccgattttctcgtcggagaaaaagacggctgtctcgggggctgatgacgtggcggtgttctttccgatgggagaagaggatgagtctttgttcgccgatctcggcgagttgccggagtgttctgtggtgtttcgtcaccggagtagcgtagtggggtcacaagttgagatcttttga

SEQ ID NO: 37367 - protein, 259 aa, Arabidopsis thaliana
  peptide (1)..(259): Ceres Seq. ID no. 12603467
MKRGLDMARSYNDHESSQETGPESPNSSTFNGMKALISSHSPKRSRRSVEKRVVNVPMKEMEGSRHKGDTTPPSDSWAWRKYGQKPIKGSPYPRGYYRCSSTKGCPARKQVERSRDDPTMILITYTSEHNHPWPLTSSTRNGPKPKPEPKPEPEPEVEPEAEEEDNKFMVLGRGIETTPSCVDEFAWFTEMETTSSTILESPIFSSEKKTAVSGADDVAVFFPMGEEDESLFADLGELPECSVVFRHRSSVVGSQVEIF

SEQ ID NO: 37368 - protein, 253 aa, Arabidopsis thaliana
  peptide (1)..(253): Ceres Seq. ID no. 12603468
MARSYNDHESSQETGPESPNSSTFNGMKALISSHSPKRSRRSVEKRVVNVPMKEMEGSRHKGDTTPPSDSWAWRKYGQKPIKGSPYPRGYYRCSSTKGCPARKQVERSRDDPTMILITYTSEHNHPWPLTSSTRNGPKPKPEPKPEPEPEVEPEAEEEDNKFMVLGRGIETTPSCVDEFAWFTEMETTSSTILESPIFSSEKKTAVSGADDVAVFFPMGEEDESLFADLGELPECSVVFRHRSSVVGSQVEIF

SEQ ID NO: 37369 - protein, 227 aa, Arabidopsis thaliana
  peptide (1)..(227): Ceres Seq. ID no. 12603469
MKALISSHSPKRSRRSVEKRVVNVPMKEMEGSRHKGDTTPPSDSWAWRKYGQKPIKGSPYPRGYYRCSSTKGCPARKQVERSRDDPTMILITYTSEHNHPWPLTSSTRNGPKPKPEPKPEPEPEVEPEAEEEDNKFMVLGRGIETTPSCVDEFAWFTEMETTSSTILESPIFSSEKKTAVSGADDVAVFFPMGEEDESLFADLGELPECSVVFRHRSSVVGSQVEIF

SEQ ID NO: 37370 - DNA, 1211 bp, Arabidopsis thaliana
  misc_feature (1)..(1211): Ceres Seq. ID no. 12420820
  misc_feature (1)..(1211): Ortholog of  Ceres SEQ ID NO 15178630 as cited in SEQ ID NO 0
agtgaaagagtgaatcaaagaggtgcggcggtcgccggcgaagacgtgtgctcgtcgaagaaacttctccaacctaaaattttccgaagaagtaagagttgagcaagttatcaatggaaatcgatgaagaagagccaatggtgttcttggaccgtacaacaagagcaacacggggtaaacggatgaccaagttgcttgatgacgaagtagaagaagatgaacagttttggaatcaagaagctcttaaagaggaagaacatgatgatgaatatgaagcagaacgtgaggttgctgatgagtttgacagtgacttcaatgacgatgagcctgagcctgatgcagtcgctgtaaatgaaaaagaattgagggatctgccaaagaagcggctgatttaccctgggaaaactgcttcaaagaaaaagaaaaagaagacgaaggtagtttcacaactagaatatattcctggagatgagaagccaggtgaagaattgggaaacaaggaacaagaagaaaaagaagagaatgaagcacaagaagatatggaaggtgagaaagtcattaggaaatcaacacggacttcagtggttgtacggcaagcagaaagagatgcattgcgtgctgctatacaagcaacaacaaagccaatacaaaggaaaaaagtaggggaggaaaaacggatgacccaagaagaaatgctgctggaagctgctcaaacagaaatcatgaacttgaggaatttagaacgtgtcttggcaagggaagaagaagtaaaaaagaaagcgattgtgcataaagcagtctacaagggtcctcagattcggtatcattcaaaagatggatgtaactatttagaattctgtaatggtgcgtcattcaattcagagttgtcgacgaagtctgttccctatccagaaaaagctgtatgtgtgattacgggattacctgccaagtaccgggatccaaaaacgggtcttccttatgcaactagagacgccttcaaagcaatacgtgaaaggttcatggacgaacatgatggtttgagaaagaaaatggagatgggagatttgtttgatacactagtggcgaaaggttttgcaacaaaacaaaagagaacgaagattccaaagagtaacaaatcattttccctcagaagctcagctcgtttccttagctccgagtctgaagaagagagtgaagaagattcagattaa

SEQ ID NO: 37371 - protein, 365 aa, Arabidopsis thaliana
  peptide (1)..(365): Ceres Seq. ID no. 12420821
MEIDEEEPMVFLDRTTRATRGKRMTKLLDDEVEEDEQFWNQEALKEEEHDDEYEAEREVADEFDSDFNDDEPEPDAVAVNEKELRDLPKKRLIYPGKTASKKKKKKTKVVSQLEYIPGDEKPGEELGNKEQEEKEENEAQEDMEGEKVIRKSTRTSVVVRQAERDALRAAIQATTKPIQRKKVGEEKRMTQEEMLLEAAQTEIMNLRNLERVLAREEEVKKKAIVHKAVYKGPQIRYHSKDGCNYLEFCNGASFNSELSTKSVPYPEKAVCVITGLPAKYRDPKTGLPYATRDAFKAIRERFMDEHDGLRKKMEMGDLFDTLVAKGFATKQKRTKIPKSNKSFSLRSSARFLSSESEEESEEDSD

SEQ ID NO: 37372 - protein, 357 aa, Arabidopsis thaliana
  peptide (1)..(357): Ceres Seq. ID no. 12420822
MVFLDRTTRATRGKRMTKLLDDEVEEDEQFWNQEALKEEEHDDEYEAEREVADEFDSDFNDDEPEPDAVAVNEKELRDLPKKRLIYPGKTASKKKKKKTKVVSQLEYIPGDEKPGEELGNKEQEEKEENEAQEDMEGEKVIRKSTRTSVVVRQAERDALRAAIQATTKPIQRKKVGEEKRMTQEEMLLEAAQTEIMNLRNLERVLAREEEVKKKAIVHKAVYKGPQIRYHSKDGCNYLEFCNGASFNSELSTKSVPYPEKAVCVITGLPAKYRDPKTGLPYATRDAFKAIRERFMDEHDGLRKKMEMGDLFDTLVAKGFATKQKRTKIPKSNKSFSLRSSARFLSSESEEESEEDSD

SEQ ID NO: 37373 - protein, 342 aa, Arabidopsis thaliana
  peptide (1)..(342): Ceres Seq. ID no. 12420823
MTKLLDDEVEEDEQFWNQEALKEEEHDDEYEAEREVADEFDSDFNDDEPEPDAVAVNEKELRDLPKKRLIYPGKTASKKKKKKTKVVSQLEYIPGDEKPGEELGNKEQEEKEENEAQEDMEGEKVIRKSTRTSVVVRQAERDALRAAIQATTKPIQRKKVGEEKRMTQEEMLLEAAQTEIMNLRNLERVLAREEEVKKKAIVHKAVYKGPQIRYHSKDGCNYLEFCNGASFNSELSTKSVPYPEKAVCVITGLPAKYRDPKTGLPYATRDAFKAIRERFMDEHDGLRKKMEMGDLFDTLVAKGFATKQKRTKIPKSNKSFSLRSSARFLSSESEEESEEDSD

SEQ ID NO: 37374 - DNA, 694 bp, Arabidopsis thaliana
  misc_feature (1)..(694): Ceres Seq. ID no. 13576731
  misc_feature (1)..(694): Ortholog of  Ceres SEQ ID NO 13598935 as cited in SEQ ID NO 1239
  misc_feature (1)..(694): Ortholog of  Ceres SEQ ID NO 14316515 as cited in SEQ ID NO 57228
  misc_feature (1)..(694): Ortholog of  Ceres SEQ ID NO 13598171 as cited in SEQ ID NO 61357
  misc_feature (1)..(694): Ortholog of  Ceres SEQ ID NO 13664149 as cited in SEQ ID NO 61490
cccccgaccacttatgtaaacaaaccaaccatagtaaccaaaaccacaacaaaacacatggctaagctcattttcttcctcgccgtccaaatcctctttctcgccgtggtttcttccgccggagacggtgaagacttcgctagaaccatggaccggaaacttcttggtctccacaaaaaggagaaacttacccatttcaaagtctattggcacgatatcttaagcggtccgaacccaacctccatcatgatacaaccaccggttacaaacagttcctattttggagccatctccatgatcgacaacgctttgacggccaaagttccgatgaactccacggtgttgggtcaggcccaaggattttacgccggagcggcccaaaaggagttgggtttcctgatggcgatgaactttgctttcaagacagggaaatataacggaagcacgatcacgattcttggcaggaacacggcgttgtcggaagtcagagaaatgccgatcgtcggaggaagtgggcttttccgatttgctagaggctatgtggaggctaggacaaagtggattaatctcaagaacggtgatgctactgttgagtatagttgttacgtgttgcattattgaggttaattaatgatatttttgtctttctctatatttaatttgactacgcaataattaataaaacagatttcaa

SEQ ID NO: 37375 - protein, 206 aa, Arabidopsis thaliana
  peptide (1)..(206): Ceres Seq. ID no. 13576732
PPTTYVNKPTIVTKTTTKHMAKLIFFLAVQILFLAVVSSAGDGEDFARTMDRKLLGLHKKEKLTHFKVYWHDILSGPNPTSIMIQPPVTNSSYFGAISMIDNALTAKVPMNSTVLGQAQGFYAGAAQKELGFLMAMNFAFKTGKYNGSTITILGRNTALSEVREMPIVGGSGLFRFARGYVEARTKWINLKNGDATVEYSCYVLHY

SEQ ID NO: 37376 - protein, 187 aa, Arabidopsis thaliana
  peptide (1)..(187): Ceres Seq. ID no. 13576733
MAKLIFFLAVQILFLAVVSSAGDGEDFARTMDRKLLGLHKKEKLTHFKVYWHDILSGPNPTSIMIQPPVTNSSYFGAISMIDNALTAKVPMNSTVLGQAQGFYAGAAQKELGFLMAMNFAFKTGKYNGSTITILGRNTALSEVREMPIVGGSGLFRFARGYVEARTKWINLKNGDATVEYSCYVLHY

SEQ ID NO: 37377 - protein, 157 aa, Arabidopsis thaliana
  peptide (1)..(157): Ceres Seq. ID no. 13576734
MDRKLLGLHKKEKLTHFKVYWHDILSGPNPTSIMIQPPVTNSSYFGAISMIDNALTAKVPMNSTVLGQAQGFYAGAAQKELGFLMAMNFAFKTGKYNGSTITILGRNTALSEVREMPIVGGSGLFRFARGYVEARTKWINLKNGDATVEYSCYVLHY

SEQ ID NO: 37378 - DNA, 576 bp, Arabidopsis thaliana
  misc_feature (1)..(576): Ceres Seq. ID no. 12420816
  misc_feature (1)..(576): Ortholog of  Ceres SEQ ID NO 12422485 as cited in SEQ ID NO 20557
gtcggactcagtggagaagaaggaagatccaaatcgatccgttgaaaaggaatttcgaatttgctgtgcgatgtcgagtgcggtggacgctacgggaaacccgatccctacttcggcggttttaacggcgtcagcgaagcatataggtatgaggtgtatgccggagaatgttgcgttcctcaaatgcaagaagaatgatccaaacccagagaagtgtctcgacaaaggtcgtgacgtcactcgctgcgtgcttggcttgaaaaggagatgggattatgttgggtgtatgtattactacacaaacgagtttgatctgtgtaggaaagagcaagaagccttcgagaaagtgtgtcccttgaaatgagaatcacaagttcttgtcatgttttgatttgtatctcataataaagcaaaatgttcatttttgaatgagctttactctctccatctcttgtttgttgtcatcccatttatttcctctcagatgctttcgtagtgagttccaaagacaactaaatgactcagttttattgttcgatggttcactaatcagcacagaatggaacaattgttttt

SEQ ID NO: 37379 - protein, 120 aa, Arabidopsis thaliana
  peptide (1)..(120): Ceres Seq. ID no. 12420817
SDSVEKKEDPNRSVEKEFRICCAMSSAVDATGNPIPTSAVLTASAKHIGMRCMPENVAFLKCKKNDPNPEKCLDKGRDVTRCVLGLKRRWDYVGCMYYYTNEFDLCRKEQEAFEKVCPLK

SEQ ID NO: 37380 - protein, 97 aa, Arabidopsis thaliana
  peptide (1)..(97): Ceres Seq. ID no. 12420818
MSSAVDATGNPIPTSAVLTASAKHIGMRCMPENVAFLKCKKNDPNPEKCLDKGRDVTRCVLGLKRRWDYVGCMYYYTNEFDLCRKEQEAFEKVCPLK

SEQ ID NO: 37381 - protein, 71 aa, Arabidopsis thaliana
  peptide (1)..(71): Ceres Seq. ID no. 12420819
MRCMPENVAFLKCKKNDPNPEKCLDKGRDVTRCVLGLKRRWDYVGCMYYYTNEFDLCRKEQEAFEKVCPLK

SEQ ID NO: 37382 - DNA, 2395 bp, Arabidopsis thaliana
  misc_feature (1)..(2395): Ceres Seq. ID no. 13497276
  misc_feature (1)..(2395): Ortholog of  Ceres SEQ ID NO 15175681 as cited in SEQ ID NO 55458
  misc_feature (1)..(2395): Ortholog of  Ceres SEQ ID NO 15180188 as cited in SEQ ID NO 0
atctctctctttcttcttccactcgtgaaagaaagaccagagagttttctcctgatccacacaacaacaacaacacagagatcccaaatccggaagatatcttcttctctcataactcagtttactcagattcactgaaacatacaattaagtgagcagtaaccgtcagtctctcacctgcagcaaaattcactcttctgctaataatgttctccacagagattcatctattgatcattttgactttttcaggaaccagagatgaaaaattatagttaaggttagtagtagtagataggtttaataaatttgtagttaagtaacccaaaaaaataacattaaactaaaatccaacactagaaaccagagagaccctcttaacgacaacaacctctctgtacacaagacaacaaacactctctacaaaaacactactctttccttcttcttctctctactctattctaattctaaagagagagagaaaagctatggatggatatgaagctactaggattgtgctctctagaatccaaagcttagaccctgaaaacgcatcaaagatcatgggtcttctccttcttcaagatcacggtgaaaaagagatgataaggctagcttttggtccagagactcttgttcactctgttatagtgaaagccaagaaagagttaggtctcatgaactgttcaaggtctccgtggagtcatcaagatgagttgattagccctaagaacaaccgtggctcttcactcaatccagcttctttgcccttttacgctaatggaggaagatcttctagggatttaaccaacgatttcgagctcatggatgatatgaactccagaagtactgattttttgggctctgtgcatgcgagaagcggtagctgcgttttggacggtttagggtatggtggtgattctgatttagggtttggaggtgtgccctgttcttacttcgctagaggcttctgcaaaaacggagctagctgcagattcgtccacagtgatggaggagctgatttggttggctccccaagcagaatcgagcttcttaggtctaactcggtacccccaagacttgctcaccacttcatgactcgctcttctctcccttctttttcaactaaaggtgttaacttgcagcaaaacgatgttcaaagagctgctgctgctttgatgataggagatgaattgcagaagcttggaagatggagacctgaaaggattgatctttctgctatggcttgtccagcttcaagacagatctatctgacattccctgccgacagtaggttcagggaggaagatgtgtccaattacttcagtacttttggaccagttcaagatgtgaggataccatatcagcaaaagagaatgtttggttttgtgacatttgtgtaccctgagactgttaagagcattctcgccaaagggaatcctcactttgtgtgtgattccagagttcttgtcaagccttacaaggagaaaggcaaagtccctgacaaatacagaactaaccaaacaacagagcgagaactgtccccaacaggccttgattctagccctagggacgttctaggagggagagggttttataacaacactcaagatgtgttgtggaggagtaagtttgaagaagagattcttgaacttcagagcagaaggctgatgaatctgcagcttcttgacgtcaagaagcatttccaactcaattcccctaccaacattcactctccgaatcctttcagccaatcacttatatctccacgcccattgtccgtgatcaagagagagtatgatggaggagagaaagggaaaggaagttctaaagaaggatctgatgatgatacaatgaatctaccagagaggttggaggatagcttgccagatagtccgtttgcatcgcccgctcatcatttgcttctgtttgctgattctgctgacaataacggatcggatctgtggtcgccttcttctgataatgatgataattctactccttctacactctccgactccttcaactctttcaactaccaaatgccaaggttaccggcgattggaatgttacccggtaggggtggaccaacctgtcgtgttgggatataaacaggaagtgaagtaagaaaagaaaaaaactgataaaatagagagacccttaataaccaaaaagatgcagaggtgtaaaaaataaaaagcaggaaatttgatgtaagagataggagaagagaaagaaggaagattgttgtaccatttctctagttttaatgtgttatgtgatgatggaccacacaagatgatgtaatatgatatgatatgatatatataatataggacaagaagtgtaatctctctaaagatatacaaaagaaaagagagattatcatttg

SEQ ID NO: 37383 - protein, 540 aa, Arabidopsis thaliana
  peptide (1)..(540): Ceres Seq. ID no. 13497277
MDGYEATRIVLSRIQSLDPENASKIMGLLLLQDHGEKEMIRLAFGPETLVHSVIVKAKKELGLMNCSRSPWSHQDELISPKNNRGSSLNPASLPFYANGGRSSRDLTNDFELMDDMNSRSTDFLGSVHARSGSCVLDGLGYGGDSDLGFGGVPCSYFARGFCKNGASCRFVHSDGGADLVGSPSRIELLRSNSVPPRLAHHFMTRSSLPSFSTKGVNLQQNDVQRAAAALMIGDELQKLGRWRPERIDLSAMACPASRQIYLTFPADSRFREEDVSNYFSTFGPVQDVRIPYQQKRMFGFVTFVYPETVKSILAKGNPHFVCDSRVLVKPYKEKGKVPDKYRTNQTTERELSPTGLDSSPRDVLGGRGFYNNTQDVLWRSKFEEEILELQSRRLMNLQLLDVKKHFQLNSPTNIHSPNPFSQSLISPRPLSVIKREYDGGEKGKGSSKEGSDDDTMNLPERLEDSLPDSPFASPAHHLLLFADSADNNGSDLWSPSSDNDDNSTPSTLSDSFNSFNYQMPRLPAIGMLPGRGGPTCRVGI

SEQ ID NO: 37384 - protein, 515 aa, Arabidopsis thaliana
  peptide (1)..(515): Ceres Seq. ID no. 13497278
MGLLLLQDHGEKEMIRLAFGPETLVHSVIVKAKKELGLMNCSRSPWSHQDELISPKNNRGSSLNPASLPFYANGGRSSRDLTNDFELMDDMNSRSTDFLGSVHARSGSCVLDGLGYGGDSDLGFGGVPCSYFARGFCKNGASCRFVHSDGGADLVGSPSRIELLRSNSVPPRLAHHFMTRSSLPSFSTKGVNLQQNDVQRAAAALMIGDELQKLGRWRPERIDLSAMACPASRQIYLTFPADSRFREEDVSNYFSTFGPVQDVRIPYQQKRMFGFVTFVYPETVKSILAKGNPHFVCDSRVLVKPYKEKGKVPDKYRTNQTTERELSPTGLDSSPRDVLGGRGFYNNTQDVLWRSKFEEEILELQSRRLMNLQLLDVKKHFQLNSPTNIHSPNPFSQSLISPRPLSVIKREYDGGEKGKGSSKEGSDDDTMNLPERLEDSLPDSPFASPAHHLLLFADSADNNGSDLWSPSSDNDDNSTPSTLSDSFNSFNYQMPRLPAIGMLPGRGGPTCRVGI

SEQ ID NO: 37385 - protein, 502 aa, Arabidopsis thaliana
  peptide (1)..(502): Ceres Seq. ID no. 13497279
MIRLAFGPETLVHSVIVKAKKELGLMNCSRSPWSHQDELISPKNNRGSSLNPASLPFYANGGRSSRDLTNDFELMDDMNSRSTDFLGSVHARSGSCVLDGLGYGGDSDLGFGGVPCSYFARGFCKNGASCRFVHSDGGADLVGSPSRIELLRSNSVPPRLAHHFMTRSSLPSFSTKGVNLQQNDVQRAAAALMIGDELQKLGRWRPERIDLSAMACPASRQIYLTFPADSRFREEDVSNYFSTFGPVQDVRIPYQQKRMFGFVTFVYPETVKSILAKGNPHFVCDSRVLVKPYKEKGKVPDKYRTNQTTERELSPTGLDSSPRDVLGGRGFYNNTQDVLWRSKFEEEILELQSRRLMNLQLLDVKKHFQLNSPTNIHSPNPFSQSLISPRPLSVIKREYDGGEKGKGSSKEGSDDDTMNLPERLEDSLPDSPFASPAHHLLLFADSADNNGSDLWSPSSDNDDNSTPSTLSDSFNSFNYQMPRLPAIGMLPGRGGPTCRVGI

SEQ ID NO: 37386 - DNA, 416 bp, Arabidopsis thaliana
  misc_feature (1)..(416): Ceres Seq. ID no. 12580516
  misc_feature (1)..(416): Ortholog of  Ceres SEQ ID NO 13656408 as cited in SEQ ID NO 65810
gctcattagggtttctcatctacgacggcgtggtgttcctccttcctgctctgaaaaatggcgaagagaacgaagaaggttggaatcgtcggcaaatacggaacacgttatggtgcgagtatcaggaagcagattaagaagatggaggtcagccagcacagcaagtacttctgtgagttctgtggcaagtacggagtgaagcgaaaggctgttggtatctggggttgcaaggattgtggcaaggtcaaggcaggtggtgcttacacaatgaacaccgccagtgcggtcactgttagaagcacgatcagaaggttgagggagcagatcgagggttaaaagtctgctggctttttatatttggtttccttgttttgacaatttaagttttgcatcaacagtgagaacatgttttgatt

SEQ ID NO: 37387 - protein, 92 aa, Arabidopsis thaliana [sequence omitted]

SEQ ID NO: 37388 - protein, 65 aa, Arabidopsis thaliana; identical to SEQ ID NO: 30081
  peptide (1)..(65): Ceres Seq. ID no. 12580518

SEQ ID NO: 37389 - protein, 64 aa, Arabidopsis thaliana; identical to SEQ ID NO: 30082
  peptide (1)..(64): Ceres Seq. ID no. 12580519

SEQ ID NO: 37390 - DNA, 1290 bp, Arabidopsis thaliana
  misc_feature (1)..(1290): Ceres Seq. ID no. 12393914
  misc_feature (1)..(1290): Ortholog of  Ceres SEQ ID NO 15179641 as cited in SEQ ID NO 56414
  misc_feature (1)..(1290): Ortholog of  Ceres SEQ ID NO 14302220 as cited in SEQ ID NO 69121
atccgcatccgctgcctccgcctctcgagtctcgtccacccgtcgtcctcctagctcctctactcgccagtcgccatgggcaagattaagatcggaatcaacggcttcggaaggatcggcaggctcgtggccagggtcgccctccagagcgaggatgtcgagctcgtcgccgtcaacgaccccttcatcaccacggactacatgacctacatgttcaagtacgacaccgtccacggccactggaagcacagcgacatcacactcaagaactccaagacccttctcttcggtgacaagccggtcaccgtctttggcatcaggaaccctgaggaaatcccgtggggtgaggctggcgctgagtacgtcgtggagtccaccggcgtcttcactgacaaggacaaggctgctcacatctcaagggtggtgccaagaaggttgttatctctgccccaagcaaagacgcacccatgtttgttgttggtgtcaatgaggacaagtacacctcggatgttaacattgtttccaatgctagctgcaccacaaactgccttgctccccttgctaaggtcattcatgacaacttcggcattgttgagggtttgatgacaactgttcatgccatcactgccacccagaaaactgttgacggaccctcagccaaggactggagaggtggcagggctgccagctttaacatcattcctagcagcaccggtgctgccaaggctgttggtaaagttcttcctgatctgaatggcaagctcactggtatgtccttccgtgttcctactgtggatgtctcggttgttgacctcaccgtcagaatcgagaagggggcctcctatgaggatatcaagaaagctattaaggctgcttccgagggtccactcaagggtatcatgggttatgcggaggaggatctggtttctaccgacttccttggtgacagcaggtcgagcatcttcgacgccaaggccgggatcgctctgaacgaccacttcgtcaagctcgtctcgtggtacgacaacgagtggggctacagcaaccgcgtcgtcgacctgatccgccacatgttcaagacccagtagaggggttttttccccctgcttctcatggatggttgctgcttgtgtatgccgagaataaatgtggatggcgcgtgcctctgggtcgccaggttcatgctgagtctggacatgttttgcacttttgcttcccttcctgctaccatctgtgacagaaccgctcgctaatatgggacctgagattagctttttgctgcttgtggtg

SEQ ID NO: 37391 - protein, 206 aa, Arabidopsis thaliana
  peptide (1)..(206): Ceres Seq. ID no. 12393915
MFVVGVNEDKYTSDVNIVSNASCTTNCLAPLAKVIHDNFGIVEGLMTTVHAITATQKTVDGPSAKDWRGGRAASFNIIPSSTGAAKAVGKVLPDLNGKLTGMSFRVPTVDVSVVDLTVRIEKGASYEDIKKAIKAASEGPLKGIMGYAEEDLVSTDFLGDSRSSIFDAKAGIALNDHFVKLVSWYDNEWGYSNRVVDLIRHMFKTQ

SEQ ID NO: 37392 - protein, 175 aa, Arabidopsis thaliana
  peptide (1)..(175): Ceres Seq. ID no. 12393916
MGKIKIGINGFGRIGRLVARVALQSEDVELVAVNDPFITTDYMTYMFKYDTVHGHWKHSDITLKNSKTLLFGDKPVTVFGIRNPEEIPWGEAGAEYVVESTGVFTDKDKAAHISRVVPRRLLSLPQAKTHPCLLLVSMRTSTPRMLTLFPMLAAPQTALLPLLRSFMTTSALLRV

SEQ ID NO: 37393 - protein, 161 aa, Arabidopsis thaliana
  peptide (1)..(161): Ceres Seq. ID no. 12393917
MTTVHAITATQKTVDGPSAKDWRGGRAASFNIIPSSTGAAKAVGKVLPDLNGKLTGMSFRVPTVDVSVVDLTVRIEKGASYEDIKKAIKAASEGPLKGIMGYAEEDLVSTDFLGDSRSSIFDAKAGIALNDHFVKLVSWYDNEWGYSNRVVDLIRHMFKTQ

SEQ ID NO: 37394 - DNA, 1271 bp, Arabidopsis thaliana
  misc_feature (1)..(1271): Ceres Seq. ID no. 13496930
  misc_feature (1)..(1271): Ortholog of  Ceres SEQ ID NO 14314464 as cited in SEQ ID NO 52405
  misc_feature (1)..(1271): Ortholog of  Ceres SEQ ID NO 15177592 as cited in SEQ ID NO 58436
  misc_feature (1)..(1271): Ortholog of  Ceres SEQ ID NO 13655251 as cited in SEQ ID NO 62888
  misc_feature (1)..(1271): Ortholog of  Ceres SEQ ID NO 13597194 as cited in SEQ ID NO 63661
  misc_feature (1)..(1271): Ortholog of  Ceres SEQ ID NO 14302883 as cited in SEQ ID NO 66384
  misc_feature (1)..(1271): Ortholog of  Ceres SEQ ID NO 13662855 as cited in SEQ ID NO 69059
aaaaaaactcttaaacagcttcctaacgagaggaaactgaggaacacaacaatggagtttcgtggagatgccaaccagaggattgctaggatttcagctcatctcactcctcagatggaggccaagaactctgtaatcggacgggaaaactgcagagctaaaggtggtaatccaggattcaaagtagcaattcttggagctgcaggtggaattggacaatctttatctttgctgatgaagatgaaccctcttgtctctttacttcatctctacgatgttgtcaatgctcctggcgtcactgctgacgtcagtcatatggacactggagctgttgtccgcgggttcttgggagcgaagcagcttgaggacgcgctaacgggtatggatcttgtgatcataccagccggtataccgaggaaaccagggatgacccgcgatgatctgtttaaaatcaatgctgggattgttaaaacactatgtgaaggtgtagcaaaatgttgtcctaatgctattgtcaacttgatcagcaaccctgtgaactctactgtccccattgccgctgaggttttcaagaaagctggaacttatgatcctaagaagctccttggagttactacactcgatgttgctcgtgccaacacatttgtggcagaagttcttggccttgatccaagagaagtcgatgtgccagtagttgggggacacgccggagtcacaatcttgccactactgtcacaggttaaacctcctagcagcttcacacctcaagaaattgagtacctgacaaaccggattcaaaatggtggaactgaagttgtggaggcaaaagctggagctggttctgcaacactttcaatggcatatgctgcagccaagtttgcagatgcttgccttcgcgggttaagaggagatgcgaatgtcgtagaatgctcttttgttgcttcacaggtgacagaattagctttctttgcaacaaaagtgcgccttggccgtacaggagcagaggaagtgtatcagcttggacccttaaacgaatacgaaaggattggtctggagaaagcaaaagatgaattagccggaagtattcagaaaggtgttgaattcatcagaaaatgaaactgagagataatcagagagatacaataagttatttcctcaactatatgatcatgtactcatcatcacatcatgcctatgtctcctctgcttctgatacaactttgtataaatccttatcagtttgtgtacgatatatgtgaccttttcaacgt

SEQ ID NO: 37395 - protein, 371 aa, Arabidopsis thaliana
  peptide (1)..(371): Ceres Seq. ID no. 13496931
KKTLKQLPNERKLRNTTMEFRGDANQRIARISAHLTPQMEAKNSVIGRENCRAKGGNPGFKVAILGAAGGIGQSLSLLMKMNPLVSLLHLYDVVNAPGVTADVSHMDTGAVVRGFLGAKQLEDALTGMDLVIIPAGIPRKPGMTRDDLFKINAGIVKTLCEGVAKCCPNAIVNLISNPVNSTVPIAAEVFKKAGTYDPKKLLGVTTLDVARANTFVAEVLGLDPREVDVPVVGGHAGVTILPLLSQVKPPSSFTPQEIEYLTNRIQNGGTEVVEAKAGAGSATLSMAYAAAKFADACLRGLRGDANVVECSFVASQVTELAFFATKVRLGRTGAEEVYQLGPLNEYERIGLEKAKDELAGSIQKGVEFIRK

SEQ ID NO: 37396 - protein, 354 aa, Arabidopsis thaliana
  peptide (1)..(354): Ceres Seq. ID no. 13496932
MEFRGDANQRIARISAHLTPQMEAKNSVIGRENCRAKGGNPGFKVAILGAAGGIGQSLSLLMKMNPLVSLLHLYDVVNAPGVTADVSHMDTGAVVRGFLGAKQLEDALTGMDLVIIPAGIPRKPGMTRDDLFKINAGIVKTLCEGVAKCCPNAIVNLISNPVNSTVPIAAEVFKKAGTYDPKKLLGVTTLDVARANTFVAEVLGLDPREVDVPVVGGHAGVTILPLLSQVKPPSSFTPQEIEYLTNRIQNGGTEVVEAKAGAGSATLSMAYAAAKFADACLRGLRGDANVVECSFVASQVTELAFFATKVRLGRTGAEEVYQLGPLNEYERIGLEKAKDELAGSIQKGVEFIRK

SEQ ID NO: 37397 - protein, 333 aa, Arabidopsis thaliana
  peptide (1)..(333): Ceres Seq. ID no. 13496933
MEAKNSVIGRENCRAKGGNPGFKVAILGAAGGIGQSLSLLMKMNPLVSLLHLYDVVNAPGVTADVSHMDTGAVVRGFLGAKQLEDALTGMDLVIIPAGIPRKPGMTRDDLFKINAGIVKTLCEGVAKCCPNAIVNLISNPVNSTVPIAAEVFKKAGTYDPKKLLGVTTLDVARANTFVAEVLGLDPREVDVPVVGGHAGVTILPLLSQVKPPSSFTPQEIEYLTNRIQNGGTEVVEAKAGAGSATLSMAYAAAKFADACLRGLRGDANVVECSFVASQVTELAFFATKVRLGRTGAEEVYQLGPLNEYERIGLEKAKDELAGSIQKGVEFIRK

SEQ ID NO: 37398 - DNA, 525 bp, Arabidopsis thaliana
  misc_feature (1)..(525): Ceres Seq. ID no. 12482674
  misc_feature (1)..(525): Ortholog of  Ceres SEQ ID NO 15226744 as cited in SEQ ID NO 61720
atttatctgcagttgctggttattgtttgcatgtattcaataatgtttatctggttcactgaaactgttttttttctttggcagtcattgttttacaacgcgcaaacacaactcctttcaagacctgcagttgtggagaaaatagtcgaacttggaacagtctcgttggggaactcatatcaatcggttcttaaatccggcttcagcgacaaaaaatcggatcgtgcaaccagagtttccttcaagtatagcgcttcaagaggggtttatggtacaccaaccttctacgttaacgggtttgtattgtctgatgctgcttccccttcaaattttggaggatggaagaaaatcattgatcctctggttcaagcacatgagatggaagataacttcattcccttcctttgaagattttaagtgcttttgctgtgtcaattgtcatggtataatactatctgtaatgtatagactttctcaaaacctgtatgttgctcattgtaaatttgtaataaaggaaagtgatcc

SEQ ID NO: 37399 - protein, 135 aa, Arabidopsis thaliana
  peptide (1)..(135): Ceres Seq. ID no. 12482675
IYLQLLVIVCMYSIMFIWFTETVFFLWQSLFYNAQTQLLSRPAVVEKIVELGTVSLGNSYQSVLKSGFSDKKSDRATRVSFKYSASRGVYGTPTFYVNGFVLSDAASPSNFGGWKKIIDPLVQAHEMEDNFIPFL

SEQ ID NO: 37400 - protein, 125 aa, Arabidopsis thaliana
  peptide (1)..(125): Ceres Seq. ID no. 12482676
MYSIMFIWFTETVFFLWQSLFYNAQTQLLSRPAVVEKIVELGTVSLGNSYQSVLKSGFSDKKSDRATRVSFKYSASRGVYGTPTFYVNGFVLSDAASPSNFGGWKKIIDPLVQAHEMEDNFIPFL

SEQ ID NO: 37401 - protein, 121 aa, Arabidopsis thaliana
  peptide (1)..(121): Ceres Seq. ID no. 12482677
MFIWFTETVFFLWQSLFYNAQTQLLSRPAVVEKIVELGTVSLGNSYQSVLKSGFSDKKSDRATRVSFKYSASRGVYGTPTFYVNGFVLSDAASPSNFGGWKKIIDPLVQAHEMEDNFIPFL

SEQ ID NO: 37402 - DNA, 1159 bp, Arabidopsis thaliana
  misc_feature (1)..(1159): Ceres Seq. ID no. 12483464
  misc_feature (1)..(1159): Ortholog of  Ceres SEQ ID NO 12612330 as cited in SEQ ID NO 56418
  misc_feature (1)..(1159): Ortholog of  Ceres SEQ ID NO 13664295 as cited in SEQ ID NO 61486
  misc_feature (1)..(1159): Ortholog of  Ceres SEQ ID NO 15179147 as cited in SEQ ID NO 0
gatgaaagcaaaacatttacgtaacaatgtctataaaatcagtacaggtctattcttgttcactagcttcgaaattttagtcgaagaaacaaaaaaaaatggcgacggtacaattgtccacccaatttagctgccaaaccagagtttcaatctcaccgaactctaaatctatctccaagcctccgtttctggtaccggtgacctcaattattcaccgcccgatgatctccaccggaggaatcgctgtttccccccgtagagttttcaaagtccgagccacagatacgggagagataggatcagctctattggcggcggaggaagcaattgaagacgtggaagagacggagcggctaaagagatcgctcgtggattcgttgtacggaacagatcgaggtttaagcgcatcgagcgaaaccagagctgaaatcggagatctaatcacacagctcgagtctaagaaccctactccagctccgacggaagctcttttccttctcaacggcaaatggatcctcgcctacacatcgttcgtgaatttgttcccgttgctatcacgaggaatcgtaccgttaataaaagtcgatgagatctctcaaaccattgattcagataacttcaccgtccagaactctgttcgtttcgctggtcctttaggtacaaactcgattagcaccaacgctaaattcgaaatccgaagccctaaacgcgtccagattaagtttgagcaaggcgtaattgggacgcctcagctaacggattctattgagataccggaatatgtagaggttcttggtcaaaagattgatcttaacccgatcagagggttacttacctcggtgcaagacacagcctcgtctgtggctagaaccatatcaagccaaccaccgttgaaattctctttgccggcggacaatgcgcagtcttggctactcacgacttatctagacaaagacattcggatctctagaggagacggtggaagtgtctttgtgcttatcaaagaaggaagccctctcttgaatccttgaacttggtcaaaatatatgtgtctctcttgtcgttgtgttaagtgagacaaatatatatagtgttgttgtaggtttacttcttaatcgttattatgaacttgatgataatgaatataatgtttttaact

SEQ ID NO: 37403 - protein, 310 aa, Arabidopsis thaliana
  peptide (1)..(310): Ceres Seq. ID no. 12483465
MATVQLSTQFSCQTRVSISPNSKSISKPPFLVPVTSIIHRPMISTGGIAVSPRRVFKVRATDTGEIGSALLAAEEAIEDVEETERLKRSLVDSLYGTDRGLSASSETRAEIGDLITQLESKNPTPAPTEALFLLNGKWILAYTSFVNLFPLLSRGIVPLIKVDEISQTIDSDNFTVQNSVRFAGPLGTNSISTNAKFEIRSPKRVQIKFEQGVIGTPQLTDSIEIPEYVEVLGQKIDLNPIRGLLTSVQDTASSVARTISSQPPLKFSLPADNAQSWLLTTYLDKDIRISRGDGGSVFVLIKEGSPLLNP

SEQ ID NO: 37404 - protein, 269 aa, Arabidopsis thaliana
  peptide (1)..(269): Ceres Seq. ID no. 12483466
MISTGGIAVSPRRVFKVRATDTGEIGSALLAAEEAIEDVEETERLKRSLVDSLYGTDRGLSASSETRAEIGDLITQLESKNPTPAPTEALFLLNGKWILAYTSFVNLFPLLSRGIVPLIKVDEISQTIDSDNFTVQNSVRFAGPLGTNSISTNAKFEIRSPKRVQIKFEQGVIGTPQLTDSIEIPEYVEVLGQKIDLNPIRGLLTSVQDTASSVARTISSQPPLKFSLPADNAQSWLLTTYLDKDIRISRGDGGSVFVLIKEGSPLLNP

SEQ ID NO: 37405 - DNA, 941 bp, Arabidopsis thaliana
  misc_feature (1)..(941): Ceres Seq. ID no. 12322149
  misc_feature (1)..(941): Ortholog of  Ceres SEQ ID NO 13648495 as cited in SEQ ID NO 20456
  misc_feature (1)..(941): Ortholog of  Ceres SEQ ID NO 12556636 as cited in SEQ ID NO 0
  misc_feature (1)..(941): Ortholog of  Ceres SEQ ID NO 13600066 as cited in SEQ ID NO 0
  misc_feature (1)..(941): Ortholog of  Ceres SEQ ID NO 15179946 as cited in SEQ ID NO 0
ccaaaagttttatcgattccaccaaattagggcgaacgcgaaatctgggtattgtaatttgaagcgatggcgacgactggaactgctgcggttgcgacgggaacttcgacggtgaagagaaaaccggtgtttgtgaaggtggaacagctaaagcctggaacgactggtcacacgttgactgttaaagtcattgaggctaatatcgtggttcctgttacccggaagactcgtccagcgagttctctgagtcgtccttctcagcctagtcgaatcgttgagtgtctcatcggtgacgaaactgggtgtatcctcttcactgctcgtaacgatcaagttgatcttatgaagccgggtgctacggtgatactgcgcaattcaaggatagacatgttcaagggtacaatgaggctaggagttgataaatggggacgcatcgaagccactggagccgcgtctttcactgtcaaggaggataacaatctgtctctcgttgagtatgaactgatcaatgttggtggtgatcagtgatcttttagtatgtttatggaggttaacccctgagagtgttgggttctgatttttctaccgtgaaggtctttgatttagatgatgaagattgtatgactggtccagagttgcttgtaggaatatgcttcttcttttttaccctaaaatatgcggtcatgatcttgctctggagaactattgagcctgcggtaatggcgtaatgcaattgttccttttaatttgtgttgatgtaagttaaagaccattgagagcttgcttgtgcactatctaatacagtaaaaataagtttttctttcttaaactttactaatgtctttgttttttcattaattactatttgatgtacactattgtaccctctcggttacagagagttttgcccaactttttacatcgaaagcatctcatccttg

SEQ ID NO: 37406 - protein, 153 aa, Arabidopsis thaliana
  peptide (1)..(153): Ceres Seq. ID no. 12322150
MATTGTAAVATGTSTVKRKPVFVKVEQLKPGTTGHTLTVKVIEANIVVPVTRKTRPASSLSRPSQPSRIVECLIGDETGCILFTARNDQVDLMKPGATVILRNSRIDMFKGTMRLGVDKWGRIEATGAASFTVKEDNNLSLVEYELINVGGDQ

SEQ ID NO: 37407 - DNA, 738 bp, Arabidopsis thaliana
  misc_feature (1)..(738): Ceres Seq. ID no. 13592500
  misc_feature (1)..(738): Ortholog of  Ceres SEQ ID NO 12557607 as cited in SEQ ID NO 8
  misc_feature (1)..(738): Ortholog of  Ceres SEQ ID NO 12611808 as cited in SEQ ID NO 59894
  misc_feature (1)..(738): Ortholog of  Ceres SEQ ID NO 13600599 as cited in SEQ ID NO 0
gatcctcattcatctctaatactaaaatctaatctcttccttgctcactcaccaatcaaactcaaaaaactcttgaatttttcaagaacaaaagaaaaagacatctttaatggcggccatgaactcgagtgttctcacttgcagctacgcaattgctggctctggctcggtagagcttaaccagaaagttggtttggtgaattcatcagttgggtttggtcagaagaaacagatgattatgcctgtgatcaaagctcaacgcgttgttggtgatgatgttgatggatctaatggaagacgatcagccatggttttcttagcagctacactcttctccactgctgctgtttctgcttctgctaatgctggcgtcattgacgaatacctcgagaggagcaaaaccaacaaagaacttaatgataagaagagattggcaacaagtggagcaaactttgcgagagcattcactgttcaattcggaagctgcaagttccctgagaatttcactggctgccaagatcttgccaagcaaaagaaagttccatttatctcagaagatattgctttggaatgcgaaggcaaggacaagtacaagtgtggttccaatgttttctggaaatggtgaagaactttgtttgttttcatctattcttatataaatccaacaatgtatctatctctctctattcatgaaagttctcgcatccatttgaatctatcaagctaaaactctattga

SEQ ID NO: 37408 - protein, 171 aa, Arabidopsis thaliana
  peptide (1)..(171): Ceres Seq. ID no. 13592501
MAAMNSSVLTCSYAIAGSGSVELNQKVGLVNSSVGFGQKKQMIMPVIKAQRVVGDDVDGSNGRRSAMVFLAATLFSTAAVSASANAGVIDEYLERSKTNKELNDKKRLATSGANFARAFTVQFGSCKFPENFTGCQDLAKQKKVPFISEDIALECEGKDKYKCGSNVFWKW

SEQ ID NO: 37409 - protein, 168 aa, Arabidopsis thaliana
  peptide (1)..(168): Ceres Seq. ID no. 13592502
MNSSVLTCSYAIAGSGSVELNQKVGLVNSSVGFGQKKQMIMPVIKAQRVVGDDVDGSNGRRSAMVFLAATLFSTAAVSASANAGVIDEYLERSKTNKELNDKKRLATSGANFARAFTVQFGSCKFPENFTGCQDLAKQKKVPFISEDIALECEGKDKYKCGSNVFWKW

SEQ ID NO: 37410 - protein, 130 aa, Arabidopsis thaliana
  peptide (1)..(130): Ceres Seq. ID no. 13592503
MIMPVIKAQRVVGDDVDGSNGRRSAMVFLAATLFSTAAVSASANAGVIDEYLERSKTNKELNDKKRLATSGANFARAFTVQFGSCKFPENFTGCQDLAKQKKVPFISEDIALECEGKDKYKCGSNVFWKW

SEQ ID NO: 37411 - DNA, 751 bp, Arabidopsis thaliana
  misc_feature (1)..(751): Ceres Seq. ID no. 12580067
  misc_feature (1)..(751): Ortholog of  Ceres SEQ ID NO 14308011 as cited in SEQ ID NO 69234
agcagcttcttctgctttcaattactctcgccgacgattttctcaccggaaaaaaacaatatcattgcggatacacaaactataatggacctcctcttgctggagaagtctttaatcgccgtcttcgtggcggtgattcttgccacggtgatttcaaagctccgcggcaagaaattgaagctacctccaggtcctataccaattccgatcttcggaaactggcttcaagtcggagatgatctcaaccaccgtaatctcgtcgattacgctaagaaattcggcgatctcttcctcctccgtatgggtcagcgaaacctagtcgtcgtctcctcaccggatctaacaaaggaagtgctcctcactcaaggcgttgagtttggatccagaacgagaaacgtcgtgttcgacattttcaccgggaaaggtcaagatatggtgttcactgtttacggcgagcattggaggaagatgagaagaatcatgacggttcctttcttcaccaacaaagttgttcaacagaatcgtgaaggttgggagtttgaagcagctagtgttgttgaagatgttaagaagaatccagattctgctacgaaaggaatcgtgttgaggaaacgtttgcaattgatgatgtataacaatatgttccgtatcatgttcgatagaagatttgagagtgaggatgatcctcttttccttaggcttaaggctttgaatggtgagagaatcttaaggcatcatcagctttagcttc

SEQ ID NO: 37412 - protein, 248 aa, Arabidopsis thaliana
  peptide (1)..(248): Ceres Seq. ID no. 12580068
SSFFCFQLLSPTIFSPEKNNIIADTQTIMDLLLLEKSLIAVFVAVILATVISKLRGKKLKLPPGPIPIPIFGNWLQVGDDLNHRNLVDYAKKFGDLFLLRMGQRNLVVVSSPDLTKEVLLTQGVEFGSRTRNVVFDIFTGKGQDMVFTVYGEHWRKMRRIMTVPFFTNKVVQQNREGWEFEAASVVEDVKKNPDSATKGIVLRKRLQLMMYNNMFRIMFDRRFESEDDPLFLRLKALNGERILRHHQL

SEQ ID NO: 37413 - protein, 220 aa, Arabidopsis thaliana
  peptide (1)..(220): Ceres Seq. ID no. 12580069
MDLLLLEKSLIAVFVAVILATVISKLRGKKLKLPPGPIPIPIFGNWLQVGDDLNHRNLVDYAKKFGDLFLLRMGQRNLVVVSSPDLTKEVLLTQGVEFGSRTRNVVFDIFTGKGQDMVFTVYGEHWRKMRRIMTVPFFTNKVVQQNREGWEFEAASVVEDVKKNPDSATKGIVLRKRLQLMMYNNMFRIMFDRRFESEDDPLFLRLKALNGERILRHHQL

SEQ ID NO: 37414 - protein, 148 aa, Arabidopsis thaliana
  peptide (1)..(148): Ceres Seq. ID no. 12580070
MGQRNLVVVSSPDLTKEVLLTQGVEFGSRTRNVVFDIFTGKGQDMVFTVYGEHWRKMRRIMTVPFFTNKVVQQNREGWEFEAASVVEDVKKNPDSATKGIVLRKRLQLMMYNNMFRIMFDRRFESEDDPLFLRLKALNGERILRHHQL

SEQ ID NO: 37415 - DNA, 1062 bp, Arabidopsis thaliana
  misc_feature (1)..(1062): Ceres Seq. ID no. 12370347
  misc_feature (1)..(1062): Ortholog of  Ceres SEQ ID NO 12472003 as cited in SEQ ID NO 143
aatctctctccgtccaatttccgtctctctctctttttatctcaccgtctgatcgcttagaagcaaccatgcctcagggagattacatagatttgcacaggaagaggaatggatatcgcctcgaccacttcgagagaaagcgcaagaaggaggcgcgtgaagttcacaagcactccaccatggctcaaaagtctctaggtatcaagggtaagatgattgctaagaaaaactatgctgagaaagctctcatgaagaaaacattgaaaatgcatgaagagtcatcatcaaggcgtaaggctgatgagaatgttcaggaaggagctgttcctgcttatcttcttgatcgtgaagacaccactcgtgccaaggttcttagcaacaccattaaacaaaagaggaaagagaaagctggcaaatgggaggtccctcttccaaaggtccgtccagttgctgaagatgaaatgtttagagtgatacgatctggaaaaaggaaaactaaacaatggaagcggatggttacaaaagctacatttgttggacctgctttcacaaggaagcctccaaagtacgagcgtttcatccgcccatctggtcttcgtttcaccaaggcccacgtcactcaccctgaactaaaatgcactttctgtctcgagatcatcgggattaagaagaatcctaacggtcccatgtatacatcactcggtgtgatgaccaggggaacaatcatcgaggtcaatgtgagtgagcttggtcttgttacaccagctggaaaggttgtctggggaaaatacgctcaagtgacaaacaatccagagaacgacggatgtataaatgctgttttacttgtgtaaccaaatgtccggcactgtcgtagaagtatggatagagacgagaggaaggcgagaatcatgttggctagttttattttgttttctcctgaaacaattttgtgttatttcaagtttttttatgaatgtgtggttggtcttctcatcacattaactagctgctatgttagctttataagtatcccacattatgaaatttgttgcttctaatgtt

SEQ ID NO: 37416 - protein, 282 aa, Arabidopsis thaliana
  peptide (1)..(282): Ceres Seq. ID no. 12370348
SLSVQFPSLSLFISPSDRLEATMPQGDYIDLHRKRNGYRLDHFERKRKKEAREVHKHSTMAQKSLGIKGKMIAKKNYAEKALMKKTLKMHEESSSRRKADENVQEGAVPAYLLDREDTTRAKVLSNTIKQKRKEKAGKWEVPLPKVRPVAEDEMFRVIRSGKRKTKQWKRMVTKATFVGPAFTRKPPKYERFIRPSGLRFTKAHVTHPELKCTFCLEIIGIKKNPNGPMYTSLGVMTRGTIIEVNVSELGLVTPAGKVVWGKYAQVTNNPENDGCINAVLLV

SEQ ID NO: 37417 - protein, 260 aa, Arabidopsis thaliana; identical to SEQ ID NO: 29738
  peptide (1)..(260): Ceres Seq. ID no. 12370349

SEQ ID NO: 37418 - protein, 223 aa, Arabidopsis thaliana; identical to SEQ ID NO: 29739
  peptide (1)..(223): Ceres Seq. ID no. 12370350

SEQ ID NO: 37419 - DNA, 1730 bp, Arabidopsis thaliana
  misc_feature (1)..(1730): Ceres Seq. ID no. 12335381
  misc_feature (1)..(1730): Ortholog of  Ceres SEQ ID NO 13600220 as cited in SEQ ID NO 0
atcataaacttgttctcttccagaagaaactaaaaacaaaaatggcattgcaaaagtttcctctcatggggctgcttttgctcctaaccatcctcgtctctgtgacaacagcggtcgatgatcctgtttgcccggcgacttccaagctaagccgagcaagtttccctaatgggtttttgtttggcacggctactgctgcgtttcaggtcgaaggtgcaattaatgaaacttgtcgtggaccggctctatgggatatctactgtagaagaaatccagagagatgtagtggcgaccacgccgatgtggccgttgatttcttccatcgttataaggaagatattcagctaatgaagaatctaaacacagatgcattcagactctcaatcgcatggtcaagaatatttcctcatgggagaaaggagaagggagtgagtcaagctggtgtgcaattctaccacgagctcatcgatgaactccttaaaaatggtatagttccgtttgtgactgttttccattgggacactccacaagatttggaagacgaatatggcggtttcttaagccaaaacattgtgaaagattttcgagaatatgcagattatgttttcactgaatacggtggaaaagtgaaaaactggatcactttcaacgagccatgggtctttgctcacgcaggttacgacttaggaaagaaggcaccaggacgttgttctcgctacgttccaggttgcgaagaccgagagggacaatcaggtaaagaggcttatctagtcagtcacaatctcctcaacgctcacgcagaagctgttgaagttttccgccaaaaggttaaaggtgggaaaatcggaatcgcacatagtccggcttggttcgaaccacatgatcttaaagattcaaatgacgctccaactgttagccgtgtacttgactttatgttgggatggcatctggagccaactacttcgggagattatccacaaatcatgaaagaccttcttggttacagattgcctcaatttactgctgcacaaaaagcaaaattgaaagattcgaccgatttcgtagggcttaactactatacttcgacattttcaaattataatgagaagccagatccgtctaaaccaagttggaagcaagattctcttgtttcctgggaacctaagaatgtagatcacagcgccattggtagcatgcctcttactgctgcattgcccgtctacgcaggatttagaaagcttttaaagtacatcaaggacaaatacgcaaacccggagattatgataatggaaaatggatatggagataaacttgggaccacagattcggttgacgttggtactgctgatcataacaggaaatattatcttcagaggcatcttctggctatgaacgaggctatttgcatcgataaggtgagagttacgggatactttgtatggtcattgttggataacttcgaatggcaagatggttacaaaaacagattcggactctattacgtcgatttcaaaaataacctcacacgttatgagaaagaatcagccaagtactacaaagatttcctcgctcaaggtgttcgtccatccgcgctcaagagggatgagctttaagttatattttgaggatttggttttctgttcaatgtttctttcctatgttgtagtttgtgattgaccaggatacatgaggtcttggttaataataataaaagtgttttgtttttcttc

SEQ ID NO: 37420 - protein, 536 aa, Arabidopsis thaliana
  peptide (1)..(536): Ceres Seq. ID no. 12335382
HKLVLFQKKLKTKMALQKFPLMGLLLLLTILVSVTTAVDDPVCPATSKLSRASFPNGFLFGTATAAFQVEGAINETCRGPALWDIYCRRNPERCSGDHADVAVDFFHRYKEDIQLMKNLNTDAFRLSIAWSRIFPHGRKEKGVSQAGVQFYHELIDELLKNGIVPFVTVFHWDTPQDLEDEYGGFLSQNIVKDFREYADYVFTEYGGKVKNWITFNEPWVFAHAGYDLGKKAPGRCSRYVPGCEDREGQSGKEAYLVSHNLLNAHAEAVEVFRQKVKGGKIGIAHSPAWFEPHDLKDSNDAPTVSRVLDFMLGWHLEPTTSGDYPQIMKDLLGYRLPQFTAAQKAKLKDSTDFVGLNYYTSTFSNYNEKPDPSKPSWKQDSLVSWEPKNVDHSAIGSMPLTAALPVYAGFRKLLKYIKDKYANPEIMIMENGYGDKLGTTDSVDVGTADHNRKYYLQRHLLAMNEAICIDKVRVTGYFVWSLLDNFEWQDGYKNRFGLYYVDFKNNLTRYEKESAKYYKDFLAQGVRPSALKRDEL

SEQ ID NO: 37421 - protein, 523 aa, Arabidopsis thaliana
  peptide (1)..(523): Ceres Seq. ID no. 12335383
MALQKFPLMGLLLLLTILVSVTTAVDDPVCPATSKLSRASFPNGFLFGTATAAFQVEGAINETCRGPALWDIYCRRNPERCSGDHADVAVDFFHRYKEDIQLMKNLNTDAFRLSIAWSRIFPHGRKEKGVSQAGVQFYHELIDELLKNGIVPFVTVFHWDTPQDLEDEYGGFLSQNIVKDFREYADYVFTEYGGKVKNWITFNEPWVFAHAGYDLGKKAPGRCSRYVPGCEDREGQSGKEAYLVSHNLLNAHAEAVEVFRQKVKGGKIGIAHSPAWFEPHDLKDSNDAPTVSRVLDFMLGWHLEPTTSGDYPQIMKDLLGYRLPQFTAAQKAKLKDSTDFVGLNYYTSTFSNYNEKPDPSKPSWKQDSLVSWEPKNVDHSAIGSMPLTAALPVYAGFRKLLKYIKDKYANPEIMIMENGYGDKLGTTDSVDVGTADHNRKYYLQRHLLAMNEAICIDKVRVTGYFVWSLLDNFEWQDGYKNRFGLYYVDFKNNLTRYEKESAKYYKDFLAQGVRPSALKRDEL

SEQ ID NO: 37422 - protein, 515 aa, Arabidopsis thaliana
  peptide (1)..(515): Ceres Seq. ID no. 12335384
MGLLLLLTILVSVTTAVDDPVCPATSKLSRASFPNGFLFGTATAAFQVEGAINETCRGPALWDIYCRRNPERCSGDHADVAVDFFHRYKEDIQLMKNLNTDAFRLSIAWSRIFPHGRKEKGVSQAGVQFYHELIDELLKNGIVPFVTVFHWDTPQDLEDEYGGFLSQNIVKDFREYADYVFTEYGGKVKNWITFNEPWVFAHAGYDLGKKAPGRCSRYVPGCEDREGQSGKEAYLVSHNLLNAHAEAVEVFRQKVKGGKIGIAHSPAWFEPHDLKDSNDAPTVSRVLDFMLGWHLEPTTSGDYPQIMKDLLGYRLPQFTAAQKAKLKDSTDFVGLNYYTSTFSNYNEKPDPSKPSWKQDSLVSWEPKNVDHSAIGSMPLTAALPVYAGFRKLLKYIKDKYANPEIMIMENGYGDKLGTTDSVDVGTADHNRKYYLQRHLLAMNEAICIDKVRVTGYFVWSLLDNFEWQDGYKNRFGLYYVDFKNNLTRYEKESAKYYKDFLAQGVRPSALKRDEL

SEQ ID NO: 37423 - DNA, 1075 bp, Arabidopsis thaliana
  misc_feature (1)..(1075): Ceres Seq. ID no. 12562413
  misc_feature (1)..(1075): Ortholog of  Ceres SEQ ID NO 14308209 as cited in SEQ ID NO 58800
aatcgtcatttcctcggtatctcctcctcgaaagaagaatgcctggaattagaggtccttcggaatactcgcaggaaccacctcgtcacccttctctcaaggtcaacgccaaggaacctttcaacgccgagcctccccgctcggccttagtctcatcttatatcactcccgtcgaccttttctacaagaattcttgataggggggcccttataaggcgtcaatcactctaagtcaagccacaaatcctgaagcggatgttctactcgcttatgagatgaatggagagaccctgaacagggatcacggatttccgttaagggtggttgtccctggtgtgattggtgctcgttcggtcaaatggcttgattccatcaatgtcatcgctgaagaaagccagggattcttcatgcaaaaagattacaaaatgtttccaccctctgtcaattgggataatatcaactggtcctctaggagaccgcaaatggatttccctgttcagagtgcaatctgctctgtggaggatgtgcaaatggtgaagcctggaaaggtaagtatcaaaggatatgcggtttcaggaggtggacgcgggatagaaagagtggacatatccctggatggaggcaaaaactgggtggaagcttctagaacgcaggaaccaggaaagcagtacatctcagaacacagctccagtgacaaatgggcatgggtgttgtttgaagccaccattgatgtttcacagactacagaggtcatcgccaaagcggttgattcggcggcgaatgttcaaccggaaaatgtggagtcggtgtggaacctaagaggagttctcaacacttcgtggcaccgtgtccttctccggcttggccactctaacttgtagaccaagttaccactatgcgtctggtctctctttatcttttctttaagaactaaaacatccttgaatatgcttgtccttgtggatctgtgagagcaaaatactgtttatagttaaataaaatgggaaaacccatctgttgtcatgtggtggattataaattatttatttatatgatagaactgttattcactatt

SEQ ID NO: 37424 - protein, 201 aa, Arabidopsis thaliana; identical to SEQ ID NO: 26546
  peptide (1)..(201): Ceres Seq. ID no. 12562414

SEQ ID NO: 37425 - protein, 157 aa, Arabidopsis thaliana
  peptide (1)..(157): Ceres Seq. ID no. 12562415
MQKDYKMFPPSVNWDNINWSSRRPQMDFPVQSAICSVEDVQMVKPGKVSIKGYAVSGGGRGIERVDISLDGGKNWVEASRTQEPGKQYISEHSSSDKWAWVLFEATIDVSQTTEVIAKAVDSAANVQPENVESVWNLRGVLNTSWHRVLLRLGHSNL

SEQ ID NO: 37426 - protein, 151 aa, Arabidopsis thaliana
  peptide (1)..(151): Ceres Seq. ID no. 12562416
MFPPSVNWDNINWSSRRPQMDFPVQSAICSVEDVQMVKPGKVSIKGYAVSGGGRGIERVDISLDGGKNWVEASRTQEPGKQYISEHSSSDKWAWVLFEATIDVSQTTEVIAKAVDSAANVQPENVESVWNLRGVLNTSWHRVLLRLGHSNL

SEQ ID NO: 37427 - DNA, 1842 bp, Arabidopsis thaliana
  misc_feature (1)..(1842): Ceres Seq. ID no. 13509651
  misc_feature (1)..(1842): Ortholog of  Ceres SEQ ID NO 15226493 as cited in SEQ ID NO 59078
gcttctaaaattttctggtagatctgagtccacaatcatcagaaatcaactttgtgaattgaaggccgatcactcctttgactttgttcttagggttcatcctcaaaggtgtttaatgagctcttagaagctatgggaatggcgtccatgagctctggtactgaaagccttcgtctttgcgtgtttgacttaagaagaggccaacacgaaggacaggaactggacaagatcttgttcttctatcctcctgatctaaccttctccactcagctatcggttataggtctcagtgaagggcttatcacgttcacgagacttttctccccggaggcagcttgtgaggtaattgaagcagagagacattcccatgttttctatgaggccgagcccgatatctggatggtcatgattgtagagaaaaataaggagattgaagctgtatggaggattgatgcattgcggagagtgcttaaggaagtgcactctctctttgttatgtttcaagggtcaattagggcattgcttgagaaagaaccaactggaggacttgtaagatcgcacttgtatccattcatcacagactatttaaatgatcttttcgttgggaaaaaacatcagttaccttccttccgtgactctttgaaagagcgtggaacagttcagatgctaactttagctagagatgcggcacttgaagttcagtctctcgtcggagtgctagattcgtgtgctgggaccgttcgatgccactctgtgattctatttcatgatctactggtgtcaacaactctctcacctgatgataccgtcgacttgtttgcattttctgtcatgagattaaccacaaacgcgctatcatctggcacaagttcctggtcatatctacgcaagggatccggttcacctcaaatatcttctagatctactacggtgccccctcttggttcaggcggtacattgccttcgggaaatggtagtagcacaggtcgtgttattagacctttgcagcacgataagtggtcaaaggggaaagacgggtttcttgtaactgatatttggggtttagatgccaccccgacaattttgatacagaagacgcaggaaagattttaccttttgacttatcaatacaagagtctcaccttggttcttctcgtgcctatcgctgcaattgttaatggagagctagacatctcattcgtgaagcagcaagttattgaaaacgcatcgaccaaaatcttgaaagtcgaagagaagctatcgaaagggtggggcggtgagaatgcttaccatgtaagcggttaccgttacttactagttgataatgacatggaagtttccagagcttctccaccaggaaaggtagcaacactagcaaaggagtctttgcttgcactaaacaagctaagggaagaagtggatacagaaaaaaaccgctcgaagcaagagaaagacatggaaatatgcattcgagcgaagaacaacacatgggtcatcgcgcgtctaaacagaggtaaagagctttacatggctttagagaaagcaagtgaaactcttcttgatgctacagactctgtccaaagattcagcaacaggtactgcagcggggcattctccatggattagattctgcaattgtttgttttgatagaagttgcaaaggaaagtgtttttgaagtgttttgagatatgttttagattttcaattataagatataaaagaaaccgttacaaagaaagagaatttggtgacttttgtatccacaactaaaagtaaacgtggaacttgacccttgacggtttgaactttgaagaagtcaaataaaaccttcgcttaatctc

SEQ ID NO: 37428 - protein, 497 aa, Arabidopsis thaliana
  peptide (1)..(497): Ceres Seq. ID no. 13509652
MGMASMSSGTESLRLCVFDLRRGQHEGQELDKILFFYPPDLTFSTQLSVIGLSEGLITFTRLFSPEAACEVIEAERHSHVFYEAEPDIWMVMIVEKNKEIEAVWRIDALRRVLKEVHSLFVMFQGSIRALLEKEPTGGLVRSHLYPFITDYLNDLFVGKKHQLPSFRDSLKERGTVQMLTLARDAALEVQSLVGVLDSCAGTVRCHSVILFHDLLVSTTLSPDDTVDLFAFSVMRLTTNALSSGTSSWSYLRKGSGSPQISSRSTTVPPLGSGGTLPSGNGSSTGRVIRPLQHDKWSKGKDGFLVTDIWGLDATPTILIQKTQERFYLLTYQYKSLTLVLLVPIAAIVNGELDISFVKQQVIENASTKILKVEEKLSKGWGGENAYHVSGYRYLLVDNDMEVSRASPPGKVATLAKESLLALNKLREEVDTEKNRSKQEKDMEICIRAKNNTWVIARLNRGKELYMALEKASETLLDATDSVQRFSNRYCSGAFSMD

SEQ ID NO: 37429 - protein, 495 aa, Arabidopsis thaliana
  peptide (1)..(495): Ceres Seq. ID no. 13509653
MASMSSGTESLRLCVFDLRRGQHEGQELDKILFFYPPDLTFSTQLSVIGLSEGLITFTRLFSPEAACEVIEAERHSHVFYEAEPDIWMVMIVEKNKEIEAVWRIDALRRVLKEVHSLFVMFQGSIRALLEKEPTGGLVRSHLYPFITDYLNDLFVGKKHQLPSFRDSLKERGTVQMLTLARDAALEVQSLVGVLDSCAGTVRCHSVILFHDLLVSTTLSPDDTVDLFAFSVMRLTTNALSSGTSSWSYLRKGSGSPQISSRSTTVPPLGSGGTLPSGNGSSTGRVIRPLQHDKWSKGKDGFLVTDIWGLDATPTILIQKTQERFYLLTYQYKSLTLVLLVPIAAIVNGELDISFVKQQVIENASTKILKVEEKLSKGWGGENAYHVSGYRYLLVDNDMEVSRASPPGKVATLAKESLLALNKLREEVDTEKNRSKQEKDMEICIRAKNNTWVIARLNRGKELYMALEKASETLLDATDSVQRFSNRYCSGAFSMD

SEQ ID NO: 37430 - protein, 492 aa, Arabidopsis thaliana
  peptide (1)..(492): Ceres Seq. ID no. 13509654
MSSGTESLRLCVFDLRRGQHEGQELDKILFFYPPDLTFSTQLSVIGLSEGLITFTRLFSPEAACEVIEAERHSHVFYEAEPDIWMVMIVEKNKEIEAVWRIDALRRVLKEVHSLFVMFQGSIRALLEKEPTGGLVRSHLYPFITDYLNDLFVGKKHQLPSFRDSLKERGTVQMLTLARDAALEVQSLVGVLDSCAGTVRCHSVILFHDLLVSTTLSPDDTVDLFAFSVMRLTTNALSSGTSSWSYLRKGSGSPQISSRSTTVPPLGSGGTLPSGNGSSTGRVIRPLQHDKWSKGKDGFLVTDIWGLDATPTILIQKTQERFYLLTYQYKSLTLVLLVPIAAIVNGELDISFVKQQVIENASTKILKVEEKLSKGWGGENAYHVSGYRYLLVDNDMEVSRASPPGKVATLAKESLLALNKLREEVDTEKNRSKQEKDMEICIRAKNNTWVIARLNRGKELYMALEKASETLLDATDSVQRFSNRYCSGAFSMD

SEQ ID NO: 37431 - DNA, 1280 bp, Arabidopsis thaliana
  misc_feature (1)..(1280): Ceres Seq. ID no. 12335829
  misc_feature (1)..(1280): Ortholog of  Ceres SEQ ID NO 14314434 as cited in SEQ ID NO 52401
  misc_feature (1)..(1280): Ortholog of  Ceres SEQ ID NO 14303939 as cited in SEQ ID NO 54286
  misc_feature (1)..(1280): Ortholog of  Ceres SEQ ID NO 14307760 as cited in SEQ ID NO 54741
  misc_feature (1)..(1280): Ortholog of  Ceres SEQ ID NO 15179003 as cited in SEQ ID NO 0
  misc_feature (1)..(1280): Ortholog of  Ceres SEQ ID NO 15179235 as cited in SEQ ID NO 0
aaattgtcttttgtctcctttccttttcgtttttagggtttttttttcttagcacagctctctcttctcaatttccccaaatgaaataaattcctccgaaagtttatagatttcactctcccccgaactatacaaatttccctcaaaaggaaaaactaaaaagccgatcttggcttttttgtttctgagtgcatctcgatacttggaagcattctttggtgaggctgattcattctcatctgtgaaagtctttggcttttgaagcaatactatggaaggaattcagcatcctatacctcgcactgtcgaagaggtttttagcgactttcgtggtcgtagagctggtctcatcaaggctctctctactgatgtacagaagttttaccatcagtgtgaccctgagaaggaaaacttgtgtctttatggacttccaaatgagacatgggaggttaatcttcccgttgaggaggtccctcctgagcttcctgaaccagcgttaggcatcaatttcgcaagggacggaatgcaagaaaaagactggatttctttggttgcagttcacagtgattcatggcttatctctgttgcattttactttggtgcacgtttcggatttggcaagaatgagaggaagaggctcttccagatgataaatgatctcccaaccattttcgaggttgtaactggcaatgcaaagcaatccaaggatcaatctgctaaccacaacagtagcagaagcaaatctagtggtggcaagcctcgtcattctgaatctcacactaaggcttcaaagatgtcccctccaccaagaaaagaagatgagagcggagatgaggatgaagatgacgagcaaggtgctgtttgtggtgcgtgtggcgacaactatggaggagatgagttctggatatgttgtgatgcttgcgagaaatggttccatgggaaatgcgtgaagatcacaccagcaaaggctgagcatatcaaacattacaaatgcccaagttgcactaccagcaagaaaatgaaagcctgaaagtgataataacattagagcctgtgaaagaggaaaacgttttcacagtttaagaagacagtacaagagtttagctgtgggaagaagaagaaacaaaaggcttctgattgcgtagttttaatgggattgagacagcttacagttagtaatgtctctttctcttttcttttctttttttttgctgttaatgttaaaatgttatgactaatttgtcttaagtttctgagaaaattctgtcttttaagcactc

SEQ ID NO: 37432 - protein, 252 aa, Arabidopsis thaliana
  peptide (1)..(252): Ceres Seq. ID no. 12335830
MEGIQHPIPRTVEEVFSDFRGRRAGLIKALSTDVQKFYHQCDPEKENLCLYGLPNETWEVNLPVEEVPPELPEPALGINFARDGMQEKDWISLVAVHSDSWLISVAFYFGARFGFGKNERKRLFQMINDLPTIFEVVTGNAKQSKDQSANHNSSRSKSSGGKPRHSESHTKASKMSPPPRKEDESGDEDEDDEQGAVCGACGDNYGGDEFWICCDACEKWFHGKCVKITPAKAEHIKHYKCPSCTTSKKMKA

SEQ ID NO: 37433 - protein, 168 aa, Arabidopsis thaliana
  peptide (1)..(168): Ceres Seq. ID no. 12335831
MQEKDWISLVAVHSDSWLISVAFYFGARFGFGKNERKRLFQMINDLPTIFEVVTGNAKQSKDQSANHNSSRSKSSGGKPRHSESHTKASKMSPPPRKEDESGDEDEDDEQGAVCGACGDNYGGDEFWICCDACEKWFHGKCVKITPAKAEHIKHYKCPSCTTSKKMKA

SEQ ID NO: 37434 - protein, 127 aa, Arabidopsis thaliana
  peptide (1)..(127): Ceres Seq. ID no. 12335832
MINDLPTIFEVVTGNAKQSKDQSANHNSSRSKSSGGKPRHSESHTKASKMSPPPRKEDESGDEDEDDEQGAVCGACGDNYGGDEFWICCDACEKWFHGKCVKITPAKAEHIKHYKCPSCTTSKKMKA

SEQ ID NO: 37435 - DNA, 1574 bp, Arabidopsis thaliana
  misc_feature (1)..(1574): Ceres Seq. ID no. 12357666
  misc_feature (1)..(1574): Ortholog of  Ceres SEQ ID NO 13654928 as cited in SEQ ID NO 62546
actcttaatctttaaaaaaaagaaaaaaaaaacagaacaatttcttcttcctctgggatccataagttttgagattttggtggtcagtgtctgatggagtgtaatgcaaagccaccgtttcaatgggaattggaaaacttgatatcttttggcacttctacagctgaagttcctagaaagctaaagccaatggagtgggaaattgatggatttgattgcacctctctgtattcttcaagctttgatgcagtagcttatggtggtagttcaggttctgatatagctcatgctttctctaaaagctcaaagtcaacttccattagctcttcatcagctgaagttagaacacacaattttacatcagaaactggtgaaagtcttcctggagaatttgcaaaggggattgatacttctccaactcttgaactttcttttggctctggtgatccggttctcggtttaaagcttggtaaacgaacgtactttgaagacttttgggaagtggagaatgctaaaggtttgggacttcccgtgagccttgcttcgtcttctgtttctccggtgaagaaatcgaaatccattcctcagaggttacaaactcctcactgtcaagttgaaggctgtaatcttgatctttcatcagctaaagactatcatcggaaacataggatttgtgaaaaccattcaaagtttcctaaagtcgttgtgagtggcgtagagcgtcggttctgccaacaatgtagcaggttccactgtctctccgagtttgatgagaagaaacgtagctgtcgccgacgtctctcagatcacaatgcaagacgtcgcaagccaaatcctggaaggacatatgatgggaaaccacaggtggattttgtatggaacagatttgcgcttatccatccaagaagtgaggaaaagtttctatggcccagttcaaagcctgtaccatcaagagtcttaatgccgcagcctgcaaagaccgagatttccaataagctgttcaccgagcacagtagatttggattgttggaccccaaaacaaaatccgcaagagcggagttattcagtaaagaaaaggtcacaatctcttcacacatgggtgcttctcaagatcttgatggtgctctctctcttctgtcaaattcaacaacatgggtttcttcctctgaccaaccaagacgttttacccttgatcaccatccctcaagcaacctccaacccgtagctaaccggtctgcggctcaactcagttcagtgtccggctattggcagccggacccacccgcagttgaaggcccgaccgctctgcatagaaatggggcaggccagtttaatgaaaactacttcagcttgaaccagttttataactgaaagctgtatgcctttaaatcctatttaggatcaagcaagctagtgataagttaagataggagctgtgaaacttgcaagacaccaaatcctctcttatttctttgtccaaatattttcatgggttagagagctttgacaattgtctttaatatcaactttatcgtgttatacattaggattataaatcttgatggtgtactacg

SEQ ID NO: 37436 - protein, 425 aa, Arabidopsis thaliana
  peptide (1)..(425): Ceres Seq. ID no. 12357667
MECNAKPPFQWELENLISFGTSTAEVPRKLKPMEWEIDGFDCTSLYSSSFDAVAYGGSSGSDIAHAFSKSSKSTSISSSSAEVRTHNFTSETGESLPGEFAKGIDTSPTLELSFGSGDPVLGLKLGKRTYFEDFWEVENAKGLGLPVSLASSSVSPVKKSKSIPQRLQTPHCQVEGCNLDLSSAKDYHRKHRICENHSKFPKVVVSGVERRFCQQCSRFHCLSEFDEKKRSCRRRLSDHNARRRKPNPGRTYDGKPQVDFVWNRFALIHPRSEEKFLWPSSKPVPSRVLMPQPAKTEISNKLFTEHSRFGLLDPKTKSARAELFSKEKVTISSHMGASQDLDGALSLLSNSTTWVSSSDQPRRFTLDHHPSSNLQPVANRSAAQLSSVSGYWQPDPPAVEGPTALHRNGAGQFNENYFSLNQFYN

SEQ ID NO: 37437 - protein, 393 aa, Arabidopsis thaliana
  peptide (1)..(393): Ceres Seq. ID no. 12357668
MEWEIDGFDCTSLYSSSFDAVAYGGSSGSDIAHAFSKSSKSTSISSSSAEVRTHNFTSETGESLPGEFAKGIDTSPTLELSFGSGDPVLGLKLGKRTYFEDFWEVENAKGLGLPVSLASSSVSPVKKSKSIPQRLQTPHCQVEGCNLDLSSAKDYHRKHRICENHSKFPKVVVSGVERRFCQQCSRFHCLSEFDEKKRSCRRRLSDHNARRRKPNPGRTYDGKPQVDFVWNRFALIHPRSEEKFLWPSSKPVPSRVLMPQPAKTEISNKLFTEHSRFGLLDPKTKSARAELFSKEKVTISSHMGASQDLDGALSLLSNSTTWVSSSDQPRRFTLDHHPSSNLQPVANRSAAQLSSVSGYWQPDPPAVEGPTALHRNGAGQFNENYFSLNQFYN

SEQ ID NO: 37438 - DNA, 1264 bp, Arabidopsis thaliana
  misc_feature (1)..(1264): Ceres Seq. ID no. 12423107
  misc_feature (1)..(1264): Ortholog of  Ceres SEQ ID NO 12364737 as cited in SEQ ID NO 51089
  misc_feature (1)..(1264): Ortholog of  Ceres SEQ ID NO 13593955 as cited in SEQ ID NO 54278
  misc_feature (1)..(1264): Ortholog of  Ceres SEQ ID NO 13595567 as cited in SEQ ID NO 56760
  misc_feature (1)..(1264): Ortholog of  Ceres SEQ ID NO 13597380 as cited in SEQ ID NO 64054
  misc_feature (1)..(1264): Ortholog of  Ceres SEQ ID NO 12625474 as cited in SEQ ID NO 64169
  misc_feature (1)..(1264): Ortholog of  Ceres SEQ ID NO 13597502 as cited in SEQ ID NO 64681
aatttgcagggttcttcttcttcttcttcttttttctctaaactggaaaataaagaagaaaagaacatggatttgcattcttgtctaaactcatactttcttttgctcctcctctgtcttcttattaccaccattaactcaacgaagccattagaacaagaaacagtgctttttggcggcaactttccggctttttatgttattggagattcattggttgattcaggaaacaataatcatcttacaacgatggtcaaatcgaattttccaccttatggttcggactttgaaggtggcaaagccaccggccgtttcagcaatggcaaaacaattgctgattacattgctatctactatggtcttcctttggttcctgcttatttgggattatctcaagaagaaaagaatagtatctcaactggtattaactatgcttctgctggctgtgggattcttcctcagacaggaaggcaaataggaacatgtctctcgttaagtgtccaagtcgatatgttccaggagaccatcacaaacaatctgaagaagaacttcaagaagtccgagctccgtgaacacttggctgaatcgttgtttatgatcgccattggggttaacgactacacattcttatttaatgaaacaaccgatgcgaatgagtttgcaaacaagcttcttcatgattacttgcttcaaatagaaagattgcacaagttaggagcaaggaagttcttcatcaacaacattaaaccattaggatgttacccaaatgttgtagctaagaccgtgccacgtggaagctgcaacgatgctttgaactttgcggtcagcattttcaacactaagcttagaaaaagtctgtctcgtatgacgcaaaaattcatcaaaacgtcctttttatactcggattactacaactacatgttgggactaagaggaccttcaagcaatcaagttggttcgagtctattgaacgtgacaagcccatgttgtcctaacgtttatgatggaggtcaattgacaagttgcaagcctggttcgatcgcgtgtaaggcacccgatactcatattttctttgatccgtttcatccgactcaattggcgaattacatgtatgcgattgcgtgtttccacgagagaagtatttgccatgtgatattggaagattaacttttgtcggcaacaatcttttttgtttgttttaaacaccaatttggttgttgtttgttgctttcaacttttcaatatcatcagaacttttaagatt

SEQ ID NO: 37439 - protein, 388 aa, Arabidopsis thaliana
  peptide (1)..(388): Ceres Seq. ID no. 12423108
NLQGSSSSSSFFSKLENKEEKNMDLHSCLNSYFLLLLLCLLITTINSTKPLEQETVLFGGNFPAFYVIGDSLVDSGNNNHLTTMVKSNFPPYGSDFEGGKATGRFSNGKTIADYIAIYYGLPLVPAYLGLSQEEKNSISTGINYASAGCGILPQTGRQIGTCLSLSVQVDMFQETITNNLKKNFKKSELREHLAESLFMIAIGVNDYTFLFNETTDANEFANKLLHDYLLQIERLHKLGARKFFINNIKPLGCYPNVVAKTVPRGSCNDALNFAVSIFNTKLRKSLSRMTQKFIKTSFLYSDYYNYMLGLRGPSSNQVGSSLLNVTSPCCPNVYDGGQLTSCKPGSIACKAPDTHIFFDPFHPTQLANYMYAIACFHERSICHVILED

SEQ ID NO: 37440 - protein, 366 aa, Arabidopsis thaliana
  peptide (1)..(366): Ceres Seq. ID no. 12423109
MDLHSCLNSYFLLLLLCLLITTINSTKPLEQETVLFGGNFPAFYVIGDSLVDSGNNNHLTTMVKSNFPPYGSDFEGGKATGRFSNGKTIADYIAIYYGLPLVPAYLGLSQEEKNSISTGINYASAGCGILPQTGRQIGTCLSLSVQVDMFQETITNNLKKNFKKSELREHLAESLFMIAIGVNDYTFLFNETTDANEFANKLLHDYLLQIERLHKLGARKFFINNIKPLGCYPNVVAKTVPRGSCNDALNFAVSIFNTKLRKSLSRMTQKFIKTSFLYSDYYNYMLGLRGPSSNQVGSSLLNVTSPCCPNVYDGGQLTSCKPGSIACKAPDTHIFFDPFHPTQLANYMYAIACFHERSICHVILED

SEQ ID NO: 37441 - protein, 305 aa, Arabidopsis thaliana
  peptide (1)..(305): Ceres Seq. ID no. 12423110
MVKSNFPPYGSDFEGGKATGRFSNGKTIADYIAIYYGLPLVPAYLGLSQEEKNSISTGINYASAGCGILPQTGRQIGTCLSLSVQVDMFQETITNNLKKNFKKSELREHLAESLFMIAIGVNDYTFLFNETTDANEFANKLLHDYLLQIERLHKLGARKFFINNIKPLGCYPNVVAKTVPRGSCNDALNFAVSIFNTKLRKSLSRMTQKFIKTSFLYSDYYNYMLGLRGPSSNQVGSSLLNVTSPCCPNVYDGGQLTSCKPGSIACKAPDTHIFFDPFHPTQLANYMYAIACFHERSICHVILED

SEQ ID NO: 37442 - DNA, 424 bp, Arabidopsis thaliana
  misc_feature (1)..(424): Ceres Seq. ID no. 12738873
  misc_feature (1)..(424): Ortholog of  Ceres SEQ ID NO 15173807 as cited in SEQ ID NO 57520
atttcccatcaacgcctccatcggcggtgacggaaagtctatcgagatccgtaacttccttggcgagaagaaggtgaggaaggtagagatgttggatggtgtaaccattgttcgatctgagaaggtgaaggatgagattgttcttgacggtaacgatatcgagcttgtttcaaggtcgtgcgctctgatcaaccagaaatgtcacgtgaagaagaaggatatcaggaagttccttgacggtatctatgttagcgagaaaagcaagatcgtagaggaagaatgaatactcatattcccctcttagctcatatttcttgtgtttggaatgttgttagttttgttttatggaccaaatccaccggtgatgtaaaccttgccttttttttgttcgagaatttattaacttatgcaacaagttttggag

SEQ ID NO: 37443 - protein, 93 aa, Arabidopsis thaliana
  peptide (1)..(93): Ceres Seq. ID no. 12738874
FPINASIGGDGKSIEIRNFLGEKKVRKVEMLDGVTIVRSEKVKDEIVLDGNDIELVSRSCALINQKCHVKKKDIRKFLDGIYVSEKSKIVEEE

SEQ ID NO: 37444 - protein, 64 aa, Arabidopsis thaliana
  peptide (1)..(64): Ceres Seq. ID no. 12738875
MLDGVTIVRSEKVKDEIVLDGNDIELVSRSCALINQKCHVKKKDIRKFLDGIYVSEKSKIVEEE

SEQ ID NO: 37445 - protein, 48 aa, Arabidopsis thaliana
  peptide (1)..(48): Ceres Seq. ID no. 12738876
MNTHIPLLAHISCVWNVVSFVLWTKSTGDVNLAFFLFENLLTYATSFG

SEQ ID NO: 37446 - DNA, 927 bp, Arabidopsis thaliana
  misc_feature (1)..(927): Ceres Seq. ID no. 12371965
  misc_feature (1)..(927): Ortholog of  Ceres SEQ ID NO 13638897 as cited in SEQ ID NO 55839
  misc_feature (1)..(927): Ortholog of  Ceres SEQ ID NO 15177758 as cited in SEQ ID NO 57504
  misc_feature (1)..(927): Ortholog of  Ceres SEQ ID NO 13596958 as cited in SEQ ID NO 63319
  misc_feature (1)..(927): Ortholog of  Ceres SEQ ID NO 12614814 as cited in SEQ ID NO 68816
  misc_feature (1)..(927): Ortholog of  Ceres SEQ ID NO 13624040 as cited in SEQ ID NO 0
atcaacaagtctttctctctctctagacaaccacaagaacacaaaacacacaaaaacaaagaggttctttctttgaagaagaaatggaaaaagttgatgtttatgatgagcttgttaacctaaaggcaacagagctgagattgggattaccagggacagaagaaactgtttcttgtggaaaaagcaacaaaagagttttacctgaagctactgagaaagagattgaatccactggaaaaactgaaaccgcttctcctccaaaggctcagattgttggatggccaccagttagatcttacagaaagaacaatgttcagacaaagaagagtgaatctgaaggtcaaggaaactatgtgaaagtaagtatggatggtgctccatatctaaggaagatagatctaacgatgtataaacaatatccagagttgatgaaatcacttgaaaacatgtttaaattctctgtgggagaatattttgagagagaaggatataaaggctcagactttgtacctacttatgaagacaaagatggtgattggatgcttgttggtgatgttccttgggagatgtttgtttcgtcttgtaagaggctaaggatcatgaaaggatctgaagttaaaggtttaggttgtggtggtctttaacaaacctaattgagagataaagatcaaagagaaagattcaaaaacagagttttttgttctgtttcttgaaacagagtaaatatagctctgaaactgctcgggttcttggggagagatgtttcatacaatcatactttgtgaatgtttacctcatcggtaaaaagagagatgcttaaaatggtcttaagcataaaagtgtgagaaagatctaaatctaaactttagctgtaactctgtctccattaaagagaaaggttttgtggtattagaaaggtctaatccg

SEQ ID NO: 37447 - protein, 186 aa, Arabidopsis thaliana; identical to SEQ ID NO: 28591
  peptide (1)..(186): Ceres Seq. ID no. 12371966

SEQ ID NO: 37448 - DNA, 2348 bp, Arabidopsis thaliana
  misc_feature (1)..(2348): Ceres Seq. ID no. 12674418
  misc_feature (1)..(2348): Ortholog of  Ceres SEQ ID NO 14310452 as cited in SEQ ID NO 54426
  misc_feature (1)..(2348): Ortholog of  Ceres SEQ ID NO 13656177 as cited in SEQ ID NO 64997
atatttttggcttaaggtcattttgaagattaataacatgtctattttatcgcgttgtgtccgatccagaaggttctctatttttcgtggataagaagataaagttattgtttattgataagttttctgctgggaagttgcaactttttctagatttaggacgttacaaatttcaatcatgagtgcatcatgggcagatgtggctgattcagagaaggccgtttctcagtcaaagcctccttatgttcccccacacctacggaacaggccatcagagcctgttgctgctcctttgccacaaaatgatcatgcagggtatggtggtcaaccagctgggtctcgttgggctcctcctagcagtgggggtggtggtgccagcggcggtggctataggaatgatggagggcgcactggctatggttatggtgctggaggaggaggtggtggtggtggtggctggaacaacagaagtggagggtgggaccgtagggaacgtgaagtaaacccatttggagatgatgctgagttagaaccggtctttacagagcaggagaatactggcattaattttgatgcctatgaagatattccagttgagaccagtgggggagacgtgccccctcctgttaacacatttgctgacatagatcttggggatgcattaaatctgaacatccggaggtgcaagtatgtgaggccaacaccggtacagcgtcatgctattccaatactgcttgcagagagagatttgatggcctgtgcccagactgggtctgggaagactgctgctttttgctttccaataattagtggaatcatgaaagatcagcatgtagaaagaccccgtggttcacgggcggtttacccttttgcagtcatcctctcaccaacaagggaattggcatgccagatacatgatgaagccaaaaaattctcctaccaaactggtgtgaaggttgttgttgcttatggaggaacacccattcaccagcagctcagggaactcgagaggggatgtgatatccttgtggcaactcctggccggttaaatgatttgcttgaaagagctagagtctcaatgcagatgattaggtttttagctctagatgaggcagacaggatgctggacatgggttttgagccacagattagaaagattgttgagcagatggacatgcctccacgtggggtgagacagacaatgctgttcagtgctacatttccaagtcagattcagagacttgcagctgatttcatgtcaaactatatatttttggctgtgggaagagttggttcaagcactgatttaattacccaaagggttgagtttgtccaagagtctgacaagagaagccatctcatggacctgcttcacgcgcaaagagagacccaagacaagcaatcattgacattagtttttgtggagacaaagaggggagctgatactttggaaaattggctgtgcatgaatgagtttccagcaacctccattcatggcgatagaacacaacaggaaagagaagtggcactgaggtccttcaaaactgggaggacacctattttggttgcaacagacgtggcagcacgtggtcttgacattccccacgtggctcatgttgtaaacttcgatctaccaaatgacattgatgactatgtccaccgtatcggacgaacaggacgtgcaggcaaatctggaatagcaactgccttcttcaacgagaacaatgcacaactggctaggtcgcttgctgagctaatgcaagaagccaatcaagaggtccccgagtggctcacacgatatgcttcacgtgcttcatttggtggtggtaagaaacggtctggtggtcggtttggtggccgtgacttcagaagggaaggctcttacagtagaggaggaggcggcggcggcggaggaggcggcagtgattactatggcggaggaggctatggtggtggtggatacggtggtgctccaagcggtgggtatggtgctggagtgaccagtgcttgggattagccaattaggctccccaatttttcctctttttaacctgactatttatttcttctcttctacattcccaagagagcacgtgtatttgcccccacctttgagatctctcattcaagagatggatttaactaatcttgctattaggtggatctctctgttttttcaggctatttttaggatttgtcctaaaagatagacagtagtttttccgattttgatcttgttcttggtttcttctaacaatttcatttgttagtttgaaatccaatttgtctttttgtttccctttgttgttgacaatctttcttggtgaaatacaatctctctttatatc

SEQ ID NO: 37449 - protein, 612 aa, Arabidopsis thaliana
  peptide (1)..(612): Ceres Seq. ID no. 12674419
MSASWADVADSEKAVSQSKPPYVPPHLRNRPSEPVAAPLPQNDHAGYGGQPAGSRWAPPSSGGGGASGGGYRNDGGRTGYGYGAGGGGGGGGGWNNRSGGWDRREREVNPFGDDAELEPVFTEQENTGINFDAYEDIPVETSGGDVPPPVNTFADIDLGDALNLNIRRCKYVRPTPVQRHAIPILLAERDLMACAQTGSGKTAAFCFPIISGIMKDQHVERPRGSRAVYPFAVILSPTRELACQIHDEAKKFSYQTGVKVVVAYGGTPIHQQLRELERGCDILVATPGRLNDLLERARVSMQMIRFLALDEADRMLDMGFEPQIRKIVEQMDMPPRGVRQTMLFSATFPSQIQRLAADFMSNYIFLAVGRVGSSTDLITQRVEFVQESDKRSHLMDLLHAQRETQDKQSLTLVFVETKRGADTLENWLCMNEFPATSIHGDRTQQEREVALRSFKTGRTPILVATDVAARGLDIPHVAHVVNFDLPNDIDDYVHRIGRTGRAGKSGIATAFFNENNAQLARSLAELMQEANQEVPEWLTRYASRASFGGGKKRSGGRFGGRDFRREGSYSRGGGGGGGGGGSDYYGGGGYGGGGYGGAPSGGYGAGVTSAWD

SEQ ID NO: 37450 - protein, 421 aa, Arabidopsis thaliana
  peptide (1)..(421): Ceres Seq. ID no. 12674420
MACAQTGSGKTAAFCFPIISGIMKDQHVERPRGSRAVYPFAVILSPTRELACQIHDEAKKFSYQTGVKVVVAYGGTPIHQQLRELERGCDILVATPGRLNDLLERARVSMQMIRFLALDEADRMLDMGFEPQIRKIVEQMDMPPRGVRQTMLFSATFPSQIQRLAADFMSNYIFLAVGRVGSSTDLITQRVEFVQESDKRSHLMDLLHAQRETQDKQSLTLVFVETKRGADTLENWLCMNEFPATSIHGDRTQQEREVALRSFKTGRTPILVATDVAARGLDIPHVAHVVNFDLPNDIDDYVHRIGRTGRAGKSGIATAFFNENNAQLARSLAELMQEANQEVPEWLTRYASRASFGGGKKRSGGRFGGRDFRREGSYSRGGGGGGGGGGSDYYGGGGYGGGGYGGAPSGGYGAGVTSAWD

SEQ ID NO: 37451 - protein, 399 aa, Arabidopsis thaliana
  peptide (1)..(399): Ceres Seq. ID no. 12674421
MKDQHVERPRGSRAVYPFAVILSPTRELACQIHDEAKKFSYQTGVKVVVAYGGTPIHQQLRELERGCDILVATPGRLNDLLERARVSMQMIRFLALDEADRMLDMGFEPQIRKIVEQMDMPPRGVRQTMLFSATFPSQIQRLAADFMSNYIFLAVGRVGSSTDLITQRVEFVQESDKRSHLMDLLHAQRETQDKQSLTLVFVETKRGADTLENWLCMNEFPATSIHGDRTQQEREVALRSFKTGRTPILVATDVAARGLDIPHVAHVVNFDLPNDIDDYVHRIGRTGRAGKSGIATAFFNENNAQLARSLAELMQEANQEVPEWLTRYASRASFGGGKKRSGGRFGGRDFRREGSYSRGGGGGGGGGGSDYYGGGGYGGGGYGGAPSGGYGAGVTSAWD

SEQ ID NO: 37452 - DNA, 1784 bp, Arabidopsis thaliana
  misc_feature (1)..(1784): Ceres Seq. ID no. 13611515
  misc_feature (1)..(1784): Ortholog of  Ceres SEQ ID NO 14310998 as cited in SEQ ID NO 53411
acttcttcttcatcatctttaatcgttgggaaaagtttgatgatacggagtggacaattcttggtgtagaaggagaatctgagagagagagagtcatggaagctctgaaaaccgcaacttttagccctatgtcggtgttatccgagaaaagatcagaaccacgaaagcctttctcgctccctaacctctttccaccaaaatcacagagaccaatctcccaagaaagcttcttgaagagattcaatggtggattggctcttctaacttctgttctaagcagtgcaacagctcctgctaaatccctgacgtacgaggaagctctgcaacaatctatgaccacttcttcatcttttgattcggatggtctgattgaagggatatccaattttgtcacagacaatcctttggttattgccggtggagttgctgcattggctgttccatttgttctgtctcaggttctgaacaagaagcccaaatcatggggagttgagtctgctaagaatgcttataccaagttgggtactgatgataatgctcagttgcttgacataagagctactgctgatttcagacaagtgggcagtcctaatattaagggtttgggtaaaaaagcggtttctactgtttataacggtgaagacaagcctggtttcctgaagaagctttctttgaagtttaaagatcctgagaacaccacattatacattctggacaagtttgatggaaactctgagcttgttgctgaattggtggctcttaatggattcaaatctgcttatgcgattaaagatggtgcagagggacctagaggctggttgaatagcagcttgccttggatagagccaaagaagactctcagccttgatttaagcagtttgacggatagcatcagcggtgtatttggtgagagttctgatggtgtatctgtcgctcttggagtagctgctgctgctggattaagtgtttttgcatttacagagattgaaaccatactccaactactaggttcagctgcacttgttcaacttgcaggcaagaaacttctatttgctgaggaccgaaagcaaactctaaaacaggtggatgagttcttgaacacaaaggttgcccctaaagaacttgttgatgagttaaaggaaataggaaaggctcttcttcctcaatcaacaagcaacaaagctctcccagcaccagcaacagtaacagcagaagcagaatcagctacagctacaaccaccacagtcgataaaccagtacctgagccagaaacagttgcagctacaacaaccactgtagataaaccagtacctgagccagagccagtgccagagccagtgccagtgccagcgattgaagctgcagtcgctgcacaagtaatcacagaaccaaccgaaacagaagccaaaccaaaacctcattcaagacctctctctccatatgcatcgtaccctgacttgaagcctccatcttctccgatgccatcgcagccctgaaaacagctaagaacagtctctctctcgttacttagtctggttttgtcctcctgcaaacagaagaacaaaagtggtcgaatattgtaacttgttcttttttctctcgttttttctcccgaacttagatgctactttgtgtcgaatctgagataagtggactttgttttgtttttctccctttataccaccattgagttcaaacaagagtctgtcatcgcgttaaaggggatcagaagctgtgtgaggggtgtattggacgaaataaaagttgtggggaaatttccaaat

SEQ ID NO: 37453 - protein, 497 aa, Arabidopsis thaliana; identical to SEQ ID NO: 34924
  peptide (1)..(497): Ceres Seq. ID no. 13611516

SEQ ID NO: 37454 - protein, 466 aa, Arabidopsis thaliana; identical to SEQ ID NO: 34925
  peptide (1)..(466): Ceres Seq. ID no. 13611517

SEQ ID NO: 37455 - protein, 455 aa, Arabidopsis thaliana; identical to SEQ ID NO: 34926
  peptide (1)..(455): Ceres Seq. ID no. 13611518

SEQ ID NO: 37456 - DNA, 1567 bp, Arabidopsis thaliana
  misc_feature (1)..(1567): Ceres Seq. ID no. 12389081
  misc_feature (1)..(1567): Ortholog of  Ceres SEQ ID NO 14302255 as cited in SEQ ID NO 65021
gatcgttttggttcttcacctttccttttctttgctttctgcttcctcccttaaatacatttcactctgttatcatcgatttttttttcttatatctcaatcttattttgtttgtcttttctccatttttgtttcgttaagaagaaacaatggttatggctatggatcggatcgctttgttctcttcctcatcatcatctgtttatcgtcatcgttcgtctcattctcatggctccaaatcttccagagttttcactattcgttccgactctacagcggttggaaggaaactgtatattcctcctcgagaggttcatcttcaagtgaagtattcaatgccaccacaaaagctggagattttcaagtccttagaaggatgggctaatgagaacttgttggcttacttaaaacctgttgagaaatcatggcaaccaactgattttctccctgaacctgagtcagaaggattctatgaccaagttaaggagttaagagaaaggtgtaaggagctctctgatgactaccttatagtgcttgttggtgatatgatcacagaggaagcacttccgacttatcagaccatgattaatacattggacggggttagagatgagacgggagcaagtccaactccttgggccgtatggactagggcatggactgcggaagagaatagacatggtgatcttcttaacaagtacctttatctgtctggacgagtagacatgagacagattgaaaaaactattcaatacctcattggttctggaatggatccaaaaactgaaaacaacccttacttgggattcatatatacttcttttcaagaaagagctacattcatctcccatggaaacactgctagactggcaaaggatcttggagacttgacacttgggaagatttgtggcaccattgctgctgatgagaggcgtcatgaacacgcctacaccaagattgtagagaagctctttgaaattgatcctgataccacagtcgtgggatttgctgacatgatgaggaaaaagatctcgatgcctgctcatttgatgtatgatggtcgtgatgataatctatttgatcacttctcgtccgtggcccagaggcttggtgtctacactgccaaggactatgctgatatactgcaacatcttgtggaaaggtggaatgtggagaagttgtcagacctttctagtgaagggaacagggcccaggactacctctgtggattacctgctagaatccgcaaacttgaagagagggctcaagggagaaccaaagaagcagcaaaaaacataccattcagctggatttttggtcgagaagtcagggcttaaaagaagtaatgctaagcaattaattcttccatattataatcccaagcaagctataaaagatcttcaccaacaccatgatgaagaagccagaagtatgttatgttggaaagtgtgtagataaagtatgtgctagactttgctttgtttggatcacttaaatgactgcctccaaagaatttgctttgttttgacgattttatttatttatttctgcacctctatttgttgcc

SEQ ID NO: 37457 - protein, 395 aa, Arabidopsis thaliana
  peptide (1)..(395): Ceres Seq. ID no. 12389082
MVMAMDRIALFSSSSSSVYRHRSSHSHGSKSSRVFTIRSDSTAVGRKLYIPPREVHLQVKYSMPPQKLEIFKSLEGWANENLLAYLKPVEKSWQPTDFLPEPESEGFYDQVKELRERCKELSDDYLIVLVGDMITEEALPTYQTMINTLDGVRDETGASPTPWAVWTRAWTAEENRHGDLLNKYLYLSGRVDMRQIEKTIQYLIGSGMDPKTENNPYLGFIYTSFQERATFISHGNTARLAKDLGDLTLGKICGTIAADERRHEHAYTKIVEKLFEIDPDTTVVGFADMMRKKISMPAHLMYDGRDDNLFDHFSSVAQRLGVYTAKDYADILQHLVERWNVEKLSDLSSEGNRAQDYLCGLPARIRKLEERAQGRTKEAAKNIPFSWIFGREVRA

SEQ ID NO: 37458 - protein, 393 aa, Arabidopsis thaliana
  peptide (1)..(393): Ceres Seq. ID no. 12389083
MAMDRIALFSSSSSSVYRHRSSHSHGSKSSRVFTIRSDSTAVGRKLYIPPREVHLQVKYSMPPQKLEIFKSLEGWANENLLAYLKPVEKSWQPTDFLPEPESEGFYDQVKELRERCKELSDDYLIVLVGDMITEEALPTYQTMINTLDGVRDETGASPTPWAVWTRAWTAEENRHGDLLNKYLYLSGRVDMRQIEKTIQYLIGSGMDPKTENNPYLGFIYTSFQERATFISHGNTARLAKDLGDLTLGKICGTIAADERRHEHAYTKIVEKLFEIDPDTTVVGFADMMRKKISMPAHLMYDGRDDNLFDHFSSVAQRLGVYTAKDYADILQHLVERWNVEKLSDLSSEGNRAQDYLCGLPARIRKLEERAQGRTKEAAKNIPFSWIFGREVRA

SEQ ID NO: 37459 - protein, 391 aa, Arabidopsis thaliana
  peptide (1)..(391): Ceres Seq. ID no. 12389084
MDRIALFSSSSSSVYRHRSSHSHGSKSSRVFTIRSDSTAVGRKLYIPPREVHLQVKYSMPPQKLEIFKSLEGWANENLLAYLKPVEKSWQPTDFLPEPESEGFYDQVKELRERCKELSDDYLIVLVGDMITEEALPTYQTMINTLDGVRDETGASPTPWAVWTRAWTAEENRHGDLLNKYLYLSGRVDMRQIEKTIQYLIGSGMDPKTENNPYLGFIYTSFQERATFISHGNTARLAKDLGDLTLGKICGTIAADERRHEHAYTKIVEKLFEIDPDTTVVGFADMMRKKISMPAHLMYDGRDDNLFDHFSSVAQRLGVYTAKDYADILQHLVERWNVEKLSDLSSEGNRAQDYLCGLPARIRKLEERAQGRTKEAAKNIPFSWIFGREVRA

SEQ ID NO: 37460 - DNA, 1473 bp, Arabidopsis thaliana
  misc_feature (1)..(1473): Ceres Seq. ID no. 12324325
  misc_feature (1)..(1473): Ortholog of  Ceres SEQ ID NO 14315481 as cited in SEQ ID NO 56990
agagattacaagagtgttgtttgagagcgaatcaaggttcctccaaagaaagaagatgactttaattcttatttaatttccctttctccttttgcttcaccaaaatccacacattcatcaattaaaaaacaaaccctagattcttgaaaactggaactcattcacgaatcctaaaaagagagctcctttggttttcttgaaacccagattcttcaagctcagctatggcggtcttcaaaaccctagctttcctattcgttttaagcatcgtgatttaccaatcagtggctgttacagatgtaaattcatcgttttcctttaatgggtttgtcaaagctccaagctttgacaataatgttgctctgtttggagattcgaagctcgttcatggcggtccatcgattcaattgactgactcagtgagtcgcagtgaagggcgagttatttacaagaaacccatcagactgttccaaggtaaagagagaaacttttccggatcattctcaactagtttctcgttttcgatgtctgatgagattggtagtgtcttggcttttataatggttccaagaggtttggatcttaggttgtttggtagaaagggtaataatagttcctctggtttagggttcttattgaaacacaaagttgttgctgttgagtttggtatctccaagagagggaatcatgtagggatcttagttggtcgtcctgaatctggtaaagttagaaagttatcatcttttggtcaccatttcaatgaagagaagagattgaattgttggattgattatgaggcaagctcaaagagaatagaggttcgtttgagtctatctgctgccttaaagccggtggatccattcgtgtcttactctgtagacttggctaagctatggaaagatgggaagtttatggtgggtttaacctctgcaaatggaaacacttcaaagccggtttatctccattcgtggagctttaaactgatacatccttcgatgaggattcactcgcagccgcttgatccaaacgacgtttccaagactgttaaggaaggggagaagacggtggaagttaaggggaaaggaaaatgtatatggagaatccttggtgcattggtcttgggggcggtttgtggaacattgggagccatgttcgcgttatacctttggacaatatgcggtaataggcagtcaatggcgatagttcccgaggaatgtgctgacgaaaaagcggatatccttgtaacgaaagctgatgttgttgttgaagaagaagtcaagaagtagtagaaaaagaaaagtttggtgtgtgtgttttagaatgttgtatttgttgtttgtaatgtaaattcttgtgtccttctttattcttcttctgtttgtttttttgttagttgcagatttggtgagatgagttttcacatgtagaagaaccatacaatatgtattaagttaagatcctgaaatcttgatc

SEQ ID NO: 37461 - protein, 353 aa, Arabidopsis thaliana
  peptide (1)..(353): Ceres Seq. ID no. 12324326
MAVFKTLAFLFVLSIVIYQSVAVTDVNSSFSFNGFVKAPSFDNNVALFGDSKLVHGGPSIQLTDSVSRSEGRVIYKKPIRLFQGKERNFSGSFSTSFSFSMSDEIGSVLAFIMVPRGLDLRLFGRKGNNSSSGLGFLLKHKVVAVEFGISKRGNHVGILVGRPESGKVRKLSSFGHHFNEEKRLNCWIDYEASSKRIEVRLSLSAALKPVDPFVSYSVDLAKLWKDGKFMVGLTSANGNTSKPVYLHSWSFKLIHPSMRIHSQPLDPNDVSKTVKEGEKTVEVKGKGKCIWRILGALVLGAVCGTLGAMFALYLWTICGNRQSMAIVPEECADEKADILVTKADVVVEEEVKK

SEQ ID NO: 37462 - protein, 253 aa, Arabidopsis thaliana
  peptide (1)..(253): Ceres Seq. ID no. 12324327
MSDEIGSVLAFIMVPRGLDLRLFGRKGNNSSSGLGFLLKHKVVAVEFGISKRGNHVGILVGRPESGKVRKLSSFGHHFNEEKRLNCWIDYEASSKRIEVRLSLSAALKPVDPFVSYSVDLAKLWKDGKFMVGLTSANGNTSKPVYLHSWSFKLIHPSMRIHSQPLDPNDVSKTVKEGEKTVEVKGKGKCIWRILGALVLGAVCGTLGAMFALYLWTICGNRQSMAIVPEECADEKADILVTKADVVVEEEVKK

SEQ ID NO: 37463 - protein, 241 aa, Arabidopsis thaliana
  peptide (1)..(241): Ceres Seq. ID no. 12324328
MVPRGLDLRLFGRKGNNSSSGLGFLLKHKVVAVEFGISKRGNHVGILVGRPESGKVRKLSSFGHHFNEEKRLNCWIDYEASSKRIEVRLSLSAALKPVDPFVSYSVDLAKLWKDGKFMVGLTSANGNTSKPVYLHSWSFKLIHPSMRIHSQPLDPNDVSKTVKEGEKTVEVKGKGKCIWRILGALVLGAVCGTLGAMFALYLWTICGNRQSMAIVPEECADEKADILVTKADVVVEEEVKK

SEQ ID NO: 37464 - DNA, 1471 bp, Arabidopsis thaliana
  misc_feature (1)..(1471): Ceres Seq. ID no. 12422556
  misc_feature (1)..(1471): Ortholog of  Ceres SEQ ID NO 13591365 as cited in SEQ ID NO 62720
gttttggtttcttcttcatcggtccgatcagagagagagaatcgccggtgagaaaagaaaatggcgtcggcgatttctctttctctcttaaacggagcaacgcctttgaaatcgaattcgctccacaaatctagactcactccacttcatcttcgaactatctcttgttctagactatcttactctccctcgagtcgcgaaatttctctcaaaactcaatctactgttcctatttcgtgtaggcgtagtaggtttgacttcgttcctcgttgcggcatttcgtcgaacgatttgcctactgagaaaaagaagagctttggggagtgggttgagtttgtgggagaggcggtttcgacggcgtttccgatatgggtttctctgggatgcttgttgggactgatgagaccaagtactttcaattgggttactccaaattggaccattgtaggtcttacgatcactatgcttggaatgggaatgactttgacccttgatgatcttcgtggcgctttatcgatgcccaaggagctcttcgctggctttctgttgcagtattcggtcatgccactatcagcattttttgtgagtaaactcttaaatttgccaccacattacgcagccggtctcatattggttggttgctgtccaggcggcacggctagtaatattgtcacatacatcgcgcgtggaaatgttgcgctatcagtgttgatgacagcagctagcactgtttcagctgtgattatgacaccgcttcttacggcgaagcttgccaagcagtatatcacagttgatgctcttggattactaatgtcaacactacaggtggttcttctcccagtgttggctggtgcatttcttaaccaatactttaaaaagctggtgaaattcgtctctcctgtgatgcctccaattgcggttggaacagttgcaatcctgtgtgggtatgctatcggtcagaacgcatctgcaatactcatgtctgggaaacaagtagtcttggcttcatgccttcttcacatctctggatttctctttgggtatctgttttcaagaatactcggaattgatgtggcatcatcgagaactatctctatcgaagttggcatgcagaactcggtgcttggagttgttcttgcgacacagcattttgggaatccactcactgcagtaccgtgcgctgtttctagcgtctgtcactcaatcctcggtagcgtcttggctggaatttggagacgcagtgccccaaaacagcttgaagactaaaaagaaagcaaaggaaagttcatgaagtcctcactgtgttactcaatttcaacatctttcaggaccatttagttaagtttgttgaacaaatgaaccaaaacgggttatgtcttgtaaagctttggaagatttttttttttttttctatgtctgagatttctcttgttattcttcaaagaattttgtgaattcgaaacatgaaaat

SEQ ID NO: 37465 - protein, 401 aa, Arabidopsis thaliana
  peptide (1)..(401): Ceres Seq. ID no. 12422557
MASAISLSLLNGATPLKSNSLHKSRLTPLHLRTISCSRLSYSPSSREISLKTQSTVPISCRRSRFDFVPRCGISSNDLPTEKKKSFGEWVEFVGEAVSTAFPIWVSLGCLLGLMRPSTFNWVTPNWTIVGLTITMLGMGMTLTLDDLRGALSMPKELFAGFLLQYSVMPLSAFFVSKLLNLPPHYAAGLILVGCCPGGTASNIVTYIARGNVALSVLMTAASTVSAVIMTPLLTAKLAKQYITVDALGLLMSTLQVVLLPVLAGAFLNQYFKKLVKFVSPVMPPIAVGTVAILCGYAIGQNASAILMSGKQVVLASCLLHISGFLFGYLFSRILGIDVASSRTISIEVGMQNSVLGVVLATQHFGNPLTAVPCAVSSVCHSILGSVLAGIWRRSAPKQLED

SEQ ID NO: 37466 - protein, 288 aa, Arabidopsis thaliana
  peptide (1)..(288): Ceres Seq. ID no. 12422558
MRPSTFNWVTPNWTIVGLTITMLGMGMTLTLDDLRGALSMPKELFAGFLLQYSVMPLSAFFVSKLLNLPPHYAAGLILVGCCPGGTASNIVTYIARGNVALSVLMTAASTVSAVIMTPLLTAKLAKQYITVDALGLLMSTLQVVLLPVLAGAFLNQYFKKLVKFVSPVMPPIAVGTVAILCGYAIGQNASAILMSGKQVVLASCLLHISGFLFGYLFSRILGIDVASSRTISIEVGMQNSVLGVVLATQHFGNPLTAVPCAVSSVCHSILGSVLAGIWRRSAPKQLED

SEQ ID NO: 37467 - protein, 267 aa, Arabidopsis thaliana
  peptide (1)..(267): Ceres Seq. ID no. 12422559
MLGMGMTLTLDDLRGALSMPKELFAGFLLQYSVMPLSAFFVSKLLNLPPHYAAGLILVGCCPGGTASNIVTYIARGNVALSVLMTAASTVSAVIMTPLLTAKLAKQYITVDALGLLMSTLQVVLLPVLAGAFLNQYFKKLVKFVSPVMPPIAVGTVAILCGYAIGQNASAILMSGKQVVLASCLLHISGFLFGYLFSRILGIDVASSRTISIEVGMQNSVLGVVLATQHFGNPLTAVPCAVSSVCHSILGSVLAGIWRRSAPKQLED

SEQ ID NO: 37468 - DNA, 1414 bp, Arabidopsis thaliana
  misc_feature (1)..(1414): Ceres Seq. ID no. 13490862
  misc_feature (1)..(1414): Ortholog of  Ceres SEQ ID NO 13595688 as cited in SEQ ID NO 54342
  misc_feature (1)..(1414): Ortholog of  Ceres SEQ ID NO 13595240 as cited in SEQ ID NO 56316
  misc_feature (1)..(1414): Ortholog of  Ceres SEQ ID NO 15168425 as cited in SEQ ID NO 57370
gccgctgtgtcatcgtggaactcccattttctctcttttacttgttcgttcccaaactcttctccctcgatcgtctccgtcgccgatctcgtttcttcattttccgcgtgttgattggtacaaaggtttaatcaaatggttggaggaggagttatccagcaaattcttaggaggaagcttcactcccaatcacttgcaactccggttttgtcttggttttcttcgaagaaagctcatgaggatgctggttcttctggtgtaagagcacttgccttgttgggtgctggtgttacaggactgttgagtttttctacagtagcatctgctgatgaggctgaacatggattggagagtccagagtacccttggcctcatgatggcattcttagctcatatgaccatgcttcgatccgtcgtgggcatcaagtttatcagcaagtctgtgcatcatgccattcaatgtctctgatctcataccgagacttggtgggtgtcgcctacgcagaggaagaggcaaaggcaatggcagctgaaatcgaggtagtagatggacctaatgatgagggtgagatgttcacccgccctggtaaactcagtgaccggtttcctcagccatatgcaaatgaatcagctgcaaggtttgctaatggtggagcgtatcctcctgatctaagtcttataactaaggcacgtcacaatggtccaaactatgtctttgcgcttctgactggttaccgtgatccccctgctggcatatcgattagagaggggttacactacaatccttatttccctgggggagcaattgctatgccgaaaatgctcaatgatgaagctgttgagtatgaagatggtgtccccgccacagaggcacagatgggtaaagatattgtatcattcttggcctgggcagctgaaccagaaatggaagagaggaaactgatgggtttcaaatggatattcctactctctctcgctcttctccaagctgcttactacaggcgactaaaatggtcggttctcaagtcccgcaagctggttcttgacgtggttaactaaagcgccgctgagaagcttttgcattggcctggccacacacagtcgtattttcaacaaaggatgttaaatagagaagagcctttctctggtaataacgtatcatcatttttatgtgtcataaaaatctttgatgagaccagttctcacctgaaggtgaaaagacctcatcgttcttctttttccttcgattattactagagagttttatgaggataatcacgaaaacttgtttttttcgcctcataataatcacacatgattttgagattatatcatttgttatgtttttcctcttgtctcaataaaaaataactttgtactctgattttgttgtctattttcggcatttcttgcg

SEQ ID NO: 37469 - protein, 307 aa, Arabidopsis thaliana
  peptide (1)..(307): Ceres Seq. ID no. 13490863
MVGGGVIQQILRRKLHSQSLATPVLSWFSSKKAHEDAGSSGVRALALLGAGVTGLLSFSTVASADEAEHGLESPEYPWPHDGILSSYDHASIRRGHQVYQQVCASCHSMSLISYRDLVGVAYAEEEAKAMAAEIEVVDGPNDEGEMFTRPGKLSDRFPQPYANESAARFANGGAYPPDLSLITKARHNGPNYVFALLTGYRDPPAGISIREGLHYNPYFPGGAIAMPKMLNDEAVEYEDGVPATEAQMGKDIVSFLAWAAEPEMEERKLMGFKWIFLLSLALLQAAYYRRLKWSVLKSRKLVLDVVN

SEQ ID NO: 37470 - protein, 199 aa, Arabidopsis thaliana
  peptide (1)..(199): Ceres Seq. ID no. 13490864
MSLISYRDLVGVAYAEEEAKAMAAEIEVVDGPNDEGEMFTRPGKLSDRFPQPYANESAARFANGGAYPPDLSLITKARHNGPNYVFALLTGYRDPPAGISIREGLHYNPYFPGGAIAMPKMLNDEAVEYEDGVPATEAQMGKDIVSFLAWAAEPEMEERKLMGFKWIFLLSLALLQAAYYRRLKWSVLKSRKLVLDVVN

SEQ ID NO: 37471 - protein, 178 aa, Arabidopsis thaliana
  peptide (1)..(178): Ceres Seq. ID no. 13490865
MAAEIEVVDGPNDEGEMFTRPGKLSDRFPQPYANESAARFANGGAYPPDLSLITKARHNGPNYVFALLTGYRDPPAGISIREGLHYNPYFPGGAIAMPKMLNDEAVEYEDGVPATEAQMGKDIVSFLAWAAEPEMEERKLMGFKWIFLLSLALLQAAYYRRLKWSVLKSRKLVLDVVN

SEQ ID NO: 37472 - DNA, 1490 bp, Arabidopsis thaliana
  misc_feature (1)..(1490): Ceres Seq. ID no. 12421224
  misc_feature (1)..(1490): Ortholog of  Ceres SEQ ID NO 13594128 as cited in SEQ ID NO 58608
  misc_feature (1)..(1490): Ortholog of  Ceres SEQ ID NO 14309682 as cited in SEQ ID NO 58908
  misc_feature (1)..(1490): Ortholog of  Ceres SEQ ID NO 15176122 as cited in SEQ ID NO 62462
  misc_feature (1)..(1490): Ortholog of  Ceres SEQ ID NO 12624849 as cited in SEQ ID NO 62773
aaaaaagattcgatttttgactgcaaaaaagagaatttctaaaagcaaatcggagagcttcggcgatggcgttatcacgactttcttcacgatccaacactttcctaaagccggcgattaccgccttgccctcctccatccgccgtcatgtttccacagactcatcaccgatcacaatcgaaaccgccgtccctttcacatcgcatctatgtgaatcaccgtcacgctccgtcgagacttcatcggaggagatcttagcctttttccgtgacatggctcggatgaggaggatggagatcgcagcagattctctttacaaggcgaagctgatccgtgggttctgtcatttgtacgatggtcaagaggctttagcggtgggaatggaagcggcgattaccaaaaaagatgcgattatcacatcgtatcgtgatcactgtactttcattggtcgtggtgggaagcttgttgatgctttctctgagcttatggggagaaaaactggttgttctcatggtaaaggaggatctatgcatttctataagaaagatgcttccttttatggtggacatgggattgttggtgctcagattccattgggatgtggtttggcttttgctcagaagtataataaggatgaggctgtgacttttgctttgtatggtgatggtgctgcgaatcagggacagttgtttgaggccttgaacatttcggctttgtgggatttgcctgcgattcttgtttgcgagaataaccattatggaatgggaacggctacatggaggtcggctaagtctccggcttatttcaagcgtggagattatgttcctggcttgaaggtggatggtatggatgcactggctgtgaaacaggcgtgcaagtttgccaaggagcatgctctcaagaatggtcctattatccttgagatggacacttacagataccacggtcactctatgtctgacccaggaagcacttaccgtactcgtgatgaaatctctggcgtgagacaggtgcgtgatccaattgaaagggtgcgaaagttgctcttaactcatgacatagctaccgaaaaagagcttaaggacatggagaaagagataaggaaagaagtagatgacgccgtagctcaggccaaggagagcccgataccagatgcatctgagctattcacaaacatgtacgtgaaagactgcggagttgagtcgtttggagcagacagaaaagaactcaaagtaacacttccatagaatcttgcttcccaaggagatgattggttcaataaatcagaaggcaaggctacacaaatctttttaacttgctaccaaaaatatttctggttttttttttttgtattttcatttcaagtgtaaagccattgcttcaccagtttgccaactttgtttcccacacttaaatttgacaccaagcaaaagaagcttcggatatcactctgtgagataaagttagagaaataagcagagagagtagtt

SEQ ID NO: 37473 - protein, 393 aa, Arabidopsis thaliana
  peptide (1)..(393): Ceres Seq. ID no. 12421225
MALSRLSSRSNTFLKPAITALPSSIRRHVSTDSSPITIETAVPFTSHLCESPSRSVETSSEEILAFFRDMARMRRMEIAADSLYKAKLIRGFCHLYDGQEALAVGMEAAITKKDAIITSYRDHCTFIGRGGKLVDAFSELMGRKTGCSHGKGGSMHFYKKDASFYGGHGIVGAQIPLGCGLAFAQKYNKDEAVTFALYGDGAANQGQLFEALNISALWDLPAILVCENNHYGMGTATWRSAKSPAYFKRGDYVPGLKVDGMDALAVKQACKFAKEHALKNGPIILEMDTYRYHGHSMSDPGSTYRTRDEISGVRQVRDPIERVRKLLLTHDIATEKELKDMEKEIRKEVDDAVAQAKESPIPDASELFTNMYVKDCGVESFGADRKELKVTLP

SEQ ID NO: 37474 - protein, 324 aa, Arabidopsis thaliana
  peptide (1)..(324): Ceres Seq. ID no. 12421226
MARMRRMEIAADSLYKAKLIRGFCHLYDGQEALAVGMEAAITKKDAIITSYRDHCTFIGRGGKLVDAFSELMGRKTGCSHGKGGSMHFYKKDASFYGGHGIVGAQIPLGCGLAFAQKYNKDEAVTFALYGDGAANQGQLFEALNISALWDLPAILVCENNHYGMGTATWRSAKSPAYFKRGDYVPGLKVDGMDALAVKQACKFAKEHALKNGPIILEMDTYRYHGHSMSDPGSTYRTRDEISGVRQVRDPIERVRKLLLTHDIATEKELKDMEKEIRKEVDDAVAQAKESPIPDASELFTNMYVKDCGVESFGADRKELKVTLP

SEQ ID NO: 37475 - protein, 321 aa, Arabidopsis thaliana
  peptide (1)..(321): Ceres Seq. ID no. 12421227
MRRMEIAADSLYKAKLIRGFCHLYDGQEALAVGMEAAITKKDAIITSYRDHCTFIGRGGKLVDAFSELMGRKTGCSHGKGGSMHFYKKDASFYGGHGIVGAQIPLGCGLAFAQKYNKDEAVTFALYGDGAANQGQLFEALNISALWDLPAILVCENNHYGMGTATWRSAKSPAYFKRGDYVPGLKVDGMDALAVKQACKFAKEHALKNGPIILEMDTYRYHGHSMSDPGSTYRTRDEISGVRQVRDPIERVRKLLLTHDIATEKELKDMEKEIRKEVDDAVAQAKESPIPDASELFTNMYVKDCGVESFGADRKELKVTLP

SEQ ID NO: 37476 - DNA, 1439 bp, Arabidopsis thaliana
  misc_feature (1)..(1439): Ceres Seq. ID no. 12738816
  misc_feature (1)..(1439): Ortholog of  Ceres SEQ ID NO 13598387 as cited in SEQ ID NO 62757
  misc_feature (1)..(1439): Ortholog of  Ceres SEQ ID NO 13662984 as cited in SEQ ID NO 64419
cttcttcttcttcgtcgtcctcaacaagctcttctttctgactcataacccaaatttctgagaatcagagccttattcaagagaacaccaagagtttggtggaagttgttgaaattcgaagccgatcgcggactcgtttgctcttgattacgtcgcaatccgtacgattttccgatcaaacttaagagtgaaggagatagatttgtagaaaaaggaagagaataagagtgagcttgtggccaaaaaagggatgcctttgaacttaggcaacgatggcgatgggtcttcccggattattttgactgagcctcgcggatctactgctgaggtgcttctatttggaggacaagtcatttcttggaaaaatgaaaggagggaagaactgctttatatgagcagcaaggctcaatataagccacccaaggcgatcagaggaggaatacctgtttgctttccacagtttggaaactttggtggacttgagcgacatggatttgcccggaacaaattctggtcacatgatgaagatccttcgcctctacctcctgctaacaaacaatcatctgttgatctgatattgaagtccacagaagatgacttgaagacctggccgcatagttttgaactccgtattcgcatttctattagccctgggaagcttactttgatccctcgtgtgaggaacattgactcaaaggcattctcctttatgtttgcactgcgaaactacttatatgtatctgacataagtgaagttcgagttgagggtttggagacactggattatctagacaacttgattggtaaagaaagattcactgagcaagcagacgcgattacctttgacggggaggtcgatagagtgtacttgaacacaccaacaaagattgcggtcatagatcatgagcgaaagaggaccatcgagttgcgaaaggaaggcatgcccaatgcagttgtgtggaacccctgggacaaaaaggcaaagaccatagctgatatgggagatgaagattacaaaacaatgctttgtgtagattctggagtaatcgaacctctggtattgttaaagcctcgtgaagagtggaaaggcagacaagaactatccatcgtctcatcaagttactgcagcggacagcttgatccacgcaaggttctttacggagatatctgatccttttgggggtttatcttacttagtaaaaaaaacaataataagccatgatctcattatcactaccacccagaaacaactctctaagagtcttgtcttgaacttggagattttatccttttgacttgtgttttgagtgagttctgattgttgttgttacacagagaggtcacggtaatattttgtaacgttgactctgtgtttgaccgtcaaacagtgtatcggtttctttgttcggaaatttagtagaatatatcatcaatttagt

SEQ ID NO: 37477 - protein, 306 aa, Arabidopsis thaliana
  peptide (1)..(306): Ceres Seq. ID no. 12738817
MPLNLGNDGDGSSRIILTEPRGSTAEVLLFGGQVISWKNERREELLYMSSKAQYKPPKAIRGGIPVCFPQFGNFGGLERHGFARNKFWSHDEDPSPLPPANKQSSVDLILKSTEDDLKTWPHSFELRIRISISPGKLTLIPRVRNIDSKAFSFMFALRNYLYVSDISEVRVEGLETLDYLDNLIGKERFTEQADAITFDGEVDRVYLNTPTKIAVIDHERKRTIELRKEGMPNAVVWNPWDKKAKTIADMGDEDYKTMLCVDSGVIEPLVLLKPREEWKGRQELSIVSSSYCSGQLDPRKVLYGDI

SEQ ID NO: 37478 - protein, 259 aa, Arabidopsis thaliana
  peptide (1)..(259): Ceres Seq. ID no. 12738818
MSSKAQYKPPKAIRGGIPVCFPQFGNFGGLERHGFARNKFWSHDEDPSPLPPANKQSSVDLILKSTEDDLKTWPHSFELRIRISISPGKLTLIPRVRNIDSKAFSFMFALRNYLYVSDISEVRVEGLETLDYLDNLIGKERFTEQADAITFDGEVDRVYLNTPTKIAVIDHERKRTIELRKEGMPNAVVWNPWDKKAKTIADMGDEDYKTMLCVDSGVIEPLVLLKPREEWKGRQELSIVSSSYCSGQLDPRKVLYGDI

SEQ ID NO: 37479 - protein, 153 aa, Arabidopsis thaliana
  peptide (1)..(153): Ceres Seq. ID no. 12738819
MFALRNYLYVSDISEVRVEGLETLDYLDNLIGKERFTEQADAITFDGEVDRVYLNTPTKIAVIDHERKRTIELRKEGMPNAVVWNPWDKKAKTIADMGDEDYKTMLCVDSGVIEPLVLLKPREEWKGRQELSIVSSSYCSGQLDPRKVLYGDI

SEQ ID NO: 37480 - DNA, 775 bp, Arabidopsis thaliana
  misc_feature (1)..(775): Ceres Seq. ID no. 12348623
  misc_feature (1)..(775): Ortholog of  Ceres SEQ ID NO 15171235 as cited in SEQ ID NO 52469
  misc_feature (1)..(775): Ortholog of  Ceres SEQ ID NO 15172705 as cited in SEQ ID NO 56069
  misc_feature (1)..(775): Ortholog of  Ceres SEQ ID NO 13654980 as cited in SEQ ID NO 63094
  misc_feature (1)..(775): Ortholog of  Ceres SEQ ID NO 15178542 as cited in SEQ ID NO 65410
  misc_feature (1)..(775): Ortholog of  Ceres SEQ ID NO 15174852 as cited in SEQ ID NO 67166
  misc_feature (1)..(775): Ortholog of  Ceres SEQ ID NO 12589584 as cited in SEQ ID NO 0
  misc_feature (1)..(775): Ortholog of  Ceres SEQ ID NO 12635657 as cited in SEQ ID NO 0
  misc_feature (1)..(775): Ortholog of  Ceres SEQ ID NO 12635879 as cited in SEQ ID NO 0
  misc_feature (1)..(775): Ortholog of  Ceres SEQ ID NO 13599649 as cited in SEQ ID NO 0
  misc_feature (1)..(775): Ortholog of  Ceres SEQ ID NO 14309205 as cited in SEQ ID NO 0
  misc_feature (1)..(775): Ortholog of  Ceres SEQ ID NO 15177492 as cited in SEQ ID NO 0
attcatcatccacaacaaacctcttcttcagtctgatagagatctcacgtttcaaacaacaagaatggcgttccctaaggtatacttcgacatgaccatcgacggccagcccgcgggaaggatcgtgatggagctgtacaccgataagactcccaggactgccgagaatttcagagctctctgcaccggagagaaaggtgttggcggtaccggaaaaccccttcacttcaagggatctaagtttcaccgtgtgatccctaacttcatgtgccagggaggagatttcaccgccgggaacggaacaggcggtgagtcgatctacgggagcaagttcgaggacgagaatttcgagaggaagcacaccggaccggggatcctgtcgatggcgaacgccggtgcaaacacgaacggatctcagttcttcatctgcaccgtgaagaccgattggcttgatgggaagcacgtggtgtttgggcaggtcgtggaaggcttagacgtggtaaaggccatcgagaaggttggatcatcatctggaaagccgacgaagcctgtggttgttgccgattgtggtcagctctcttaggatcttcctatcatcatccttaatttagcatcatcgtcgtcattgtggtgtctctttatgcttttgcttttgttatggagtctttttaaaatttgtagtcataagtttggtgtgtgttctcatgggaacatatataaacttgcccctttaatattaactaccagaaataaggaatgagcactcttttatcat

SEQ ID NO: 37481 - protein, 193 aa, Arabidopsis thaliana
  peptide (1)..(193): Ceres Seq. ID no. 12348624
FIIHNKPLLQSDRDLTFQTTRMAFPKVYFDMTIDGQPAGRIVMELYTDKTPRTAENFRALCTGEKGVGGTGKPLHFKGSKFHRVIPNFMCQGGDFTAGNGTGGESIYGSKFEDENFERKHTGPGILSMANAGANTNGSQFFICTVKTDWLDGKHVVFGQVVEGLDVVKAIEKVGSSSGKPTKPVVVADCGQLS

SEQ ID NO: 37482 - protein, 172 aa, Arabidopsis thaliana
  peptide (1)..(172): Ceres Seq. ID no. 12348625
MAFPKVYFDMTIDGQPAGRIVMELYTDKTPRTAENFRALCTGEKGVGGTGKPLHFKGSKFHRVIPNFMCQGGDFTAGNGTGGESIYGSKFEDENFERKHTGPGILSMANAGANTNGSQFFICTVKTDWLDGKHVVFGQVVEGLDVVKAIEKVGSSSGKPTKPVVVADCGQLS

SEQ ID NO: 37483 - protein, 163 aa, Arabidopsis thaliana
  peptide (1)..(163): Ceres Seq. ID no. 12348626
MTIDGQPAGRIVMELYTDKTPRTAENFRALCTGEKGVGGTGKPLHFKGSKFHRVIPNFMCQGGDFTAGNGTGGESIYGSKFEDENFERKHTGPGILSMANAGANTNGSQFFICTVKTDWLDGKHVVFGQVVEGLDVVKAIEKVGSSSGKPTKPVVVADCGQLS

SEQ ID NO: 37484 - DNA, 1949 bp, Arabidopsis thaliana
  misc_feature (1)..(1949): Ceres Seq. ID no. 12335366
  misc_feature (1)..(1949): Ortholog of  Ceres SEQ ID NO 13594037 as cited in SEQ ID NO 55666
  misc_feature (1)..(1949): Ortholog of  Ceres SEQ ID NO 13657707 as cited in SEQ ID NO 66407
aatcttagtaataatcccaaaaaccagaaaaaaaggagctttgcttttgtaggaattaatggattcagtgaactccttcaaaggatatggaaaagtagacgaagctcaagatttagcattgaagaaaaagacaagaaaacgtctacttctactatccatctccgtcgtagttctcatcgccgtaataatcgccgccgtagtcgccaccgtcgttcacaagaacaaaaacgagtcaacaccgagtccacctcccgagttaacaccatccacttcactcaaagccatttgcagtgtaactcgtttccctgaatcttgcatttcaagtatctcaaagcttccatcttccaacacaacagatccagagactctattcaagctctcattgaaagtaatcatcgatgagcttgattcgatttccgatttaccggagaagctatcgaaagagactgaagacgaaagaatcaaatctgcgttaagggtttgtggagatctgatcgaagatgctttagatcgactcaacgacactgtttccgccattgatgacgaagaaaagaagaaaactttgtcatcttccaaaatcgaagatctcaaaacttggctaagcgcaacggtaacagatcacgagacgtgtttcgattcgttagatgagttgaaacagaacaaaacagagtatgcgaactcgacgattactcagaatctgaaatcggcaatgagtagatcaacggagttcacaagtaacagtcttgcaatagtatcgaagattctttctgcgttaagcgatttggggattccgatacacaggagaagaagactgatgagtcatcatcatcagcaaagtgtggattttgagaaatgggcacgacggaggttgttgcaaacggcaggtttaaagcctgatgtgacggtggcgggtgatggaaccggtgatgtgttgactgtgaatgaagcggtggctaaggtgccgaagaagagtttgaagatgtttgtgatttatgtgaagagtggaacttatgttgagaatgttgtgatggataagagtaaatggaacgttatgatttacggtgacggcaaagggaagaccattatttccggcagcaagaacttcgtcgacgggactcctacttacgaaacggcgacgtttgctatacaaggcaaaggatttataatgaaggatattggaatcataaacaccgcgggagcagcaaaacaccaagctgtggcattccgatcaggctctgatttctcagtctattaccaatgctcattcgatggttttcaagacactctttaccctcactccaaccgccaattctaccgtgactgcgacgttactgggacaatcgacttcattttcggaagtgctgcggtcgttttccaaggctgcaaaatcatgcctcgccagcctctttctaaccaattcaacaccataaccgctcagggcaaaaaagatccgaaccaaagctcggggatgtcgattcaacgatgcactatctccgcaaacggcaatgtgattgctcccacgtatcttggccggccgtggaaggagttttccacgacggttattatggagacggtgattggagcagtggttcgaccgtccgggtggatgtcatgggtttctggagttgatccaccagcaagtattgtctacggagagtataagaatacgggcccgggttcagatgtaacgcagagagttaaatgggctggatataaaccggttatgtcggacgccgaggctgcgaagtttacagtggctacgcttttacacggagctgattggataccggcaacaggagtgatcaatcagctatcttaatatagtgacaatacaattggattcgtagcttgtttttgaaaacatccggttgtgatctactttatatttgtttgacacttatgcatgatctgtaattttttccaacatagttgtattttgtgtatcccct

SEQ ID NO: 37485 - protein, 586 aa, Arabidopsis thaliana
  peptide (1)..(586): Ceres Seq. ID no. 12335367
MDSVNSFKGYGKVDEAQDLALKKKTRKRLLLLSISVVVLIAVIIAAVVATVVHKNKNESTPSPPPELTPSTSLKAICSVTRFPESCISSISKLPSSNTTDPETLFKLSLKVIIDELDSISDLPEKLSKETEDERIKSALRVCGDLIEDALDRLNDTVSAIDDEEKKKTLSSSKIEDLKTWLSATVTDHETCFDSLDELKQNKTEYANSTITQNLKSAMSRSTEFTSNSLAIVSKILSALSDLGIPIHRRRRLMSHHHQQSVDFEKWARRRLLQTAGLKPDVTVAGDGTGDVLTVNEAVAKVPKKSLKMFVIYVKSGTYVENVVMDKSKWNVMIYGDGKGKTIISGSKNFVDGTPTYETATFAIQGKGFIMKDIGIINTAGAAKHQAVAFRSGSDFSVYYQCSFDGFQDTLYPHSNRQFYRDCDVTGTIDFIFGSAAVVFQGCKIMPRQPLSNQFNTITAQGKKDPNQSSGMSIQRCTISANGNVIAPTYLGRPWKEFSTTVIMETVIGAVVRPSGWMSWVSGVDPPASIVYGEYKNTGPGSDVTQRVKWAGYKPVMSDAEAAKFTVATLLHGADWIPATGVINQLS

SEQ ID NO: 37486 - protein, 369 aa, Arabidopsis thaliana
  peptide (1)..(369): Ceres Seq. ID no. 12335368
MSRSTEFTSNSLAIVSKILSALSDLGIPIHRRRRLMSHHHQQSVDFEKWARRRLLQTAGLKPDVTVAGDGTGDVLTVNEAVAKVPKKSLKMFVIYVKSGTYVENVVMDKSKWNVMIYGDGKGKTIISGSKNFVDGTPTYETATFAIQGKGFIMKDIGIINTAGAAKHQAVAFRSGSDFSVYYQCSFDGFQDTLYPHSNRQFYRDCDVTGTIDFIFGSAAVVFQGCKIMPRQPLSNQFNTITAQGKKDPNQSSGMSIQRCTISANGNVIAPTYLGRPWKEFSTTVIMETVIGAVVRPSGWMSWVSGVDPPASIVYGEYKNTGPGSDVTQRVKWAGYKPVMSDAEAAKFTVATLLHGADWIPATGVINQLS

SEQ ID NO: 37487 - protein, 334 aa, Arabidopsis thaliana
  peptide (1)..(334): Ceres Seq. ID no. 12335369
MSHHHQQSVDFEKWARRRLLQTAGLKPDVTVAGDGTGDVLTVNEAVAKVPKKSLKMFVIYVKSGTYVENVVMDKSKWNVMIYGDGKGKTIISGSKNFVDGTPTYETATFAIQGKGFIMKDIGIINTAGAAKHQAVAFRSGSDFSVYYQCSFDGFQDTLYPHSNRQFYRDCDVTGTIDFIFGSAAVVFQGCKIMPRQPLSNQFNTITAQGKKDPNQSSGMSIQRCTISANGNVIAPTYLGRPWKEFSTTVIMETVIGAVVRPSGWMSWVSGVDPPASIVYGEYKNTGPGSDVTQRVKWAGYKPVMSDAEAAKFTVATLLHGADWIPATGVINQLS

SEQ ID NO: 37488 - DNA, 1283 bp, Arabidopsis thaliana
  misc_feature (1)..(1283): Ceres Seq. ID no. 12335735
  misc_feature (1)..(1283): Ortholog of  Ceres SEQ ID NO 15173355 as cited in SEQ ID NO 61844
tacgtctctcacatgtcaaatccttacgatttcgatttctcctgaaaatctcaacaaaacccttaagaattttcgatttcgaattcccaattctcccggagttctgatgcagatcgccggagataagtaatctcgagtttactaatgccgcggcttccgtcgtctcgtcgcggtgtcgtgtggtttcgatggaagatactcatcactatctccaccgcattatgcatcctcgctctcttctgtatcaaccgtcagtctaattccactgcgacgacgacgacactgtcttcgtctctctccgtcgcgagatctcgtatccctctcgttaaatactccggcgatcgtcccaaactcgccttccttttcctcgctcgacgtgatttgccacttgattttctctgggacagattcttcaagagtgcagatcagaggaatttctcaatctatgtacattcaatacctggtttcgtattcgatgaatcatccacaagatcacatttcttctacaatcgtcaattgaagaatagcattgaggtagtttggggagaatcaagcatgattgcagcagaaagattgttgcttgcatctgctttggaagatccttctaatcaaagatttgttcttttgtctgatagctgtgttccgttatacgactttggttacatttacagatatctagtttcttcaccaaagagttttgtagacagcttccttgataaagataatcgctacactatgaaaatgtttcctgttatacggaaagagaaatggcgaaaaggatctcagtggatatcattgatcagaagccatgcaaaggtcattgttaatgatgatactgtgttccctgtttttcagaaattttgcaagcgatctctacctctggatcccaaaaagaattggctatatcttaaaaagaggcgacacaactgcatccctgatgaacactacgtgcaaactctactaacaatgcgtggcttggaaaatgaaatggaacggagaacagtgacatacaccacatggaacctatcagcaaaaaaagctgaagctaaatcttggcatcctctcactttcacatctgacaattccggaccagaggaaatagaaggaataaagaaaatcaaccatgtatattatgaatcggagtatcgaacagaatggtgcagatcgaattcaaaacccgtcccgtgctttctgtttgcgaggaagttcactagaggagccgcaatgcgtcttttgagtgaaggattaatagaatcctcaatagatacaacaaccttgtagat

SEQ ID NO: 37489 - protein, 378 aa, Arabidopsis thaliana
  peptide (1)..(378): Ceres Seq. ID no. 12335736
MPRLPSSRRGVVWFRWKILITISTALCILALFCINRQSNSTATTTTLSSSLSVARSRIPLVKYSGDRPKLAFLFLARRDLPLDFLWDRFFKSADQRNFSIYVHSIPGFVFDESSTRSHFFYNRQLKNSIEVVWGESSMIAAERLLLASALEDPSNQRFVLLSDSCVPLYDFGYIYRYLVSSPKSFVDSFLDKDNRYTMKMFPVIRKEKWRKGSQWISLIRSHAKVIVNDDTVFPVFQKFCKRSLPLDPKKNWLYLKKRRHNCIPDEHYVQTLLTMRGLENEMERRTVTYTTWNLSAKKAEAKSWHPLTFTSDNSGPEEIEGIKKINHVYYESEYRTEWCRSNSKPVPCFLFARKFTRGAAMRLLSEGLIESSIDTTTL

SEQ ID NO: 37490 - protein, 241 aa, Arabidopsis thaliana
  peptide (1)..(241): Ceres Seq. ID no. 12335737
MIAAERLLLASALEDPSNQRFVLLSDSCVPLYDFGYIYRYLVSSPKSFVDSFLDKDNRYTMKMFPVIRKEKWRKGSQWISLIRSHAKVIVNDDTVFPVFQKFCKRSLPLDPKKNWLYLKKRRHNCIPDEHYVQTLLTMRGLENEMERRTVTYTTWNLSAKKAEAKSWHPLTFTSDNSGPEEIEGIKKINHVYYESEYRTEWCRSNSKPVPCFLFARKFTRGAAMRLLSEGLIESSIDTTTL

SEQ ID NO: 37491 - DNA, 1303 bp, Arabidopsis thaliana
  misc_feature (1)..(1303): Ceres Seq. ID no. 12321886
  misc_feature (1)..(1303): Ortholog of  Ceres SEQ ID NO 14311934 as cited in SEQ ID NO 51605
agatccactcacacctcgtctcctaatctgtacggttcttatttcgaaagggtaaaaaccaaaagcgacgcaaagggcaaaatcggaaaaagtgttttatttatggccgccgttagtagttcgtcggagaccggagactgcggcgttacgggaaagagagatgagatcatgttgttcggagttagagtcgtggttgatccgatgagaaagtgtgtgagtttgaacaatctctctgattatgaaaagtcttctccggaggatgagatccctaagatagtcaccgccggagctggagatggtgaagataagaacgaaacggatgcgacggtgattgtcgctgacggttacgcctccgccaatgacgctgtccagatttcgtcttcttccgtcgggaggaaacgaggggttccatggacagagaacgagcataagaggttcttgattgggttgcagaaagtaggaaaaggagattggaaaggaatatcaagaaactttgtgaagagtaggactcctactcaagtagctagtcatgctcagaaatacttcctccgacgaaccaacctcaaccgtcgccgaagaagatctagcctttttgatatcactactgagacggttacagaaatggccatggagcaagatcctactcaggagaactcaccactacctgaaaccaacatcagctctggacagcaagcgatgcaagtttttactgacgtgccgacaaaaactgagaatgcaccagagacatttcatctcaacgatccatatctggttccagtaaccttccaagcaaagccaacattcaatctaaacacagatgctgctccactttctctcaacctttgtctggcatcctcatttaatcttaacgagcaacccaactcaagacactcggctttcacgatgatgccaagcttcagcgatggagatagcaatagcagcatcatcagagttgcttagagcttaaacccaaggggaaaaaaaaaacagaacaaaaacagaggaaggctatagagattgatggacaaactgtgtctagggtgcttcatcatctttgtttgtttgtaaaactcttgtcacacacactgttatgagtcattttctgctgtgtgtgttttgttttgtggtgatgtaagttaaaaacaagcgtgattctcatgtggcccatctcaatcaatggttggtgatttgtggggtttttaggcttttctattatcttatcttttggggataagataaaagcctaaaactgtatgtaactatgtatggttcttcgaatattttatcatttatctctaatgtc

SEQ ID NO: 37492 - protein, 319 aa, Arabidopsis thaliana
  peptide (1)..(319): Ceres Seq. ID no. 12321887
RSTHTSSPNLYGSYFERVKTKSDAKGKIGKSVLFMAAVSSSSETGDCGVTGKRDEIMLFGVRVVVDPMRKCVSLNNLSDYEKSSPEDEIPKIVTAGAGDGEDKNETDATVIVADGYASANDAVQISSSSVGRKRGVPWTENEHKRFLIGLQKVGKGDWKGISRNFVKSRTPTQVASHAQKYFLRRTNLNRRRRRSSLFDITTETVTEMAMEQDPTQENSPLPETNISSGQQAMQVFTDVPTKTENAPETFHLNDPYLVPVTFQAKPTFNLNTDAAPLSLNLCLASSFNLNEQPNSRHSAFTMMPSFSDGDSNSSIIRVA

SEQ ID NO: 37493 - protein, 285 aa, Arabidopsis thaliana
  peptide (1)..(285): Ceres Seq. ID no. 12321888
MAAVSSSSETGDCGVTGKRDEIMLFGVRVVVDPMRKCVSLNNLSDYEKSSPEDEIPKIVTAGAGDGEDKNETDATVIVADGYASANDAVQISSSSVGRKRGVPWTENEHKRFLIGLQKVGKGDWKGISRNFVKSRTPTQVASHAQKYFLRRTNLNRRRRRSSLFDITTETVTEMAMEQDPTQENSPLPETNISSGQQAMQVFTDVPTKTENAPETFHLNDPYLVPVTFQAKPTFNLNTDAAPLSLNLCLASSFNLNEQPNSRHSAFTMMPSFSDGDSNSSIIRVA

SEQ ID NO: 37494 - protein, 263 aa, Arabidopsis thaliana
  peptide (1)..(263): Ceres Seq. ID no. 12321889
MLFGVRVVVDPMRKCVSLNNLSDYEKSSPEDEIPKIVTAGAGDGEDKNETDATVIVADGYASANDAVQISSSSVGRKRGVPWTENEHKRFLIGLQKVGKGDWKGISRNFVKSRTPTQVASHAQKYFLRRTNLNRRRRRSSLFDITTETVTEMAMEQDPTQENSPLPETNISSGQQAMQVFTDVPTKTENAPETFHLNDPYLVPVTFQAKPTFNLNTDAAPLSLNLCLASSFNLNEQPNSRHSAFTMMPSFSDGDSNSSIIRVA

SEQ ID NO: 37495 - DNA, 1398 bp, Arabidopsis thaliana
  misc_feature (1)..(1398): Ceres Seq. ID no. 13499706
  misc_feature (1)..(1398): Ortholog of  Ceres SEQ ID NO 13581579 as cited in SEQ ID NO 58361
  misc_feature (1)..(1398): Ortholog of  Ceres SEQ ID NO 13596474 as cited in SEQ ID NO 62169
  misc_feature (1)..(1398): Ortholog of  Ceres SEQ ID NO 13598714 as cited in SEQ ID NO 62656
  misc_feature (1)..(1398): Ortholog of  Ceres SEQ ID NO 13596969 as cited in SEQ ID NO 63375
  misc_feature (1)..(1398): Ortholog of  Ceres SEQ ID NO 13597519 as cited in SEQ ID NO 64759
  misc_feature (1)..(1398): Ortholog of  Ceres SEQ ID NO 13597870 as cited in SEQ ID NO 64982
  misc_feature (1)..(1398): Ortholog of  Ceres SEQ ID NO 13595926 as cited in SEQ ID NO 67778
  misc_feature (1)..(1398): Ortholog of  Ceres SEQ ID NO 13596362 as cited in SEQ ID NO 67877
  misc_feature (1)..(1398): Ortholog of  Ceres SEQ ID NO 12567001 as cited in SEQ ID NO 0
tccccccgctcttcttagtaacctcctaagccatgaaatagtcgcaaaggccctttcttcgtcttcgtttctaattgctttcgacgacaatcgatcgtagagaagtctacctcgtagacatctctctcacaaatccaattcaattaccattgtttgttattatctgatgtcgaatatgcaattctctcgtggttttaatccctttgttatcctcttctgtctcgccgtggttgcaccaattatatcggctgatgtcgctatcttgagaacggactattaccaaaaaacatgtcctgatttccacaaaattgtgcgtgaagccgttacaaccaaacaagtccaacaaccaacaactgcggccgggaccctccgtctctttttccatgattgtttccttgaaggttgtgatgcatctgtcttgatcgcgaccaactcgttcaacaaagcggaacgcgatgatgatctcaatgattccctcccgggagatgcttttgacatcgtcacccgcatcaagacagctctcgagttgtcttgtcctggtgtagtatcatgcgcggatattctagcgcaggctacacgtgaccttgtcacaatggtaggaggaccttactttgacgtaaagcttggtcgtaaagacggattcgaatccaaagctcataaagtcagaggaaatgtcccaatggcaaaccagactgttcctgacatccacgggatattcaagaaaaacggttttagtcttcgcgagatggtagcattaagcggggctcacaccattggattctctcactgcaaagagttttccgacagactctacggatcccgtgctgataaagaaatcaacccgcgattcgcagccgctctcaaagatctttgcaaaaaccacaccgtggatgatacaatcgccgcgtttaacgacgtgatgactccaggaaagttcgacaacatgtacttcaagaacctaaagcgagggctagggcttttagcgtctgaccacatccttattaaagacaacagcaccaagccgtttgtggatctatacgcaactaacgagacagcattctttgaggatttcgctcgtgcgatggagaaacttggcacggtcggcgtcaagggcgataaagatggagaagtgagacgtaggtgcgaccacttcaacaatctcaacgtttaagaagaaaaagaaaacacaaaaccatataaatataatattatttctgttttatttgcggaggagttgaggagaagaaaggtttggttggtatatatgtttaataactacctattataagcaagatcttgtaacaattcaagttgggatgtttaatttttccatgaaaattcaaactgttgtattgaaagtatatagataaaataacatattatatatcgaacaattgt

SEQ ID NO: 37496 - protein, 334 aa, Arabidopsis thaliana
  peptide (1)..(334): Ceres Seq. ID no. 13499707
MSNMQFSRGFNPFVILFCLAVVAPIISADVAILRTDYYQKTCPDFHKIVREAVTTKQVQQPTTAAGTLRLFFHDCFLEGCDASVLIATNSFNKAERDDDLNDSLPGDAFDIVTRIKTALELSCPGVVSCADILAQATRDLVTMVGGPYFDVKLGRKDGFESKAHKVRGNVPMANQTVPDIHGIFKKNGFSLREMVALSGAHTIGFSHCKEFSDRLYGSRADKEINPRFAAALKDLCKNHTVDDTIAAFNDVMTPGKFDNMYFKNLKRGLGLLASDHILIKDNSTKPFVDLYATNETAFFEDFARAMEKLGTVGVKGDKDGEVRRRCDHFNNLNV

SEQ ID NO: 37497 - protein, 331 aa, Arabidopsis thaliana
  peptide (1)..(331): Ceres Seq. ID no. 13499708
MQFSRGFNPFVILFCLAVVAPIISADVAILRTDYYQKTCPDFHKIVREAVTTKQVQQPTTAAGTLRLFFHDCFLEGCDASVLIATNSFNKAERDDDLNDSLPGDAFDIVTRIKTALELSCPGVVSCADILAQATRDLVTMVGGPYFDVKLGRKDGFESKAHKVRGNVPMANQTVPDIHGIFKKNGFSLREMVALSGAHTIGFSHCKEFSDRLYGSRADKEINPRFAAALKDLCKNHTVDDTIAAFNDVMTPGKFDNMYFKNLKRGLGLLASDHILIKDNSTKPFVDLYATNETAFFEDFARAMEKLGTVGVKGDKDGEVRRRCDHFNNLNV

SEQ ID NO: 37498 - protein, 192 aa, Arabidopsis thaliana
  peptide (1)..(192): Ceres Seq. ID no. 13499709
MVGGPYFDVKLGRKDGFESKAHKVRGNVPMANQTVPDIHGIFKKNGFSLREMVALSGAHTIGFSHCKEFSDRLYGSRADKEINPRFAAALKDLCKNHTVDDTIAAFNDVMTPGKFDNMYFKNLKRGLGLLASDHILIKDNSTKPFVDLYATNETAFFEDFARAMEKLGTVGVKGDKDGEVRRRCDHFNNLNV

SEQ ID NO: 37499 - DNA, 880 bp, Arabidopsis thaliana
  misc_feature (1)..(880): Ceres Seq. ID no. 12326782
  misc_feature (1)..(880): Ortholog of  Ceres SEQ ID NO 12592832 as cited in SEQ ID NO 62031
aactctgtcttagttttgagcagcagcagctatggttaacgtcagattctaccgaaactatgggaaaacattcaagaagccacgtcgtccttatgagaaagagcgtcttgatgctgagctaaagcttgttggagaatacggtcttcgttgtaagagagagctttggagagttcaatatacacttagcagaatccgtaatgctgcaagagaactcttaactcttgatgagaagaatcctcgtcgtatctttgaaggtgaagctcttcttaggagaatgaatcgatatggtcttcttgatgaaacccagaacaagcttgattatgttcttgctttgactgttgagaatttccttgaacgtcgtctccaaactattgtctttaagtctggtatggctaagtccattcaccacgctcgtgtccttatccgacaaaggcatatcagggttgggaggcaacttgtgaacattccatcgtttatggtgagagtagagtcacagaagcacgtagacttttctctaaccagtccattcggtggtggtcgacctggaagagtgaagagaaggaacgagagagccggagctaagaaagcttctggtggtgatggagatgaggatgatgaagagtgaaaagtaccaaacccttaaaaaaatccctaagatgaaacactacctagctaaacctatcaaaatgcttttagttgataatagtttggttttgttacctctttttgtgagatatttggtttgttagtgttcttaattagtagtagaagtgaagtgttttctttttttttttataatgttttggaccttgtgttcttgaaccatgtcactttcgaatcttgcttcttataagatactagtagttgatattattatgtc

SEQ ID NO: 37500 - protein, 197 aa, Arabidopsis thaliana [sequence omitted]

SEQ ID NO: 37501 - protein, 116 aa, Arabidopsis thaliana
  peptide (1)..(116): Ceres Seq. ID no. 12326784
MNRYGLLDETQNKLDYVLALTVENFLERRLQTIVFKSGMAKSIHHARVLIRQRHIRVGRQLVNIPSFMVRVESQKHVDFSLTSPFGGGRPGRVKRRNERAGAKKASGGDGDEDDEE

SEQ ID NO: 37502 - DNA, 1246 bp, Arabidopsis thaliana
  misc_feature (1)..(1246): Ceres Seq. ID no. 12488424
  misc_feature (1)..(1246): Ortholog of  Ceres SEQ ID NO 13645959 as cited in SEQ ID NO 20706
ctgggtcctccgcaatttgagaatcggagatatctcaagtttcgcaaagtctcgtggatttgatcttcgtctccttgatcgatggattcaccttgagcaatcgttgatcgagcttcgaagatgtcgaatcactccagagatgagcctagtactgccccgaagacagatcaatggtatgatcttgtccttggttcctctgccaaagatgactcctcccataaattctgcactttgcgatatgaatttaagccggcttcaatcgataagaacaggtcaggatcaatgcacaagaagaaggataacagagtttcagttgagtttcagaataaccaaccaggtaaacccaaggtgacatttgaaggtagtagtgaggattacaaagaaagcgatgcggtgttgtttttcgatggggagaagtttcgtttagagaggttgcatcgggctgttacgcagctgcgacatgttaggacacctggtgaatctgctgcggcttctcaatctgcggtgcctgtggagcatcggttatctcctgttggtcgtgctgctaaatctccacaagtcaatagaagtttgcttcctgatgtgcctgttgaggtggaaagaatcgaaattgggaagccagagaactcagctgaacctgccaacactggaaacgtgcctgcaacctcaccagtcgaggacaagaacgatgatggagatgagcatcaagagatcgatctggttgaaatatttggctcatttacaccagagaacgacaatgcagagaaagagaacgctgatggtggagaatatgtagaaagcttaaataaacagcttagcatgacggaagaagagattgcagatgtagatgacgatagcggcggtgaaggagaaaaaggtcttaacgcagcagaagcacttagagcacaagtgaacgcagaggtgcaaaagagtcaaacctcaagctcaagcagtagcagtggaagtagcagcggaagtgacagtgatggtcgtagcaaaagcgtaagcagcggaagtggcagcggcggccaaagcagtagtggaagcagtagccgtggaagtggaggaagtgacgatgaagatgaagtcaactccgtataacaaccagctcccaacaactttgtcaaacaatatttccatatttgagacactttgtctgaataatttggttgaagaatccaaaagggtaaaaatttatgttttactacgaaagtagtaaatacaaatgatataaagatccagttac

SEQ ID NO: 37503 - protein, 326 aa, Arabidopsis thaliana
  peptide (1)..(326): Ceres Seq. ID no. 12488425
MSNHSRDEPSTAPKTDQWYDLVLGSSAKDDSSHKFCTLRYEFKPASIDKNRSGSMHKKKDNRVSVEFQNNQPGKPKVTFEGSSEDYKESDAVLFFDGEKFRLERLHRAVTQLRHVRTPGESAAASQSAVPVEHRLSPVGRAAKSPQVNRSLLPDVPVEVERIEIGKPENSAEPANTGNVPATSPVEDKNDDGDEHQEIDLVEIFGSFTPENDNAEKENADGGEYVESLNKQLSMTEEEIADVDDDSGGEGEKGLNAAEALRAQVNAEVQKSQTSSSSSSSGSSSGSDSDGRSKSVSSGSGSGGQSSSGSSSRGSGGSDDEDEVNSV

SEQ ID NO: 37504 - protein, 272 aa, Arabidopsis thaliana
  peptide (1)..(272): Ceres Seq. ID no. 12488426
MHKKKDNRVSVEFQNNQPGKPKVTFEGSSEDYKESDAVLFFDGEKFRLERLHRAVTQLRHVRTPGESAAASQSAVPVEHRLSPVGRAAKSPQVNRSLLPDVPVEVERIEIGKPENSAEPANTGNVPATSPVEDKNDDGDEHQEIDLVEIFGSFTPENDNAEKENADGGEYVESLNKQLSMTEEEIADVDDDSGGEGEKGLNAAEALRAQVNAEVQKSQTSSSSSSSGSSSGSDSDGRSKSVSSGSGSGGQSSSGSSSRGSGGSDDEDEVNSV

SEQ ID NO: 37505 - DNA, 1142 bp, Arabidopsis thaliana
  misc_feature (1)..(1142): Ceres Seq. ID no. 13492937
  misc_feature (1)..(1142): Ortholog of  Ceres SEQ ID NO 14305854 as cited in SEQ ID NO 52331
  misc_feature (1)..(1142): Ortholog of  Ceres SEQ ID NO 15168588 as cited in SEQ ID NO 60235
aagcacttcactctctaatttccttctctctatctctcaccatattcgcgattaaaaactctcaacttttctctcaaatttctgatcctttgatccaacagttagaagaagattcatctgatcatggccctcgaagcgatgaacactccaacttcttctttcaccagaatcgaaacgaaagaagatttgatgaacgacgccgttttcattgagccgtggcttaaacgcaaacgctccaaacgtcagcgttctcacagcccttcttcgtcttcttcctcaccgcctcgatctcgacccaaatcccagaatcaagatcttacggaagaagagtatctcgctctttgtctcctcatgctcgctaaagatcaaccgtcgcaaacgcgatttcatcaacagtcgcaatcgttaacgccgccgccagaatcaaagaaccttccgtacaagtgtaacgtctgtgaaaaagcgtttccttcctatcaggctttaggcggtcacaaagcaagtcaccgaatcaaaccaccaaccgtaatctcaacaactgccgatgattcaacagctccgaccatctccatcgtcgccggagaaaaacatccgattgctgcctccggaaagatccacgagtgttcaatctgtcataaagtgtttccgacgggtcaagctttaggcggtcacaaacgttgtcactacgaaggcaacctcggcggcggaggaggaggaggaagcaaatcaatcagtcacagtggaagcgtgtcgagcacggtatcggaagaaaggagccaccgtggattcatcgatctaaacctaccggcgttacctgaactcagccttcatcacaatccaatcgtcgacgaagagatcttgagtccgttgaccggtaaaaaaccgcttttgttgaccgatcacgaccaagtcatcaagaaagaagatttatctttaaaaatctaatactcgactattaattcttgtgttttcattttcatttttttagttacaaatttttaattgttctgatttggattgaatattggtatattgttagggattgatacaaaaatttgatgattgattaagtcagaatttctttttaattatggtaactaatctcttgatcagtccactctgtataaatattgcgtggcatt

SEQ ID NO: 37506 - protein, 273 aa, Arabidopsis thaliana
  peptide (1)..(273): Ceres Seq. ID no. 13492938
MALEAMNTPTSSFTRIETKEDLMNDAVFIEPWLKRKRSKRQRSHSPSSSSSSPPRSRPKSQNQDLTEEEYLALCLLMLAKDQPSQTRFHQQSQSLTPPPESKNLPYKCNVCEKAFPSYQALGGHKASHRIKPPTVISTTADDSTAPTISIVAGEKHPIAASGKIHECSICHKVFPTGQALGGHKRCHYEGNLGGGGGGGSKSISHSGSVSSTVSEERSHRGFIDLNLPALPELSLHHNPIVDEEILSPLTGKKPLLLTDHDQVIKKEDLSLKI

SEQ ID NO: 37507 - protein, 268 aa, Arabidopsis thaliana
  peptide (1)..(268): Ceres Seq. ID no. 13492939
MNTPTSSFTRIETKEDLMNDAVFIEPWLKRKRSKRQRSHSPSSSSSSPPRSRPKSQNQDLTEEEYLALCLLMLAKDQPSQTRFHQQSQSLTPPPESKNLPYKCNVCEKAFPSYQALGGHKASHRIKPPTVISTTADDSTAPTISIVAGEKHPIAASGKIHECSICHKVFPTGQALGGHKRCHYEGNLGGGGGGGSKSISHSGSVSSTVSEERSHRGFIDLNLPALPELSLHHNPIVDEEILSPLTGKKPLLLTDHDQVIKKEDLSLKI

SEQ ID NO: 37508 - protein, 251 aa, Arabidopsis thaliana
  peptide (1)..(251): Ceres Seq. ID no. 13492940
MNDAVFIEPWLKRKRSKRQRSHSPSSSSSSPPRSRPKSQNQDLTEEEYLALCLLMLAKDQPSQTRFHQQSQSLTPPPESKNLPYKCNVCEKAFPSYQALGGHKASHRIKPPTVISTTADDSTAPTISIVAGEKHPIAASGKIHECSICHKVFPTGQALGGHKRCHYEGNLGGGGGGGSKSISHSGSVSSTVSEERSHRGFIDLNLPALPELSLHHNPIVDEEILSPLTGKKPLLLTDHDQVIKKEDLSLKI

SEQ ID NO: 37509 - DNA, 1126 bp, Arabidopsis thaliana
  misc_feature (1)..(1126): Ceres Seq. ID no. 12396454
  misc_feature (1)..(1126): Ortholog of  Ceres SEQ ID NO 13596474 as cited in SEQ ID NO 62169
  misc_feature (1)..(1126): Ortholog of  Ceres SEQ ID NO 13596969 as cited in SEQ ID NO 63375
  misc_feature (1)..(1126): Ortholog of  Ceres SEQ ID NO 13597519 as cited in SEQ ID NO 64759
  misc_feature (1)..(1126): Ortholog of  Ceres SEQ ID NO 13597870 as cited in SEQ ID NO 64982
acattgcaacactttctacaaaaacaagatgaagattgcaaagttttctgttctactcttgcttttatttattttccccgtggcattagcgcagctgaaatttaagttttacagtgaatcgtgccctaatgcagagactatcgtagaaaacctggttcgccagcagtttgctcgtgacccttcaatcacggccgccttgactcgtatgcattttcacgactgttttgtccagggctgcgcacgcttctctcctcatagacccaacgacgtctcaactatcggaaaaaaacgccggcccaaactttagcgtgagagggttcgagctgatcgacgagatcaagacggcactcgaagctcaatgtccctctacggtctcgtgctccgatatagtcacgctcgccacacgtgacgccgtgttcttaggtggaggaccaagctacgtggtccccaccggacgtcgcgatggctttgtgtcgaatcctgaagacgccaatgagatcctccctccaccattcatatccgtcgaaggcatgttaagttttttcggcaacaaaggaatgaatgtttttgattccgtagctcttttgggggcgcacacggttgggatcgcgtcttgtggtaattttgtggaccgggtcacgaactttcaaggaaccggactgcccgacccatccatggaccccactttggctggcaggctaaggaacacatgtgcggttccaggcggcttcgcggcactggaccagtcgatgccagtaacgccggtctcattcgacaacttgttctttggtcagatcagagagaggaaaggaattttgcttattgaccaactgatcgcaagcgacccggccacttctggtgttgtacttcagtatgcgtccaacaacgaactattcaaacgtcagttcgcaatcgcaatggtgaagatgggagccgttgacgtgcttaccggttcagctggtgagatcaggacgaattgtagagcattcaactaaagctttataacaagtttctatatctgattattgattgtttttcccttaatttccgcttctgatgatgaattgtgaatggtgattgtttgcctatatatgtatgtacgtatatctttaaaataaggtttggc

SEQ ID NO: 37510 - protein, 154 aa, Arabidopsis thaliana
  peptide (1)..(154): Ceres Seq. ID no. 12396455
MLSFFGNKGMNVFDSVALLGAHTVGIASCGNFVDRVTNFQGTGLPDPSMDPTLAGRLRNTCAVPGGFAALDQSMPVTPVSFDNLFFGQIRERKGILLIDQLIASDPATSGVVLQYASNNELFKRQFAIAMVKMGAVDVLTGSAGEIRTNCRAFN

SEQ ID NO: 37511 - protein, 145 aa, Arabidopsis thaliana
  peptide (1)..(145): Ceres Seq. ID no. 12396456
MNVFDSVALLGAHTVGIASCGNFVDRVTNFQGTGLPDPSMDPTLAGRLRNTCAVPGGFAALDQSMPVTPVSFDNLFFGQIRERKGILLIDQLIASDPATSGVVLQYASNNELFKRQFAIAMVKMGAVDVLTGSAGEIRTNCRAFN

SEQ ID NO: 37512 - protein, 106 aa, Arabidopsis thaliana
  peptide (1)..(106): Ceres Seq. ID no. 12396457
MDPTLAGRLRNTCAVPGGFAALDQSMPVTPVSFDNLFFGQIRERKGILLIDQLIASDPATSGVVLQYASNNELFKRQFAIAMVKMGAVDVLTGSAGEIRTNCRAFN

SEQ ID NO: 37513 - DNA, 1881 bp, Arabidopsis thaliana
  misc_feature (1)..(1881): Ceres Seq. ID no. 12330296
  misc_feature (1)..(1881): Ortholog of  Ceres SEQ ID NO 15227110 as cited in SEQ ID NO 59659
aatcgccagtgtttacgaaagttcttgaaatttgaagagatctcacagatgagaagtgctataggaagaagattctcaaaccctaatggcttcaccattgcatccttagtcaaacaaactccatttctcacccaatccacatctcatttctcctcttcctccgactcctccggccgtggtcgtggacgcggttccggtgaagatggaggatttcccgccgctggaagaggacaattcggtgtaaatcgtgaaccggtggttcctggacgtgaaccgtcatctgccggaggttatggtcatggtcgtggtcgtccgatccaatctgattcgatttctcctgcgtttacgtcatttgtcaaatcagattctcctagtattggccgtggaagaggatccgttggatcagacaccgtttcacctttcgctgctgaacctcctcgccaatcgccgcctccaccgcagcaacaacagtctcaatcgcagcaacagcgttcacaaccacaacagcagcagccgcgttcgcaaccacagcagcagcctaatgatgaatctcagggaagtcctgtatttgtgaagctgcaggagatgcaggacgcaacttcgtctccaccaccaccagagtctaaacctggtcaagctgatccacctgataacatattcaatgcattaggaaacgaattttcacatcctagtggagcaggtcgaggaaagcctcttgtggaatctgctccaatccgacaagaagataaccgccaaattcgacgccctccgcctccaccgcagcagcagagagtacaacctcagcagaagcgggctccaacggtcaaagatggaactcctaagccgcaattgagtgcggaagaggctggaagaagagcaaggagtgagctttcgcgtggtgaagctgaaggaagcagtgtgggaggaagaggagggagagggagagggagaggaagaggagcaagagggagaggcagaggaagaggtggtgatggatggagagatgataagaaagaagaagaaggtgaacaagaggctatgcgtatatttgctggagattcagctgatggagagaagtttgctgagaaaatgggacctgaattgatgaaaacgcttgcggaaggttttgaggaaatttgcgaaaaggcgttgccttctactactcacgatgccattatagatgcttatgataccaatctcatgattgagtgtgagcctgaatacattatgccagactttggatcaaatcctgacattgatgagaaaccaccaatgtctctgcgtgagtgccttgagaaggtgaagcctttcatagtggcttacgaaggaatcaaggatcaagaagaatgggaggaagcaattaatgaagcgatgacacaggctccccttatgaaagagattgttgatcactacagtggtcctgatcgtgtaactgctaagaaacagaacgaggaactcgatagaattgctacaacgcttcccgcaagtgcacctgattccgtgaaacgatttgcagatcgtgcagctcttactcttaagagtaatccaggttggggatttgataagaaataccagttcatggacaagctcgttttagaggtgtcacaaagctacaaatagagaactcaggtttcaaacttcttaaaaaacttcatcgccggttgagtttatagatcgtactctagatcttgcctctacttaaaacggtacccatttcttttgaactagtactcaaaatttgggcgttagctttttcgtcatacgttttgagggtttccgtaataacggcattgttctttcgatctttgttactgaggagattgtattgtatcccttttcatcaatgggttattaagggtttaagcctgtttttggatgtgt

SEQ ID NO: 37514 - protein, 539 aa, Arabidopsis thaliana
  peptide (1)..(539): Ceres Seq. ID no. 12330297
NRQCLRKFLKFEEISQMRSAIGRRFSNPNGFTIASLVKQTPFLTQSTSHFSSSSDSSGRGRGRGSGEDGGFPAAGRGQFGVNREPVVPGREPSSAGGYGHGRGRPIQSDSISPAFTSFVKSDSPSIGRGRGSVGSDTVSPFAAEPPRQSPPPPQQQQSQSQQQRSQPQQQQPRSQPQQQPNDESQGSPVFVKLQEMQDATSSPPPPESKPGQADPPDNIFNALGNEFSHPSGAGRGKPLVESAPIRQEDNRQIRRPPPPPQQQRVQPQQKRAPTVKDGTPKPQLSAEEAGRRARSELSRGEAEGSSVGGRGGRGRGRGRGARGRGRGRGGDGWRDDKKEEEGEQEAMRIFAGDSADGEKFAEKMGPELMKTLAEGFEEICEKALPSTTHDAIIDAYDTNLMIECEPEYIMPDFGSNPDIDEKPPMSLRECLEKVKPFIVAYEGIKDQEEWEEAINEAMTQAPLMKEIVDHYSGPDRVTAKKQNEELDRIATTLPASAPDSVKRFADRAALTLKSNPGWGFDKKYQFMDKLVLEVSQSYK

SEQ ID NO: 37515 - protein, 523 aa, Arabidopsis thaliana
  peptide (1)..(523): Ceres Seq. ID no. 12330298
MRSAIGRRFSNPNGFTIASLVKQTPFLTQSTSHFSSSSDSSGRGRGRGSGEDGGFPAAGRGQFGVNREPVVPGREPSSAGGYGHGRGRPIQSDSISPAFTSFVKSDSPSIGRGRGSVGSDTVSPFAAEPPRQSPPPPQQQQSQSQQQRSQPQQQQPRSQPQQQPNDESQGSPVFVKLQEMQDATSSPPPPESKPGQADPPDNIFNALGNEFSHPSGAGRGKPLVESAPIRQEDNRQIRRPPPPPQQQRVQPQQKRAPTVKDGTPKPQLSAEEAGRRARSELSRGEAEGSSVGGRGGRGRGRGRGARGRGRGRGGDGWRDDKKEEEGEQEAMRIFAGDSADGEKFAEKMGPELMKTLAEGFEEICEKALPSTTHDAIIDAYDTNLMIECEPEYIMPDFGSNPDIDEKPPMSLRECLEKVKPFIVAYEGIKDQEEWEEAINEAMTQAPLMKEIVDHYSGPDRVTAKKQNEELDRIATTLPASAPDSVKRFADRAALTLKSNPGWGFDKKYQFMDKLVLEVSQSYK

SEQ ID NO: 37516 - protein, 344 aa, Arabidopsis thaliana
  peptide (1)..(344): Ceres Seq. ID no. 12330299
MQDATSSPPPPESKPGQADPPDNIFNALGNEFSHPSGAGRGKPLVESAPIRQEDNRQIRRPPPPPQQQRVQPQQKRAPTVKDGTPKPQLSAEEAGRRARSELSRGEAEGSSVGGRGGRGRGRGRGARGRGRGRGGDGWRDDKKEEEGEQEAMRIFAGDSADGEKFAEKMGPELMKTLAEGFEEICEKALPSTTHDAIIDAYDTNLMIECEPEYIMPDFGSNPDIDEKPPMSLRECLEKVKPFIVAYEGIKDQEEWEEAINEAMTQAPLMKEIVDHYSGPDRVTAKKQNEELDRIATTLPASAPDSVKRFADRAALTLKSNPGWGFDKKYQFMDKLVLEVSQSYK

SEQ ID NO: 37517 - DNA, 1603 bp, Arabidopsis thaliana
  misc_feature (1)..(1603): Ceres Seq. ID no. 12335449
  misc_feature (1)..(1603): Ortholog of  Ceres SEQ ID NO 13597260 as cited in SEQ ID NO 63885
acttctactgtatcaagaagctccgttttgcttagccatagtgcgtctagggtttggttggtgggaagaaggttccgatcatggcgtcggtgtcgtcgtcggatcaaggacctaagacagaagcaggatgtagcggcggaggaggaggagagagctcggagacagtggcggcgagtgatcagatgttgttgtatagaggttttaagaaggcgaagaaggagagaggttgtacagctaaggagcgtattagtaaaatgcctccgtgcactgctggaaaaaggagttccatataccggggagtcaccagacatagatggacaggtcgttatgaagctcacctttgggataagagtacctggaaccaaaaccagaacaagaagggaaaacaagtttatctaggagcatatgatgatgaagaggctgctgctagagcttacgaccttgctgccttaaaatattggggtcctgggacacttataaattttccggtgactgattataccagggatttagaagaaatgcaaaatctctcaagggaagaataccttgcatctttacgtagaaaaagcagcggtttctctaggggaatagcgaaatatcgtggacttcaaagccgatgggacgcatcagccagtcgtatgcctggacctgaatacttcagtaacattcattacggggcaggtgatgatcgtggaacagaaggtgactttctaggtagcttttgtctggaaagaaagattgatctaacaggatacataaagtggtggggagccaacaagaaccgtcaaccagaatcttcatcaaaagcatcagaggatgcaaacgtcgaagatgctggtactgagcttaaaacactggaacacacatcccatgcaacagaaccatacaaggcgccaaaccttggcgtccttcgtggaactcagagaaaagaaaaagaaatatcatcaccatcaagctcttctgctttaagcatcttgtctcagtcgcctgccttcaagagcctagaggagaaagtgttgaagatccaagaaagctgcaataatgaaaacgatgagaatgcaaaccgtaacatcatcaatatggagaagtataacggcaaggcaatagagaaaccagttgtgagtcatggagttgctttaggcggtgctgctgctttgtctcttcagaaaagcatgtacccacttacctctctcttaacggctccattgctcaccaactacaatacattggatcctcttgcagaccctattctctggacaccatttcttccttcaggatcctctcttacttcagaggtgacaaagacagagaccagctgttccacgtacagctacctcccacaagagaaatgagccgttccctttagactttatgtatgccagattctccttttttgagatgaattcgtcgacttgacatctctttgtctcttttatggagaaaaagttgggaaaagtgtgacaatggtctgaagcaggaatgtacaggttttgttagtggttgtgtttttttttttttttccagtgtggaatatagaatcatgatattttgtgtaaaacagaaaaaagttatcattatagtatagaagtttgctcttaatatc

SEQ ID NO: 37518 - protein, 423 aa, Arabidopsis thaliana
  peptide (1)..(423): Ceres Seq. ID no. 12335450
MASVSSSDQGPKTEAGCSGGGGGESSETVAASDQMLLYRGFKKAKKERGCTAKERISKMPPCTAGKRSSIYRGVTRHRWTGRYEAHLWDKSTWNQNQNKKGKQVYLGAYDDEEAAARAYDLAALKYWGPGTLINFPVTDYTRDLEEMQNLSREEYLASLRRKSSGFSRGIAKYRGLQSRWDASASRMPGPEYFSNIHYGAGDDRGTEGDFLGSFCLERKIDLTGYIKWWGANKNRQPESSSKASEDANVEDAGTELKTLEHTSHATEPYKAPNLGVLRGTQRKEKEISSPSSSSALSILSQSPAFKSLEEKVLKIQESCNNENDENANRNIINMEKYNGKAIEKPVVSHGVALGGAAALSLQKSMYPLTSLLTAPLLTNYNTLDPLADPILWTPFLPSGSSLTSEVTKTETSCSTYSYLPQEK

SEQ ID NO: 37519 - protein, 389 aa, Arabidopsis thaliana
  peptide (1)..(389): Ceres Seq. ID no. 12335451
MLLYRGFKKAKKERGCTAKERISKMPPCTAGKRSSIYRGVTRHRWTGRYEAHLWDKSTWNQNQNKKGKQVYLGAYDDEEAAARAYDLAALKYWGPGTLINFPVTDYTRDLEEMQNLSREEYLASLRRKSSGFSRGIAKYRGLQSRWDASASRMPGPEYFSNIHYGAGDDRGTEGDFLGSFCLERKIDLTGYIKWWGANKNRQPESSSKASEDANVEDAGTELKTLEHTSHATEPYKAPNLGVLRGTQRKEKEISSPSSSSALSILSQSPAFKSLEEKVLKIQESCNNENDENANRNIINMEKYNGKAIEKPVVSHGVALGGAAALSLQKSMYPLTSLLTAPLLTNYNTLDPLADPILWTPFLPSGSSLTSEVTKTETSCSTYSYLPQEK

SEQ ID NO: 37520 - protein, 365 aa, Arabidopsis thaliana
  peptide (1)..(365): Ceres Seq. ID no. 12335452
MPPCTAGKRSSIYRGVTRHRWTGRYEAHLWDKSTWNQNQNKKGKQVYLGAYDDEEAAARAYDLAALKYWGPGTLINFPVTDYTRDLEEMQNLSREEYLASLRRKSSGFSRGIAKYRGLQSRWDASASRMPGPEYFSNIHYGAGDDRGTEGDFLGSFCLERKIDLTGYIKWWGANKNRQPESSSKASEDANVEDAGTELKTLEHTSHATEPYKAPNLGVLRGTQRKEKEISSPSSSSALSILSQSPAFKSLEEKVLKIQESCNNENDENANRNIINMEKYNGKAIEKPVVSHGVALGGAAALSLQKSMYPLTSLLTAPLLTNYNTLDPLADPILWTPFLPSGSSLTSEVTKTETSCSTYSYLPQEK

SEQ ID NO: 37521 - DNA, 850 bp, Arabidopsis thaliana
  misc_feature (1)..(850): Ceres Seq. ID no. 12738172
  misc_feature (1)..(850): Ortholog of  Ceres SEQ ID NO 14302243 as cited in SEQ ID NO 64663
cgtatttggtcgtgcttgtgcaaatagggttgcagagataagcaaaccaggggagaaacagaaacctcttgagaaggatgcgggtgagaagactattgcatggctggacaggttgagaaactcaaacgggtctctacctacttcaactatcagattgaacatgcagaggattatgcagaacaacgcagctgtgttccgcacgcaagaaacattggaagaaggttgtcagttgattgacaaggcctgggaaagttttggggacgtccaggtgaaagatcggagtatgatatggaactcggatttgatagagacattggaactggagaaccttttgataaacgcatccataacaatgcattcagcagaagcacgaaaggaaagcagaggagcacatgctcgggaagacttcacgaaaagagaggatggagaatggatgaagcatacattgggatattgggaagatgagaaagtgagattggattataggcctgttcacatggacactctcgacgatgagatcgacactttccctcccaaagctcgtgtctattgatcgagcccatgtttttattttatctgttatcggaataataataataatcaggaaccccccaaaaaaagggaattaggagaagaagacggagttatgagctgatggagcacaaaggactgttctgaaactgggtttacgttttacaccagaaacgatgaaaataaattgatagaagaggaaaaaacactacaattcttattttctttatcagttcctgaaattgttacattctttgttacctgttaattacgccttggtgatattcatttttttttttaaatcaaaatgttcgaactc

SEQ ID NO: 37522 - protein, 183 aa, Arabidopsis thaliana
  peptide (1)..(183): Ceres Seq. ID no. 12738173
VFGRACANRVAEISKPGEKQKPLEKDAGEKTIAWLDRLRNSNGSLPTSTIRLNMQRIMQNNAAVFRTQETLEEGCQLIDKAWESFGDVQVKDRSMIWNSDLIETLELENLLINASITMHSAEARKESRGAHAREDFTKREDGEWMKHTLGYWEDEKVRLDYRPVHMDTLDDEIDTFPPKARVY

SEQ ID NO: 37523 - protein, 130 aa, Arabidopsis thaliana
  peptide (1)..(130): Ceres Seq. ID no. 12738174
MQRIMQNNAAVFRTQETLEEGCQLIDKAWESFGDVQVKDRSMIWNSDLIETLELENLLINASITMHSAEARKESRGAHAREDFTKREDGEWMKHTLGYWEDEKVRLDYRPVHMDTLDDEIDTFPPKARVY

SEQ ID NO: 37524 - protein, 126 aa, Arabidopsis thaliana
  peptide (1)..(126): Ceres Seq. ID no. 12738175
MQNNAAVFRTQETLEEGCQLIDKAWESFGDVQVKDRSMIWNSDLIETLELENLLINASITMHSAEARKESRGAHAREDFTKREDGEWMKHTLGYWEDEKVRLDYRPVHMDTLDDEIDTFPPKARVY

SEQ ID NO: 37525 - DNA, 787 bp, Arabidopsis thaliana
  misc_feature (1)..(787): Ceres Seq. ID no. 12739078
  misc_feature (1)..(787): Ortholog of  Ceres SEQ ID NO 14315788 as cited in SEQ ID NO 20749
cgtaagatgatgtcagatctggaggaaagggagcgttctgctttttctcctaatccttccgctagagcttatgatgaagaagagagaatcgctaggaagcttaaggaggagatagataggatacgtgcaagacatgcgaagaagaaaagtggtttccaaactccagagagtaatgtagatgaaaagagaaaagaagaaagaagtggtgctggagctagtgttcaactcgataaagagaaaatgttgaaggtttcttgggaaaaaagtggtgaagggtatacagctggaaggctaagagaagtgttttctgagtttggtgaggttgaagatgttgttattaggagtaccaagaagaaatgttctgctcttattgtaatggctacaaaggatggagctgttgcagcgacgaggacattgtgtggcaatctttctaatccattgttggttgtacctcttcagaaagcagcccaaaccgattttctgacggctaagaaatctgcagaagcagaaccgcagagtaacatagtaggtgccggtcttcaagcttatgaagatgccgtcatgcaaagactgctacaggcggctatggaccagaaaaagcgaggggtttaagccacatgatcaagaacaaagctccttcaagaccaaagtgataaagaataaagctctgcttcatgattaagaattaagctccttatacattgtttgtgtacatccaatctcatatcagttgttgttgtagaatttaaaattctaactcttctcgaaaaaaaaaatgcttcgtacc

SEQ ID NO: 37526 - protein, 203 aa, Arabidopsis thaliana
  peptide (1)..(203): Ceres Seq. ID no. 12739079
RKMMSDLEERERSAFSPNPSARAYDEEERIARKLKEEIDRIRARHAKKKSGFQTPESNVDEKRKEERSGAGASVQLDKEKMLKVSWEKSGEGYTAGRLREVFSEFGEVEDVVIRSTKKKCSALIVMATKDGAVAATRTLCGNLSNPLLVVPLQKAAQTDFLTAKKSAEAEPQSNIVGAGLQAYEDAVMQRLLQAAMDQKKRGV

SEQ ID NO: 37527 - protein, 201 aa, Arabidopsis thaliana
  peptide (1)..(201): Ceres Seq. ID no. 12739080
MMSDLEERERSAFSPNPSARAYDEEERIARKLKEEIDRIRARHAKKKSGFQTPESNVDEKRKEERSGAGASVQLDKEKMLKVSWEKSGEGYTAGRLREVFSEFGEVEDVVIRSTKKKCSALIVMATKDGAVAATRTLCGNLSNPLLVVPLQKAAQTDFLTAKKSAEAEPQSNIVGAGLQAYEDAVMQRLLQAAMDQKKRGV

SEQ ID NO: 37528 - protein, 200 aa, Arabidopsis thaliana
  peptide (1)..(200): Ceres Seq. ID no. 12739081
MSDLEERERSAFSPNPSARAYDEEERIARKLKEEIDRIRARHAKKKSGFQTPESNVDEKRKEERSGAGASVQLDKEKMLKVSWEKSGEGYTAGRLREVFSEFGEVEDVVIRSTKKKCSALIVMATKDGAVAATRTLCGNLSNPLLVVPLQKAAQTDFLTAKKSAEAEPQSNIVGAGLQAYEDAVMQRLLQAAMDQKKRGV

SEQ ID NO: 37529 - DNA, 1260 bp, Arabidopsis thaliana
  misc_feature (1)..(1260): Ceres Seq. ID no. 12335589
  misc_feature (1)..(1260): Ortholog of  Ceres SEQ ID NO 14303446 as cited in SEQ ID NO 59378
atctccactctgctaaatccgacgagagacgacgatgccaagcggtggtaacggaacaagtaacggagtcgctaacgcgaattccaccggtaacgcaggaacaagcggaaacgttccgatatataagccataccgtcacctgaaaaccctagaaggtcacacggcggcgatctcttgcgtcaaattctccaacgacggcaatcttctcgcttccgcttccgtagacaaaaccatgatcctctggtcagcaacaaactactctctcattcatcgttacgaaggtcactctagtggtatctccgatctagcttggtcttctgattcgcattacacttgctctgcttctgatgattgtacgcttcgaatctgggacgctagatctccttatgaatgtcttaaggttcttagaggtcatacgaatttcgtcttctgtgttaatttcaatcctccttcgaatttgattgtgtctggatcgttcgatgagacgattcgtatttgggaggttaagactgggaagtgtgttaggatgattaaagctcattcgatgccgatttcgagtgtgcattttaatagagatggatcgttgattgtttcggcaagtcatgatggttcttgtaagatttgggatgctaaagaaggaacttgcttgaagactcttattgatgataaatctccggctgtttctttcgctaagttctcgcccaatggcaagtttatactcgttgctactctcgatagtactctcaagctgtcgaactatgcgacggggaagtttttgaaagtgtatacaggacatactaacaaagtgttctgtatcacatcggcgttttctgtaacgaatgggaagtacattgtgagtggatcagaggataattgtgtgtatctgtgggatcttcaagcgagaaatatactgcagagactagaaggccacacagacgcagtgatctcagtgagttgccatccggttcagaacgagatatcttcatcgggtaatcatttggataaaactatcaggatttggaaacaggatgcttgaaaaacatgaatatatgtgtatggaattaatggtaacaacaatagttgagattgtgaatctgtttgatctgaacacactattttgatgtttcggaatgggatgaaatctcttgcaagttggtgttaatatttatgacagagatatcatctatgttctctccccaatatgtggatgatacttactttaaaactaaagctttttaataagagctactaaactaaaag

SEQ ID NO: 37530 - protein, 333 aa, Arabidopsis thaliana
  peptide (1)..(333): Ceres Seq. ID no. 12335590
MPSGGNGTSNGVANANSTGNAGTSGNVPIYKPYRHLKTLEGHTAAISCVKFSNDGNLLASASVDKTMILWSATNYSLIHRYEGHSSGISDLAWSSDSHYTCSASDDCTLRIWDARSPYECLKVLRGHTNFVFCVNFNPPSNLIVSGSFDETIRIWEVKTGKCVRMIKAHSMPISSVHFNRDGSLIVSASHDGSCKIWDAKEGTCLKTLIDDKSPAVSFAKFSPNGKFILVATLDSTLKLSNYATGKFLKVYTGHTNKVFCITSAFSVTNGKYIVSGSEDNCVYLWDLQARNILQRLEGHTDAVISVSCHPVQNEISSSGNHLDKTIRIWKQDA

SEQ ID NO: 37531 - protein, 267 aa, Arabidopsis thaliana
  peptide (1)..(267): Ceres Seq. ID no. 12335591
MILWSATNYSLIHRYEGHSSGISDLAWSSDSHYTCSASDDCTLRIWDARSPYECLKVLRGHTNFVFCVNFNPPSNLIVSGSFDETIRIWEVKTGKCVRMIKAHSMPISSVHFNRDGSLIVSASHDGSCKIWDAKEGTCLKTLIDDKSPAVSFAKFSPNGKFILVATLDSTLKLSNYATGKFLKVYTGHTNKVFCITSAFSVTNGKYIVSGSEDNCVYLWDLQARNILQRLEGHTDAVISVSCHPVQNEISSSGNHLDKTIRIWKQDA

SEQ ID NO: 37532 - protein, 169 aa, Arabidopsis thaliana
  peptide (1)..(169): Ceres Seq. ID no. 12335592
MIKAHSMPISSVHFNRDGSLIVSASHDGSCKIWDAKEGTCLKTLIDDKSPAVSFAKFSPNGKFILVATLDSTLKLSNYATGKFLKVYTGHTNKVFCITSAFSVTNGKYIVSGSEDNCVYLWDLQARNILQRLEGHTDAVISVSCHPVQNEISSSGNHLDKTIRIWKQDA

SEQ ID NO: 37533 - DNA, 799 bp, Arabidopsis thaliana
  misc_feature (1)..(799): Ceres Seq. ID no. 12338769
  misc_feature (1)..(799): Ortholog of  Ceres SEQ ID NO 13599545 as cited in SEQ ID NO 0
attacaagaatcattcgattctcttctatcatcatcttcttcttctccatcaaaattcaccaaaacatggaagctctaattcaccacttcactctcctctccgatcaagctcttgtcgacaaaacattcgacccttcaagaatcgaggacctcatgcgtctctttgaagtcgattcatacaaagcttgggcagctctcgaatccgaacagcaacaagaactcgaagaagctgaagaatctctccgtgaagctgaacttgaacttgatcggtaacattttcgtcttttcttgtatggaattttcatagatctggagagatctgatttttatggtttcttcagggatatggagtgggggatggaggagtataggcggacgttggaggagatggagaggatggaggcggcggactgaaagagcttgaggagaaagcggagactgctcggagaacggggaatttaatggagaaagcggcgacaattgccgcgaaacgacatattgcggcggcgatgggatcagccgccgcgtctatgagatcagcttggaagactgcagctggaaataaggttcatccatcttgatcgatgatgatgatgatgaatatgataagatgacgatgattgtgaaagtattggtccccatgttataggattagtaggtcaagaacattttaatgaataattatttcctttgataaacatatgggttactacttactattgccgaagaattatgaattataggtagtttctagtttatgtatctgtaatttgtaatcaatatatatttatgggattat

SEQ ID NO: 37534 - protein, 90 aa, Arabidopsis thaliana
  peptide (1)..(90): Ceres Seq. ID no. 12338770
ITRIIRFSSIIIFFFSIKIHQNMEALIHHFTLLSDQALVDKTFDPSRIEDLMRLFEVDSYKAWAALESEQQQELEEAEESLREAELELDR

SEQ ID NO: 37535 - protein, 68 aa, Arabidopsis thaliana
  peptide (1)..(68): Ceres Seq. ID no. 12338771
MEALIHHFTLLSDQALVDKTFDPSRIEDLMRLFEVDSYKAWAALESEQQQELEEAEESLREAELELDR

SEQ ID NO: 37536 - protein, 54 aa, Arabidopsis thaliana
  peptide (1)..(54): Ceres Seq. ID no. 12338772
YKNHSILFYHHLLLLHQNSPKHGSSNSPLHSPLRSSSCRQNIRPFKNRGPHASL

SEQ ID NO: 37537 - DNA, 1805 bp, Arabidopsis thaliana
  misc_feature (1)..(1805): Ceres Seq. ID no. 12558715
  misc_feature (1)..(1805): Ortholog of  Ceres SEQ ID NO 12372734 as cited in SEQ ID NO 1206
  misc_feature (1)..(1805): Ortholog of  Ceres SEQ ID NO 15176423 as cited in SEQ ID NO 53228
  misc_feature (1)..(1805): Ortholog of  Ceres SEQ ID NO 13584160 as cited in SEQ ID NO 63677
attcccacacagagaggtacaacaagactcgtcgctcttcgctttttcttctctctttctttctcttgccagtagtgtgatcttacgaagcttttagtagagaaaaagcatatacgctttgtctttcttaatcgactgataagtccttaggatcagatggaacaaatgggtggctactcaaaacaacaaggtccatttttagtttgattaagggatttggatctgagcttacttcatcaactttgtcggaatatacatttgctttgtgtggatttggaagttgtccctgaatggcgtccgaggatttgaatattgttgcggaatcaaagaaaggggaagagaatgttattgttgataattccaaggacatgaatagacctgagaatcttgacttatctactgagaaaactgatactgccaatgagaatggtccaaaagatgaagcttctaagctggtaaaggaagcagacctccctgagtctggtacttcagtgaagagtaaaacagctaaggataataaacctgttaagagaaagtcagggacgttttctcggagcccgagattcatgtctcagagctcttcatttccaactaaaggagcttatactgatattactagaaagagcattgatgccacaacatcaaagactagtcttaaacccgtcgttgctggtggatccaaaccaaaagccactccatcttcaagcagcggtgtttccgcaaagcgcaccagtttagtatctgcgcctctcaaaaagcaaactatgcctgtgaaaaccatttctaaggatgcagcttcaggccctacttccaaattaggagatgaaggttctaaatccatcaaagaagaaactgcggggaaggatgtcgaggaggctggatcaaccaccgctgtggtggcagataaagtatctaacccgttgaaagctgaaatggcaagcaaggacgacgaagacactcgttcaactaccacttcaacttctacacctcgtgggcggagaagcagtgttggatcggcatctggattttcgttcaggttggaggaacgggctgaaaaacggaaggagttttatatgaaactagaagagaagatccatgcaaaggaagtagagaagaccaatttgcaggcgaaatcaaaggagagccaggaagaagagatcaaaaggttgaggaagagcttgacgttcaaggctggtcccatgcccagtttctacaaagaacccccacctaaggttgaattgaagaagataccaactactcgtcctaagtctccaaagctaggacgcagaaagagtagcagtgatgcaacaggaggtgaagccgctcctcgcgtgacaaaaccaaaagactcatcatcatctacagtgaagaaaccaataacaaagtctcagccaaagcttgaaactcaagagaaatcagtgaaggccaaagaaaagaaaaagaaagtgaagaaagaagaagcagagaagagaggagaagaagagaaggctactgccgtggctgcgaaacctgaagagcagaaaccaaactccaataacatccaagtgaaggctgagataatggcgagtgaggttgtagtgggaggctgaagcaaagagagcattcagcagcgatgtctaatgtctgcttctttttttctttcttaaagcattaatgtgaatagagttgttgcattgcgtctacttttttaagagtttatacttcattccttcagtttattttttggaaaattaagcctcgattgcttcttaagatggtctcaaatgtgttgaactcaaatatgtatcacgagcatagatatgtgt

SEQ ID NO: 37538 - protein, 432 aa, Arabidopsis thaliana
  peptide (1)..(432): Ceres Seq. ID no. 12558716
MASEDLNIVAESKKGEENVIVDNSKDMNRPENLDLSTEKTDTANENGPKDEASKLVKEADLPESGTSVKSKTAKDNKPVKRKSGTFSRSPRFMSQSSSFPTKGAYTDITRKSIDATTSKTSLKPVVAGGSKPKATPSSSSGVSAKRTSLVSAPLKKQTMPVKTISKDAASGPTSKLGDEGSKSIKEETAGKDVEEAGSTTAVVADKVSNPLKAEMASKDDEDTRSTTTSTSTPRGRRSSVGSASGFSFRLEERAEKRKEFYMKLEEKIHAKEVEKTNLQAKSKESQEEEIKRLRKSLTFKAGPMPSFYKEPPPKVELKKIPTTRPKSPKLGRRKSSSDATGGEAAPRVTKPKDSSSSTVKKPITKSQPKLETQEKSVKAKEKKKKVKKEEAEKRGEEEKATAVAAKPEEQKPNSNNIQVKAEIMASEVVVGG

SEQ ID NO: 37539 - protein, 406 aa, Arabidopsis thaliana
  peptide (1)..(406): Ceres Seq. ID no. 12558717
MNRPENLDLSTEKTDTANENGPKDEASKLVKEADLPESGTSVKSKTAKDNKPVKRKSGTFSRSPRFMSQSSSFPTKGAYTDITRKSIDATTSKTSLKPVVAGGSKPKATPSSSSGVSAKRTSLVSAPLKKQTMPVKTISKDAASGPTSKLGDEGSKSIKEETAGKDVEEAGSTTAVVADKVSNPLKAEMASKDDEDTRSTTTSTSTPRGRRSSVGSASGFSFRLEERAEKRKEFYMKLEEKIHAKEVEKTNLQAKSKESQEEEIKRLRKSLTFKAGPMPSFYKEPPPKVELKKIPTTRPKSPKLGRRKSSSDATGGEAAPRVTKPKDSSSSTVKKPITKSQPKLETQEKSVKAKEKKKKVKKEEAEKRGEEEKATAVAAKPEEQKPNSNNIQVKAEIMASEVVVGG

SEQ ID NO: 37540 - protein, 340 aa, Arabidopsis thaliana
  peptide (1)..(340): Ceres Seq. ID no. 12558718
MSQSSSFPTKGAYTDITRKSIDATTSKTSLKPVVAGGSKPKATPSSSSGVSAKRTSLVSAPLKKQTMPVKTISKDAASGPTSKLGDEGSKSIKEETAGKDVEEAGSTTAVVADKVSNPLKAEMASKDDEDTRSTTTSTSTPRGRRSSVGSASGFSFRLEERAEKRKEFYMKLEEKIHAKEVEKTNLQAKSKESQEEEIKRLRKSLTFKAGPMPSFYKEPPPKVELKKIPTTRPKSPKLGRRKSSSDATGGEAAPRVTKPKDSSSSTVKKPITKSQPKLETQEKSVKAKEKKKKVKKEEAEKRGEEEKATAVAAKPEEQKPNSNNIQVKAEIMASEVVVGG

SEQ ID NO: 37541 - DNA, 1198 bp, Arabidopsis thaliana
  misc_feature (1)..(1198): Ceres Seq. ID no. 12338161
  misc_feature (1)..(1198): Ortholog of  Ceres SEQ ID NO 15177994 as cited in SEQ ID NO 55641
  misc_feature (1)..(1198): Ortholog of  Ceres SEQ ID NO 13595454 as cited in SEQ ID NO 56502
tttcaggcttggtgatctctgggattgttatgatgagatgagtgcgtatggctttggcacacaggttgatttaaacaatggcgaaaccgttatgcagtactacgtcccgtacctatccgctatccaaatccacactaacaaacccgccttgctttccaggaaccagaatgaggtggctgaatctgagagtagcgagggttggagcgatagtgagagtgaaaagttgttgtcaaggtcaatgagcaatgattcaagcaaaacatgggatgctgtctctgaagattcggttttcgatccggatggttcaccgttgctgaaagatagacttggtaaccttgactttaagtacattgaaagagatcctccgcacaagcggattcccttaaccgacaagataaacgtattggtggagaaatatccgggactcatgaccttaaggagtgtcgacatgtctcctgcaagttcgatggctgttgcgtggtacccgatataccacatcccaacctgcaggaacgagaaagatttgacgacaggcttcctaacttatcatactctatcttcgtcttttcaagataatgtggtggaaggagatcaaagcaacaacaatgaagaaacagagttttgtgaagattccgtaataaacaagagaatgccattgcctccgtttggtgtaacaacttacaaaatgcaaggagatctttgggggaagacggggtttgaccaggaccggttgctttatcttcaaagcgctgcggattcatggctgaaacagctcaatgttgatcaccatgactataacttcttccttaactcgagcttctaaagatcaatcgggtcgttcgtatgtttatccttctccaaaccttaaacaaaaaaaaaagacctcataaccctttttctttgttgttttcaagctccttttgtttctctgtgttttttgttctttttgtttttgtctggctcgttgtgttgttttaggtagcaaccgccatcgcggagttttttctccttttgcaagccaatcatggaagtttctaagaagaaaacagagcttttttttctttttttttaacggtgttgagaaaacaagaaagttgttttcttttcttgggtgagagatcatgtaaattgaccttgaacagaggactctgttttgtacttttctgtctaaaatatataaaaaaatctgtctttcttg

SEQ ID NO: 37542 - protein, 273 aa, Arabidopsis thaliana
  peptide (1)..(273): Ceres Seq. ID no. 12338162
FRLGDLWDCYDEMSAYGFGTQVDLNNGETVMQYYVPYLSAIQIHTNKPALLSRNQNEVAESESSEGWSDSESEKLLSRSMSNDSSKTWDAVSEDSVFDPDGSPLLKDRLGNLDFKYIERDPPHKRIPLTDKINVLVEKYPGLMTLRSVDMSPASSMAVAWYPIYHIPTCRNEKDLTTGFLTYHTLSSSFQDNVVEGDQSNNNEETEFCEDSVINKRMPLPPFGVTTYKMQGDLWGKTGFDQDRLLYLQSAADSWLKQLNVDHHDYNFFLNSSF

SEQ ID NO: 37543 - protein, 261 aa, Arabidopsis thaliana
  peptide (1)..(261): Ceres Seq. ID no. 12338163
MSAYGFGTQVDLNNGETVMQYYVPYLSAIQIHTNKPALLSRNQNEVAESESSEGWSDSESEKLLSRSMSNDSSKTWDAVSEDSVFDPDGSPLLKDRLGNLDFKYIERDPPHKRIPLTDKINVLVEKYPGLMTLRSVDMSPASSMAVAWYPIYHIPTCRNEKDLTTGFLTYHTLSSSFQDNVVEGDQSNNNEETEFCEDSVINKRMPLPPFGVTTYKMQGDLWGKTGFDQDRLLYLQSAADSWLKQLNVDHHDYNFFLNSSF

SEQ ID NO: 37544 - protein, 243 aa, Arabidopsis thaliana
  peptide (1)..(243): Ceres Seq. ID no. 12338164
MQYYVPYLSAIQIHTNKPALLSRNQNEVAESESSEGWSDSESEKLLSRSMSNDSSKTWDAVSEDSVFDPDGSPLLKDRLGNLDFKYIERDPPHKRIPLTDKINVLVEKYPGLMTLRSVDMSPASSMAVAWYPIYHIPTCRNEKDLTTGFLTYHTLSSSFQDNVVEGDQSNNNEETEFCEDSVINKRMPLPPFGVTTYKMQGDLWGKTGFDQDRLLYLQSAADSWLKQLNVDHHDYNFFLNSSF

SEQ ID NO: 37545 - DNA, 1176 bp, Arabidopsis thaliana
  misc_feature (1)..(1176): Ceres Seq. ID no. 13489416
  misc_feature (1)..(1176): Ortholog of  Ceres SEQ ID NO 15174842 as cited in SEQ ID NO 53054
  misc_feature (1)..(1176): Ortholog of  Ceres SEQ ID NO 14310917 as cited in SEQ ID NO 53231
  misc_feature (1)..(1176): Ortholog of  Ceres SEQ ID NO 15170037 as cited in SEQ ID NO 55447
  misc_feature (1)..(1176): Ortholog of  Ceres SEQ ID NO 12615466 as cited in SEQ ID NO 62761
  misc_feature (1)..(1176): Ortholog of  Ceres SEQ ID NO 13597295 as cited in SEQ ID NO 63743
  misc_feature (1)..(1176): Ortholog of  Ceres SEQ ID NO 12617090 as cited in SEQ ID NO 64005
  misc_feature (1)..(1176): Ortholog of  Ceres SEQ ID NO 13597439 as cited in SEQ ID NO 64081
  misc_feature (1)..(1176): Ortholog of  Ceres SEQ ID NO 13597233 as cited in SEQ ID NO 64370
  misc_feature (1)..(1176): Ortholog of  Ceres SEQ ID NO 13598327 as cited in SEQ ID NO 68040
atccaaagtccaaacacagcataaaagtagctctattgactttttttcttcctccaaactctttttacgtcaagcaatggaggatcttgatccaacctacatccaagcaccagagcatagatcagattcgaatttcatccctaaccaaccagaagaaatacccgtgattgatctctcgcgcctcgatgaccccgaagatgtccaaaacgttatctcagagatcggtgatgcttgtgaaaaatggggattttttcaggtgcttaatcatggtgtgccttctgacgcaaggcaacgtgtggagaagactgtgaagatgtttttcgatttgcctatggaagagaagataaaggtgaagagagacgatgtgaatcctgtagggtatcatgatggagaacacaccaagaacgttaaagattggaaagaagtgtttgatatttatttcaaagatccaatggtcattccttcaaccactgatcctgaagatgaaggcttaagacttgtttacaacaagtggcctcaatctccttctgatttcagggaagcatgtgaagtatatgcgagacacgctgaaaaattagcgttcaagctcttggaactgatttcgttaagcttaggcttgccaaaagagcgttttcatgactacttcaaagaacaaatgagttttttcaggataaatcgttatccaccatgtccaagacctgacctagctttaggtgttggtcaccacaaagatgccgacgttattagtctattggctcaagatgatgttggaggattacaagttagtcgtagatcggacggtgtttggtttccgattagacccgtccctaatgctcttgtcatcaatataggcaattgtatggagatatggacgaatgacaagtattggagtgctgaacatagagtggtggtgaacacaacaagagagagatactcgataccattcttcttgttgccttcacacgatgtggaagtgaagccattagaagaacttgtgagtcctgaaaaccctccaaaatacaaaggctataaatggggtaagttctacgtcagtaggaatagaagcgattttcgaaaactggaaatcgaaaacatccaaatcgatgacttcaaagttaaaacttaatatactatgtatcggcttttttttttgtttaccaagctatgatattaacc

SEQ ID NO: 37546 - protein, 374 aa, Arabidopsis thaliana
  peptide (1)..(374): Ceres Seq. ID no. 13489417
SKVQTQHKSSSIDFFSSSKLFLRQAMEDLDPTYIQAPEHRSDSNFIPNQPEEIPVIDLSRLDDPEDVQNVISEIGDACEKWGFFQVLNHGVPSDARQRVEKTVKMFFDLPMEEKIKVKRDDVNPVGYHDGEHTKNVKDWKEVFDIYFKDPMVIPSTTDPEDEGLRLVYNKWPQSPSDFREACEVYARHAEKLAFKLLELISLSLGLPKERFHDYFKEQMSFFRINRYPPCPRPDLALGVGHHKDADVISLLAQDDVGGLQVSRRSDGVWFPIRPVPNALVINIGNCMEIWTNDKYWSAEHRVVVNTTRERYSIPFFLLPSHDVEVKPLEELVSPENPPKYKGYKWGKFYVSRNRSDFRKLEIENIQIDDFKVKT

SEQ ID NO: 37547 - protein, 349 aa, Arabidopsis thaliana
  peptide (1)..(349): Ceres Seq. ID no. 13489418
MEDLDPTYIQAPEHRSDSNFIPNQPEEIPVIDLSRLDDPEDVQNVISEIGDACEKWGFFQVLNHGVPSDARQRVEKTVKMFFDLPMEEKIKVKRDDVNPVGYHDGEHTKNVKDWKEVFDIYFKDPMVIPSTTDPEDEGLRLVYNKWPQSPSDFREACEVYARHAEKLAFKLLELISLSLGLPKERFHDYFKEQMSFFRINRYPPCPRPDLALGVGHHKDADVISLLAQDDVGGLQVSRRSDGVWFPIRPVPNALVINIGNCMEIWTNDKYWSAEHRVVVNTTRERYSIPFFLLPSHDVEVKPLEELVSPENPPKYKGYKWGKFYVSRNRSDFRKLEIENIQIDDFKVKT

SEQ ID NO: 37548 - protein, 270 aa, Arabidopsis thaliana
  peptide (1)..(270): Ceres Seq. ID no. 13489419
MFFDLPMEEKIKVKRDDVNPVGYHDGEHTKNVKDWKEVFDIYFKDPMVIPSTTDPEDEGLRLVYNKWPQSPSDFREACEVYARHAEKLAFKLLELISLSLGLPKERFHDYFKEQMSFFRINRYPPCPRPDLALGVGHHKDADVISLLAQDDVGGLQVSRRSDGVWFPIRPVPNALVINIGNCMEIWTNDKYWSAEHRVVVNTTRERYSIPFFLLPSHDVEVKPLEELVSPENPPKYKGYKWGKFYVSRNRSDFRKLEIENIQIDDFKVKT

SEQ ID NO: 37549 - DNA, 1819 bp, Arabidopsis thaliana
  misc_feature (1)..(1819): Ceres Seq. ID no. 12371294
  misc_feature (1)..(1819): Ortholog of  Ceres SEQ ID NO 15171446 as cited in SEQ ID NO 51590
acattctctccttcctcatcatcgttactctcgtgtttatctctccgacgtaaccatggatagcgatactctctcaggattattggaaaacgtcgccaaaaaattccccgatcgccgagctctctccgtttctggaaaattcaatctcactcacgcgcgtcttcacgatctaatcgaacgcgccgcttcacgccttgtctccgacgctggaatcaaacccggcgatgtcgttgctctcaccttccctaacaccgtcgagtttgttataatgtttttagcggtgataagagctagagccacggcggcgccgttgaacgcagcgtacacggcggaggaatttgagttttacctctccgattcagattcaaagctattgttaacctctaaagaaggaaacgcaccggctcaagaagcagcttcaaagctgaaaatctctcacgtcaccgctacgctgcttgacgctggctcggaccttgtactatccgttgcggattcagattccgtcgttgactcagcgacggaactcgttaatcacccggacgacggtgctctcttcctccacacttctggcactacgagccgtccaaagggtgtaccgcttacgcagctcaatctagcttcatccgtcaagaacattaaagctgtgtacaagcttactgagtctgattctacggtgattgttctccctctgttccatgttcatggattgttagctgggttgcttagctcgcttggagctggtgctgctgtaactcttccagctgctggtagattctcagcaacaacattttggccagatatgaagaagtataacgctacatggtatactgctgtgccgaccattcatcagatcatattggaccgccacgcgagccaccctgagacggaatatcctaaactccggttcatcaggagttgcagtgcttctttggctccggtgatattgtccaggcttgaggaagcgtttggagcaccggtgctcgaggcctatgcaatgacagaggcaacacatttgatgagctcaaaccccttaccagaggaaggtccacacaagcctgggtctgttgggaaaccggtaggtcaagaaatggcgatccttaatgagaaaggcgagatccaagagccaaataacaaaggagaggtttgtataagaggtccaaatgtgaccaagggttacaagaataacccagaagccaacaaggcaggtttcgagtttgggtggttccacactggtgatatcggttactttgataccgatgggtatttgcatctggtgggtcggatcaaagagcttattaaccgtggaggtgagaagatatctccaattgaagtggatgcagtactcttaacgcatcctgacgtttctcagggtgttgcattcggtgttcctgatgagaaatatggggaagagattaactgtgcggtgattccaagagaaggaactactgtaaccgaagaggacattaaagcgttttgtaagaagaatttggcagctttcaaggtgccaaagagagtgttcatcactgataacctccccaaaactgcctctggtaagattcagcgccgtatcgtcgcacaacatttccttgagaagccctgaaacacacagaaaacaccatcttgctcgaaaatcatcggtgatgagtcctagttttcacttttcacgcaaatggatatgcgttctctattattggttcttggtttaaaagttactttttatatgtttcatggtggtaaaggttatagattaaatcacaaaagtggaaataaaagtcgataagtgattattgaagtacaacaataaaggagagtttctttt

SEQ ID NO: 37550 - protein, 532 aa, Arabidopsis thaliana
  peptide (1)..(532): Ceres Seq. ID no. 12371295
HSLLPHHRYSRVYLSDVTMDSDTLSGLLENVAKKFPDRRALSVSGKFNLTHARLHDLIERAASRLVSDAGIKPGDVVALTFPNTVEFVIMFLAVIRARATAAPLNAAYTAEEFEFYLSDSDSKLLLTSKEGNAPAQEAASKLKISHVTATLLDAGSDLVLSVADSDSVVDSATELVNHPDDGALFLHTSGTTSRPKGVPLTQLNLASSVKNIKAVYKLTESDSTVIVLPLFHVHGLLAGLLSSLGAGAAVTLPAAGRFSATTFWPDMKKYNATWYTAVPTIHQIILDRHASHPETEYPKLRFIRSCSASLAPVILSRLEEAFGAPVLEAYAMTEATHLMSSNPLPEEGPHKPGSVGKPVGQEMAILNEKGEIQEPNNKGEVCIRGPNVTKGYKNNPEANKAGFEFGWFHTGDIGYFDTDGYLHLVGRIKELINRGGEKISPIEVDAVLLTHPDVSQGVAFGVPDEKYGEEINCAVIPREGTTVTEEDIKAFCKKNLAAFKVPKRVFITDNLPKTASGKIQRRIVAQHFLEKP

SEQ ID NO: 37551 - protein, 514 aa, Arabidopsis thaliana
  peptide (1)..(514): Ceres Seq. ID no. 12371296
MDSDTLSGLLENVAKKFPDRRALSVSGKFNLTHARLHDLIERAASRLVSDAGIKPGDVVALTFPNTVEFVIMFLAVIRARATAAPLNAAYTAEEFEFYLSDSDSKLLLTSKEGNAPAQEAASKLKISHVTATLLDAGSDLVLSVADSDSVVDSATELVNHPDDGALFLHTSGTTSRPKGVPLTQLNLASSVKNIKAVYKLTESDSTVIVLPLFHVHGLLAGLLSSLGAGAAVTLPAAGRFSATTFWPDMKKYNATWYTAVPTIHQIILDRHASHPETEYPKLRFIRSCSASLAPVILSRLEEAFGAPVLEAYAMTEATHLMSSNPLPEEGPHKPGSVGKPVGQEMAILNEKGEIQEPNNKGEVCIRGPNVTKGYKNNPEANKAGFEFGWFHTGDIGYFDTDGYLHLVGRIKELINRGGEKISPIEVDAVLLTHPDVSQGVAFGVPDEKYGEEINCAVIPREGTTVTEEDIKAFCKKNLAAFKVPKRVFITDNLPKTASGKIQRRIVAQHFLEKP

SEQ ID NO: 37552 - protein, 443 aa, Arabidopsis thaliana
  peptide (1)..(443): Ceres Seq. ID no. 12371297
MFLAVIRARATAAPLNAAYTAEEFEFYLSDSDSKLLLTSKEGNAPAQEAASKLKISHVTATLLDAGSDLVLSVADSDSVVDSATELVNHPDDGALFLHTSGTTSRPKGVPLTQLNLASSVKNIKAVYKLTESDSTVIVLPLFHVHGLLAGLLSSLGAGAAVTLPAAGRFSATTFWPDMKKYNATWYTAVPTIHQIILDRHASHPETEYPKLRFIRSCSASLAPVILSRLEEAFGAPVLEAYAMTEATHLMSSNPLPEEGPHKPGSVGKPVGQEMAILNEKGEIQEPNNKGEVCIRGPNVTKGYKNNPEANKAGFEFGWFHTGDIGYFDTDGYLHLVGRIKELINRGGEKISPIEVDAVLLTHPDVSQGVAFGVPDEKYGEEINCAVIPREGTTVTEEDIKAFCKKNLAAFKVPKRVFITDNLPKTASGKIQRRIVAQHFLEKP

SEQ ID NO: 37553 - DNA, 1153 bp, Arabidopsis thaliana
  misc_feature (1)..(1153): Ceres Seq. ID no. 13486623
  misc_feature (1)..(1153): Ortholog of  Ceres SEQ ID NO 12620986 as cited in SEQ ID NO 66720
gtcgacccacgcgtccgctccaagaggagagagagagaaagagattcaattatatgcagagagaaaaagaagccaattggttctctctctctctctctctctctctgattgattgatccagcgattcgtctggctggctcggtttccgcgggaaaaccttcttcttcgttgaccttacacgagttttgttgattcggcagggggatcgacgacggagatggcgattctgtacgccctcgtggctcgtggcacggtggttctttctgagttcaccgccacctctacgaatgcgagcaccatcgccaaacagatcctcgagaaggtccctggagacaacgacagcaacgtctcctactctcaggatcgttacgtcttccacgttaaacgcaccgatggcctcaccgttctctgtatggccgaagaaaccgccggaaggagaattccttttgcctttttggaggatattcaccagagattcgtacggacttatggcagggctgttcatacagcactagcttatgcaatgaatgaggaattctctagagttctcagtcagcagattgactattactctaatgatcctaatgccgataggattaatcgtattaagggtgaaatgaatcaggtgcggggtgtcatgatagaaaacattgacaaagtcctagatagaggtgaacgtttggagcttcttgtcgataaaaccgccaatatgcaggggaatacattccggttcagaaagcaagctcgtcgttttagaagcaacgtctggtggagaaactgcaagctcacggtcctcttaatactactactactggtgatcatatacattgcagtggcctttctctgccacggacctactctaccatcttgcatttaagtgcatctgtctcttaaggaatccatcccgattctgcgcgttgccacgactttttatctcctcatctgattgtaaaccttgtgttttcctgagcattttcatgtggcttaaaaagcttatgtttccaactcacgtatatgaaaaagtatacttatttatagagcaatgtaaaagctcattgctttgcgaagtgtgtgaatctttgttgacatcatgttctataaattacatacatagtggaaaagtgaacaggcttgctttgtctgatatgttcat

SEQ ID NO: 37554 - protein, 219 aa, Arabidopsis thaliana
  peptide (1)..(219): Ceres Seq. ID no. 13486624
MAILYALVARGTVVLSEFTATSTNASTIAKQILEKVPGDNDSNVSYSQDRYVFHVKRTDGLTVLCMAEETAGRRIPFAFLEDIHQRFVRTYGRAVHTALAYAMNEEFSRVLSQQIDYYSNDPNADRINRIKGEMNQVRGVMIENIDKVLDRGERLELLVDKTANMQGNTFRFRKQARRFRSNVWWRNCKLTVLLILLLLVIIYIAVAFLCHGPTLPSCI

SEQ ID NO: 37555 - protein, 154 aa, Arabidopsis thaliana
  peptide (1)..(154): Ceres Seq. ID no. 13486625
MAEETAGRRIPFAFLEDIHQRFVRTYGRAVHTALAYAMNEEFSRVLSQQIDYYSNDPNADRINRIKGEMNQVRGVMIENIDKVLDRGERLELLVDKTANMQGNTFRFRKQARRFRSNVWWRNCKLTVLLILLLLVIIYIAVAFLCHGPTLPSCI

SEQ ID NO: 37556 - protein, 117 aa, Arabidopsis thaliana
  peptide (1)..(117): Ceres Seq. ID no. 13486626
MNEEFSRVLSQQIDYYSNDPNADRINRIKGEMNQVRGVMIENIDKVLDRGERLELLVDKTANMQGNTFRFRKQARRFRSNVWWRNCKLTVLLILLLLVIIYIAVAFLCHGPTLPSCI

SEQ ID NO: 37557 - DNA, 1369 bp, Arabidopsis thaliana
  misc_feature (1)..(1369): Ceres Seq. ID no. 12489536
  misc_feature (1)..(1369): Ortholog of  Ceres SEQ ID NO 13598582 as cited in SEQ ID NO 65294
  misc_feature (1)..(1369): Ortholog of  Ceres SEQ ID NO 15176114 as cited in SEQ ID NO 67627
aatctactgttctctctcctatctgggcaaaaatctcagacaaacctgcaaaattagggtatttgaggatatggattatgatcggtacaagttatttgttggtggtattgcgaaagagacaagtgaagaagctctgaagcattattttagcagatatggagctgtgttggaagctgttgtagctaaagagaaagtcactggaaaacctagaggttttgggtttgttcgctttgctaatgattgtgatgttgttaaagctcttagagacactcacttcattctcggtaaacccgttgatgtgagaaaggcgattaggaaacatgaaatataccaacagccgtttagcatgcagtttttggagagaaaaatgcaacagatgaatggtggtttgcgtgagatgtcgagtaatggtgtgacccataggtctaagaagatatttgttgggggtttgtcgtctaacacgactgaagaagagtttaagagttactttgagaggtttggtaggactactgatgtagttgtgatgcatgacggtgtgactaacaggccaaggggttttgggtttgttacttatgattcggaggactctgttgaggttgttatgcagagtaatttccatgagttgagtgataaacgcgtggaagtgaaacgggcaatacctaaagaaggaatccagagcaataacggtaatgctgttaatgttcctccttcctacagcagctttcaagcaacaccttatgtccctgagcaaaacggatatgggatggttttacagtatcctcctcctgtctttggttatcatcacaatgtccaagccgttcaatatccttatggttaccaattcacagcacaagtggctaacgtttcatggaacaatccgattatgcaacccaccggtttttactgtgctcctcctcatcctactactcctcccaccaacaatcttggttatatccaatacatgaacgggtttgatctttcgggtacgaacattaccgggtacaatcctctagcatgccctgtaacgggggatgcagctggtgcgctaatacatcagtttggagatttgaagcttgatgtccacagtcaagcccatcagagaatgaatggaggtaacatgggaataccattgcagaatggtacatatatatgacagttgcagttgcagaaataggctcacaaggctagtgaaattctttggactcttttaaatggttttttaggttcctcatctttcttcattaactcttttggtaaatgtgttggtttggtttggttaccttgtatattgtttaggtatttgattttaaccccaagacttatgtatcatatcttactgcatttgtaatatatcacactcatttcgttc

SEQ ID NO: 37558 - protein, 383 aa, Arabidopsis thaliana
  peptide (1)..(383): Ceres Seq. ID no. 12489537
IYCSLSYLGKNLRQTCKIRVFEDMDYDRYKLFVGGIAKETSEEALKHYFSRYGAVLEAVVAKEKVTGKPRGFGFVRFANDCDVVKALRDTHFILGKPVDVRKAIRKHEIYQQPFSMQFLERKMQQMNGGLREMSSNGVTHRSKKIFVGGLSSNTTEEEFKSYFERFGRTTDVVVMHDGVTNRPRGFGFVTYDSEDSVEVVMQSNFHELSDKRVEVKRAIPKEGIQSNNGNAVNVPPSYSSFQATPYVPEQNGYGMVLQYPPPVFGYHHNVQAVQYPYGYQFTAQVANVSWNNPIMQPTGFYCAPPHPTTPPTNNLGYIQYMNGFDLSGTNITGYNPLACPVTGDAAGALIHQFGDLKLDVHSQAHQRMNGGNMGIPLQNGTYI

SEQ ID NO: 37559 - protein, 360 aa, Arabidopsis thaliana
  peptide (1)..(360): Ceres Seq. ID no. 12489538
MDYDRYKLFVGGIAKETSEEALKHYFSRYGAVLEAVVAKEKVTGKPRGFGFVRFANDCDVVKALRDTHFILGKPVDVRKAIRKHEIYQQPFSMQFLERKMQQMNGGLREMSSNGVTHRSKKIFVGGLSSNTTEEEFKSYFERFGRTTDVVVMHDGVTNRPRGFGFVTYDSEDSVEVVMQSNFHELSDKRVEVKRAIPKEGIQSNNGNAVNVPPSYSSFQATPYVPEQNGYGMVLQYPPPVFGYHHNVQAVQYPYGYQFTAQVANVSWNNPIMQPTGFYCAPPHPTTPPTNNLGYIQYMNGFDLSGTNITGYNPLACPVTGDAAGALIHQFGDLKLDVHSQAHQRMNGGNMGIPLQNGTYI

SEQ ID NO: 37560 - protein, 268 aa, Arabidopsis thaliana
  peptide (1)..(268): Ceres Seq. ID no. 12489539
MQFLERKMQQMNGGLREMSSNGVTHRSKKIFVGGLSSNTTEEEFKSYFERFGRTTDVVVMHDGVTNRPRGFGFVTYDSEDSVEVVMQSNFHELSDKRVEVKRAIPKEGIQSNNGNAVNVPPSYSSFQATPYVPEQNGYGMVLQYPPPVFGYHHNVQAVQYPYGYQFTAQVANVSWNNPIMQPTGFYCAPPHPTTPPTNNLGYIQYMNGFDLSGTNITGYNPLACPVTGDAAGALIHQFGDLKLDVHSQAHQRMNGGNMGIPLQNGTYI

SEQ ID NO: 37561 - DNA, 1146 bp, Arabidopsis thaliana
  misc_feature (1)..(1146): Ceres Seq. ID no. 12327345
  misc_feature (1)..(1146): Ortholog of  Ceres SEQ ID NO 14307639 as cited in SEQ ID NO 54779
aactttctcctcagggtatgctccaaattcccaacttggcctctctttttcatcttttgggtttttatgttcactcttctctgcttcattcctctttctacttccaggaaataaaaacttctaatcaaagagcaagagattaagaaatgtatgcagaaactagcttagctttccgattcatgcagagttcttcttctccagagattcaccaatttgaagacctctttaaatcctacaagctctctgatgaaatgaacaatcttgttgaggcaagtgagtatgattttggagaagagagtgacctattcaaagcccctgagccgattattgaagaaccaatgttagctgttgatcccctctctcaagagcttgttgaactcggtgatctcgggtcgttgcagagtgaccaacagcttatagacaaggctttctacgactgtgagcaggacctcctggtgaaatcagccatggagtctccgctctccgaggtactagacatcaagaacatctctttagtggcaaaaatggacaacgatgtgaagagtacgagtgtagtcgtctctgatgtcccaattccgaagagtgtgagctcgggaaacttgagctcaatggatatggtcgagcacaaggatgcggtgattcagggattccctgatttccctccagtggattatgggatgagaagagccttcagtgaaagcgatatacagacactggggactggaaatacgggtcttgttcagtctcagttggatcgaataatcataagttgcacctctgaggaccgccgtgagaagctttctcgatacaggaacaagaagagcaagcgaaatttcgggcgtaaaatcaagtatgcttgtaggaaggcacttgcagacagtcaaccgaggatccgaggaaggtttgcaaaaacagaggagatgcagaaatgatgaggactagttaggtctgatgcggtgttaagaatataatcccacccacctctcgttttgtatataagggggtttgtctgaataagcctagtaaggagtaaggattaggaagaaaaaacaagttgtagtagtcagtcactcaagtaatgatgcttatatatgttagatcttgtgaagttatgtatctctaaaagtttatatatagaagctgttt

SEQ ID NO: 37562 - protein, 261 aa, Arabidopsis thaliana
  peptide (1)..(261): Ceres Seq. ID no. 12327346
MYAETSLAFRFMQSSSSPEIHQFEDLFKSYKLSDEMNNLVEASEYDFGEESDLFKAPEPIIEEPMLAVDPLSQELVELGDLGSLQSDQQLIDKAFYDCEQDLLVKSAMESPLSEVLDIKNISLVAKMDNDVKSTSVVVSDVPIPKSVSSGNLSSMDMVEHKDAVIQGFPDFPPVDYGMRRAFSESDIQTLGTGNTGLVQSQLDRIIISCTSEDRREKLSRYRNKKSKRNFGRKIKYACRKALADSQPRIRGRFAKTEEMQK

SEQ ID NO: 37563 - protein, 250 aa, Arabidopsis thaliana
  peptide (1)..(250): Ceres Seq. ID no. 12327347
MQSSSSPEIHQFEDLFKSYKLSDEMNNLVEASEYDFGEESDLFKAPEPIIEEPMLAVDPLSQELVELGDLGSLQSDQQLIDKAFYDCEQDLLVKSAMESPLSEVLDIKNISLVAKMDNDVKSTSVVVSDVPIPKSVSSGNLSSMDMVEHKDAVIQGFPDFPPVDYGMRRAFSESDIQTLGTGNTGLVQSQLDRIIISCTSEDRREKLSRYRNKKSKRNFGRKIKYACRKALADSQPRIRGRFAKTEEMQK

SEQ ID NO: 37564 - protein, 226 aa, Arabidopsis thaliana
  peptide (1)..(226): Ceres Seq. ID no. 12327348
MNNLVEASEYDFGEESDLFKAPEPIIEEPMLAVDPLSQELVELGDLGSLQSDQQLIDKAFYDCEQDLLVKSAMESPLSEVLDIKNISLVAKMDNDVKSTSVVVSDVPIPKSVSSGNLSSMDMVEHKDAVIQGFPDFPPVDYGMRRAFSESDIQTLGTGNTGLVQSQLDRIIISCTSEDRREKLSRYRNKKSKRNFGRKIKYACRKALADSQPRIRGRFAKTEEMQK

SEQ ID NO: 37565 - DNA, 1169 bp, Arabidopsis thaliana
  misc_feature (1)..(1169): Ceres Seq. ID no. 12322221
  misc_feature (1)..(1169): Ortholog of  Ceres SEQ ID NO 14316539 as cited in SEQ ID NO 57567
gttgcgttattcttctggataagagcttcgtgatggtttgaaacctctgagtgaagaagaagcgccatggctgggattaccagcagcaccgttggattcaacgccgtcttcaccggaataaccaaaacagtatcatcacattcactcttctctgttgattccaaactctgtagtcttcgtctctccaaaaccgaactgtctttcactaatctcactccttctcctcgccgtgctttcgccgtcacttgccgcttcggcggtggtggtggaggttatcgattctctggagacaatagaagaggtaggccgaaagaagctgaaattgatgaagctcttgatatctcctcaattaggtcagctactgttaggcttatcgatgggcaacaaaacatgcttggtttagtgtctaaagacgaagccgttcgaatggctgatgatgctgaacttgatctggttatactatcgcctgatgcagatcctccggttgttaaaatgatggactacagtaaatacagatacgaacagcaaaagaggaaaaaagatcagcaaaagaaaacaactcgcatggatttaaaggagcttaaaatgggttataatattgatcagcatgattattccgttcgtctaagggctgcccaaaagttcttgcaagatggtgacaaggttaaggtgattgtgagcatgaaaggacgagaaaacgagttcagaaatatcgctattgaactcctcagacgtttccaaaccgaaataggggagcttgcaactgaagagagcaaaaacttcagggacagaaatatgttcattatcttggtcccaaacaaagaaatgattcggaaaccacaagaaccacccacaagaaagaagaaaaaaacagcggaaaacgaagcttcagcttcagctgcagaaataacagctgagcctgagcctgagcctgagcctgagcctgaacctgagcctgagcctgagcctgagcctgagccagagcctctacagatcgattcttgagtttaaaatcttgtggtaggattttcagagctaaagtaaagttttgtatatttacttttctaccatgtctcaagagagccaagagctgtataacaaatagagttagtcctatttgaatgatgttcttcgtttgtagatcttttctctaatctatttttttgttt

SEQ ID NO: 37566 - protein, 312 aa, Arabidopsis thaliana
  peptide (1)..(312): Ceres Seq. ID no. 12322222
MAGITSSTVGFNAVFTGITKTVSSHSLFSVDSKLCSLRLSKTELSFTNLTPSPRRAFAVTCRFGGGGGGYRFSGDNRRGRPKEAEIDEALDISSIRSATVRLIDGQQNMLGLVSKDEAVRMADDAELDLVILSPDADPPVVKMMDYSKYRYEQQKRKKDQQKKTTRMDLKELKMGYNIDQHDYSVRLRAAQKFLQDGDKVKVIVSMKGRENEFRNIAIELLRRFQTEIGELATEESKNFRDRNMFIILVPNKEMIRKPQEPPTRKKKKTAENEASASAAEITAEPEPEPEPEPEPEPEPEPEPEPEPLQIDS

SEQ ID NO: 37567 - protein, 204 aa, Arabidopsis thaliana
  peptide (1)..(204): Ceres Seq. ID no. 12322223
MLGLVSKDEAVRMADDAELDLVILSPDADPPVVKMMDYSKYRYEQQKRKKDQQKKTTRMDLKELKMGYNIDQHDYSVRLRAAQKFLQDGDKVKVIVSMKGRENEFRNIAIELLRRFQTEIGELATEESKNFRDRNMFIILVPNKEMIRKPQEPPTRKKKKTAENEASASAAEITAEPEPEPEPEPEPEPEPEPEPEPEPLQIDS

SEQ ID NO: 37568 - protein, 192 aa, Arabidopsis thaliana
  peptide (1)..(192): Ceres Seq. ID no. 12322224
MADDAELDLVILSPDADPPVVKMMDYSKYRYEQQKRKKDQQKKTTRMDLKELKMGYNIDQHDYSVRLRAAQKFLQDGDKVKVIVSMKGRENEFRNIAIELLRRFQTEIGELATEESKNFRDRNMFIILVPNKEMIRKPQEPPTRKKKKTAENEASASAAEITAEPEPEPEPEPEPEPEPEPEPEPEPLQIDS

SEQ ID NO: 37569 - DNA, 1380 bp, Arabidopsis thaliana
  misc_feature (1)..(1380): Ceres Seq. ID no. 12462129
  misc_feature (1)..(1380): Ortholog of  Ceres SEQ ID NO 14311553 as cited in SEQ ID NO 51462
  misc_feature (1)..(1380): Ortholog of  Ceres SEQ ID NO 13599003 as cited in SEQ ID NO 0
aataatcattcatcagggccctgtgttctctgagtcaagtcaggaactgatgaataaccctgtaccgtgtcagtcggtctctggtggcaattctggtggttatttgtttccttcttcctctggatactgcaatgtttcagctgtcttgcctcatggaaggaatttgcaaaaccagccacctgtttccaccgtgcctagagacagattggctatgcaggattgtcctttgatagctcaatcctcgttgattaatcatcaccctcaagagttcatagatccacttcatgagttctttgatttctctgatcatgttcctgttcagaatctacaagcagagagtagtggagtaagggtggactcatccgtggaacttcataagaaaagtgaatggcaagattgggcagatcagctgatttctgttgacgatggttctgagccaaattggtctgaacttcttggagattcaagttcccacaatccaaattcagagatacctacaccatttttggatgtaccaaggctagatataacagctaaccagcagcaacagatggtttcatcagaggaccagctcagcggcagaaactcatcatctagtgtagcaacatctaaacaacgtatgcgttggacaccagaacttcacgaggcattcgttgaagctgttaatcagcttggtggtagtgaacgagccacccctaaggctgttttgaagctcttgaataaccctggcttgaccatttatcatgtaaaaagccatttgcagaaatatagaacggcaaggtataaaccggagacttcggaagttacaggagaacctcaagagaagaagatgacatctattgaagatatcaaatctcttgacatgaaaacgagcgttgagatcacacaagctctacggttacaaatggaagtgcagaaacgtctccacgagcagctcgagatccaacggtcactgcagttacagattgaaaaacagggccggtacctacagatgatgttcgagaaacaacaaaagatacaagacaacaagagctcttcttcagaagcatcaccaaagcaatgcaatggttcatttgcagaagttgaagttggtcttgagacactaacaggggaccaaaatgaatctgcttcagcatcaaggaaacgtgtcagagaagattaaagcatgtttaatttgatctcgtttgacgaaacatgtttattgggaattaattgtggaaaccaactccagttttgttaaaagaatctgtttctttcttagctctgtattgttctagtttagaagcagttgatttggccttgcatggctgcaacactaactaaagagtaaagactaattgtgtatatctacatatacatttttggggacgatttgtgtcc

SEQ ID NO: 37570 - protein, 386 aa, Arabidopsis thaliana
  peptide (1)..(386): Ceres Seq. ID no. 12462130
IIIHQGPVFSESSQELMNNPVPCQSVSGGNSGGYLFPSSSGYCNVSAVLPHGRNLQNQPPVSTVPRDRLAMQDCPLIAQSSLINHHPQEFIDPLHEFFDFSDHVPVQNLQAESSGVRVDSSVELHKKSEWQDWADQLISVDDGSEPNWSELLGDSSSHNPNSEIPTPFLDVPRLDITANQQQQMVSSEDQLSGRNSSSSVATSKQRMRWTPELHEAFVEAVNQLGGSERATPKAVLKLLNNPGLTIYHVKSHLQKYRTARYKPETSEVTGEPQEKKMTSIEDIKSLDMKTSVEITQALRLQMEVQKRLHEQLEIQRSLQLQIEKQGRYLQMMFEKQQKIQDNKSSSSEASPKQCNGSFAEVEVGLETLTGDQNESASASRKRVRED

SEQ ID NO: 37571 - protein, 370 aa, Arabidopsis thaliana; identical to SEQ ID NO: 29235
  peptide (1)..(370): Ceres Seq. ID no. 12462131

SEQ ID NO: 37572 - protein, 316 aa, Arabidopsis thaliana
  peptide (1)..(316): Ceres Seq. ID no. 12462132
MQDCPLIAQSSLINHHPQEFIDPLHEFFDFSDHVPVQNLQAESSGVRVDSSVELHKKSEWQDWADQLISVDDGSEPNWSELLGDSSSHNPNSEIPTPFLDVPRLDITANQQQQMVSSEDQLSGRNSSSSVATSKQRMRWTPELHEAFVEAVNQLGGSERATPKAVLKLLNNPGLTIYHVKSHLQKYRTARYKPETSEVTGEPQEKKMTSIEDIKSLDMKTSVEITQALRLQMEVQKRLHEQLEIQRSLQLQIEKQGRYLQMMFEKQQKIQDNKSSSSEASPKQCNGSFAEVEVGLETLTGDQNESASASRKRVRED

SEQ ID NO: 37573 - DNA, 1636 bp, Arabidopsis thaliana; identical to SEQ ID NO: 27107
  misc_feature (1)..(1636): Ceres Seq. ID no. 13500074
  misc_feature (1)..(1636): Ortholog of  Ceres SEQ ID NO 15176317 as cited in SEQ ID NO 52865
  misc_feature (1)..(1636): Ortholog of  Ceres SEQ ID NO 13518893 as cited in SEQ ID NO 58108
  misc_feature (1)..(1636): Ortholog of  Ceres SEQ ID NO 12617152 as cited in SEQ ID NO 63555

SEQ ID NO: 37574 - protein, 490 aa, Arabidopsis thaliana; identical to SEQ ID NO: 27108
  peptide (1)..(490): Ceres Seq. ID no. 13500075

SEQ ID NO: 37575 - protein, 298 aa, Arabidopsis thaliana; identical to SEQ ID NO: 27109
  peptide (1)..(298): Ceres Seq. ID no. 13500076

SEQ ID NO: 37576 - DNA, 715 bp, Arabidopsis thaliana
  misc_feature (1)..(715): Ceres Seq. ID no. 13487000
  misc_feature (1)..(715): Ortholog of  Ceres SEQ ID NO 15227036 as cited in SEQ ID NO 61662
  misc_feature (1)..(715): Ortholog of  Ceres SEQ ID NO 12635268 as cited in SEQ ID NO 0
aagaataaaaaaaataaaaaccaaaaagcaaaagggataacacaaaacccctttcgtcttcccaattccaccaccacacagacaaagcacaccgaaaatggcggtttcttctcgaacattctccactttcctctgcatcaaaactacatctttccgcaacccctcaactcctttgtcctctctccggttcgcctctcacccggcggctaaacactgcttggtccgagcggtaacatctgcaacggaatcttcagagccaacagcaaccaataagagagtgccacgcggtatcatgaaacctagaccagtttcaccagagatgcaagacatcgtcgagcttcctgagattgctcgcacacaagctctgaagcgtatttgggcttacatcaaagaacatgaccttcaggacccacaaaacaagagagaaatactgtgtgatgagaagttgaagaagatattcgaaggaagagatcgggttgggttcctagagattgcaaagctcatcggtcctcacttcctctgatggattgtttccgcggaattttatttggatgattgtctatgttttgttgttgaactcttacggccatgaaaagagaagggtatttgaagttgaggaagacttagattagtaaattagggttttttttttttggttgtttcaatggatgttatgtagtcgttgcttcctaatgttgtttgcgttttcgtttcg

SEQ ID NO: 37577 - protein, 141 aa, Arabidopsis thaliana
  peptide (1)..(141): Ceres Seq. ID no. 15218715
MAVSSRTFSTFLCIKTTSFRNPSTPLSSLRFASHPAAKHCLVRAVTSATESSEPTATNKRVPRGIMKPRPVSPEMQDIVELPEIARTQALKRIWAYIKEHDLQDPQNKREILCDEKLKKIFEGRDRVGFLEIAKLIGPHFL

SEQ ID NO: 37578 - protein, 76 aa, Arabidopsis thaliana
  peptide (1)..(76): Ceres Seq. ID no. 15218716
MKPRPVSPEMQDIVELPEIARTQALKRIWAYIKEHDLQDPQNKREILCDEKLKKIFEGRDRVGFLEIAKLIGPHFL

SEQ ID NO: 37579 - DNA, 1459 bp, Arabidopsis thaliana
  misc_feature (1)..(1459): Ceres Seq. ID no. 13494018
  misc_feature (1)..(1459): Ortholog of  Ceres SEQ ID NO 15179015 as cited in SEQ ID NO 0
  misc_feature (1)..(1459): Ortholog of  Ceres SEQ ID NO 15179613 as cited in SEQ ID NO 0
atatttgattccttttctctctcatacgatctgcacaccactactaagaacaacagagctagagagacttgcaataattgtaaaacatgattggaacaagcttccccgaggatcttgattgtggcaacttctttgacaacatggatgatctcatggactttcccggtggagatatcgatgtcggtttcggcataggtgactccgactctttccctaccatctggaccactcatcacgacacgtggcccgccgcttctgatcctctcttctcttccaacaccaactctgattcatcacctgagctctatgttccgtttgaggacattgttaaggtggaaagacctccaacctttgtagaggaaacattggttgagaagaaggaagattcgttttcgacaaacactgattcatcatcttctcatagccaattcaggagctcaagtccagtgtcggttctcgagagcagctcctcctcgtctaaaaccaccaacacaacctcccttgttctccctggaaagcacggtcgtccacgcacaaaacgccctcgtccacctgtccaggataaagatagagtcaaagacaatgtgtgcggtggtgactcgcgcctcatcattagaataccgaaacagtttctctctgatcacaacaagatgatcaacaagaagaagaagaagaaggccaagattacttcttcctcttcttcgtccgggattgatcttgaagtcaatggaaacaacgtcgattcgtattcttcagagcaatatccgcttaggaaatgtatgcactgtgaggtcaccaagactccacagtggaggcttggtccaatgggtccaaagacactttgcaatgcgtgcggtgtacgttacaaatcagggaggcttttcccggagtaccgtccagctgctagtccaacatttactccagctcttcactcaaactcacacaagaaagtggctgaaatgagaaacaagagatgcagtgatggtagctacataaccgaagagaatgatctgcaaggactgattccgaacaatgcctacattggcgtagactaaaacctagagaagatgattcgatttccatgcgttgaagtgattagatatgccaggagtaggaaagagtcagtgagaagaaaagtttttagctttagaagagatgaaggaagagagcaatcaattggagggattaaaagttagatgagaattgattgtgtttgtattattttgtatttgtagtgtgaatgggcaaaaaactcttgaaacagaggaaaagtaagttgaggaagagcagaagattttgaagacattagagaatcattaggtgttgagtattacattaaatcttcctcttcttcttttgttctttcaattctttgtatttttattgtgaggattctcttttttttttttttttttgtagttgatttgtttattgtatctgataaaaagaatgttacttg

SEQ ID NO: 37580 - protein, 322 aa, Arabidopsis thaliana
  peptide (1)..(322): Ceres Seq. ID no. 13494019
MIGTSFPEDLDCGNFFDNMDDLMDFPGGDIDVGFGIGDSDSFPTIWTTHHDTWPAASDPLFSSNTNSDSSPELYVPFEDIVKVERPPTFVEETLVEKKEDSFSTNTDSSSSHSQFRSSSPVSVLESSSSSSKTTNTTSLVLPGKHGRPRTKRPRPPVQDKDRVKDNVCGGDSRLIIRIPKQFLSDHNKMINKKKKKKAKITSSSSSSGIDLEVNGNNVDSYSSEQYPLRKCMHCEVTKTPQWRLGPMGPKTLCNACGVRYKSGRLFPEYRPAASPTFTPALHSNSHKKVAEMRNKRCSDGSYITEENDLQGLIPNNAYIGVD

SEQ ID NO: 37581 - protein, 304 aa, Arabidopsis thaliana
  peptide (1)..(304): Ceres Seq. ID no. 13494020
MDDLMDFPGGDIDVGFGIGDSDSFPTIWTTHHDTWPAASDPLFSSNTNSDSSPELYVPFEDIVKVERPPTFVEETLVEKKEDSFSTNTDSSSSHSQFRSSSPVSVLESSSSSSKTTNTTSLVLPGKHGRPRTKRPRPPVQDKDRVKDNVCGGDSRLIIRIPKQFLSDHNKMINKKKKKKAKITSSSSSSGIDLEVNGNNVDSYSSEQYPLRKCMHCEVTKTPQWRLGPMGPKTLCNACGVRYKSGRLFPEYRPAASPTFTPALHSNSHKKVAEMRNKRCSDGSYITEENDLQGLIPNNAYIGVD

SEQ ID NO: 37582 - protein, 300 aa, Arabidopsis thaliana
  peptide (1)..(300): Ceres Seq. ID no. 13494021
MDFPGGDIDVGFGIGDSDSFPTIWTTHHDTWPAASDPLFSSNTNSDSSPELYVPFEDIVKVERPPTFVEETLVEKKEDSFSTNTDSSSSHSQFRSSSPVSVLESSSSSSKTTNTTSLVLPGKHGRPRTKRPRPPVQDKDRVKDNVCGGDSRLIIRIPKQFLSDHNKMINKKKKKKAKITSSSSSSGIDLEVNGNNVDSYSSEQYPLRKCMHCEVTKTPQWRLGPMGPKTLCNACGVRYKSGRLFPEYRPAASPTFTPALHSNSHKKVAEMRNKRCSDGSYITEENDLQGLIPNNAYIGVD

SEQ ID NO: 37583 - DNA, 1183 bp, Arabidopsis thaliana
  misc_feature (1)..(1183): Ceres Seq. ID no. 12321994
  misc_feature (1)..(1183): Ortholog of  Ceres SEQ ID NO 14303487 as cited in SEQ ID NO 54521
  misc_feature (1)..(1183): Ortholog of  Ceres SEQ ID NO 14316302 as cited in SEQ ID NO 55232
  misc_feature (1)..(1183): Ortholog of  Ceres SEQ ID NO 14308274 as cited in SEQ ID NO 55597
  misc_feature (1)..(1183): Ortholog of  Ceres SEQ ID NO 13659710 as cited in SEQ ID NO 60808
atctctgcaacttcctctgtttctgattaccaaacgtcgtcaatacatttcttcaaattacgtttcttttattctttcgttactctcaacaaattttgatatctgattggtgttgattccaagtaagaaagatcaaaactttaggtaaagtatggatatgggtttccatgaaaatgagcaaaatcaagaatttgcgaatctaatggagattggatctgggcattacgggtgttcacattatagaagacgatgcaagattagagcaccatgttgtgatgagatttttgattgcagacattgccacaacgaagctaaggattctcttcatattgaacagcatcatagacatgagcttcctcgacatgaagtttcaaaggtcatatgctcgctttgtgagacagaacaagacgttcagcaaaactgctccaattgtggtgtatgtatggggaagtacttctgttcaaaatgcaagttcttcgacgatgatctttccaagaagcaatatcactgtgatgagtgtgggatttgcaggaccggaggagaagaaaactttttccattgcaaaagatgccgatgttgctactccaaaattatggaggacaaacaccaatgtgttgaaggcgctatgcatcacaattgcccggtttgttttgagtatctgtttgattcaacaagagatatcactgtcctacgatgtggtcacactatgcatctagaatgcacgaaagatatggggctacataaccgatacacatgccctgtatgctccaaatccatatgtgacatgtctaatctgtggaagaaacttgatgaagaggttgctgcatacccaatgccaaagatgtatgaaaacaagatggtatggattctctgcaatgactgcggctcaaacacgaacgttcggtttcatttgatcgcgcataaatgcagtagctgtggttcctacaatacaagacagacacagagaggctctgatagtcactcttgctcctctggaatgcctcaggttgttggttcaaccggttaatttttaaccagagctggttttggtgtctgaatttcccatgaggagattatttgtactttctatagtttggtatcagtcaatgcctttggttgttaacaattatatcatcacagattcaaaagctgctttgagccaatccaacttgcaagtctagac

SEQ ID NO: 37584 - protein, 291 aa, Arabidopsis thaliana
  peptide (1)..(291): Ceres Seq. ID no. 12321995
MDMGFHENEQNQEFANLMEIGSGHYGCSHYRRRCKIRAPCCDEIFDCRHCHNEAKDSLHIEQHHRHELPRHEVSKVICSLCETEQDVQQNCSNCGVCMGKYFCSKCKFFDDDLSKKQYHCDECGICRTGGEENFFHCKRCRCCYSKIMEDKHQCVEGAMHHNCPVCFEYLFDSTRDITVLRCGHTMHLECTKDMGLHNRYTCPVCSKSICDMSNLWKKLDEEVAAYPMPKMYENKMVWILCNDCGSNTNVRFHLIAHKCSSCGSYNTRQTQRGSDSHSCSSGMPQVVGSTG

SEQ ID NO: 37585 - protein, 289 aa, Arabidopsis thaliana
  peptide (1)..(289): Ceres Seq. ID no. 12321996
MGFHENEQNQEFANLMEIGSGHYGCSHYRRRCKIRAPCCDEIFDCRHCHNEAKDSLHIEQHHRHELPRHEVSKVICSLCETEQDVQQNCSNCGVCMGKYFCSKCKFFDDDLSKKQYHCDECGICRTGGEENFFHCKRCRCCYSKIMEDKHQCVEGAMHHNCPVCFEYLFDSTRDITVLRCGHTMHLECTKDMGLHNRYTCPVCSKSICDMSNLWKKLDEEVAAYPMPKMYENKMVWILCNDCGSNTNVRFHLIAHKCSSCGSYNTRQTQRGSDSHSCSSGMPQVVGSTG

SEQ ID NO: 37586 - protein, 274 aa, Arabidopsis thaliana
  peptide (1)..(274): Ceres Seq. ID no. 12321997
MEIGSGHYGCSHYRRRCKIRAPCCDEIFDCRHCHNEAKDSLHIEQHHRHELPRHEVSKVICSLCETEQDVQQNCSNCGVCMGKYFCSKCKFFDDDLSKKQYHCDECGICRTGGEENFFHCKRCRCCYSKIMEDKHQCVEGAMHHNCPVCFEYLFDSTRDITVLRCGHTMHLECTKDMGLHNRYTCPVCSKSICDMSNLWKKLDEEVAAYPMPKMYENKMVWILCNDCGSNTNVRFHLIAHKCSSCGSYNTRQTQRGSDSHSCSSGMPQVVGSTG

SEQ ID NO: 37587 - DNA, 1278 bp, Arabidopsis thaliana
  misc_feature (1)..(1278): Ceres Seq. ID no. 13509213
  misc_feature (1)..(1278): Ortholog of  Ceres SEQ ID NO 12611829 as cited in SEQ ID NO 56771
  misc_feature (1)..(1278): Ortholog of  Ceres SEQ ID NO 15171735 as cited in SEQ ID NO 57234
  misc_feature (1)..(1278): Ortholog of  Ceres SEQ ID NO 13597018 as cited in SEQ ID NO 64288
  misc_feature (1)..(1278): Ortholog of  Ceres SEQ ID NO 14305124 as cited in SEQ ID NO 0
tcgacccacgcgtccggtaattaacttctaacttgaggggcttttcattatctcctcctcgtcgtcctccctccatttttcttcacgtctggttttctctctcttttcctctatcttttcctctatctctctcctctctttgtctctctcgcttctgtgatttgggctttttcagatgggaaatgcgaacggcaaagacgaagacgccgccgccggtagcggtggtgcagatgttacctcgtcctcggcgagatctaatggcggcgatccttctgcacgcagtcgtcaccgtcgtccttcttcagactctatgagcagttctcctcccggaagtcctgctcgatctccatctcctttcttattcgctcctcaggttcccgtggctccattgcagagagcaaacgcccctccttctcctaataacatccaatggaaccaatcacagagagtttttgataatcccccagagcaaggaatccctaccatcattacatggaaccaaggaggtaatgatgtgacggtggaaggatcatgggacaattggagatcaaggaagaagctgcagaaatcaggaaaagaccactcgattctctttgtccttccatctggcatataccattacaaggtgattgtggacggtgaatccaaatacatcccagatttaccctttgtagcagacgaagttggcaatgtctgtaacattctcgatgttcataactttgtgccagaaaacccagaaagcatagtggagtttgaggcgccaccatcacctgatcatagctacggtcaaaccctaccagccgcagaagattacgcgaaagagccactggcggtgccacctcagcttcatctaacacttcttggcactactgaagagacagccatagccacaaagcctcaacatgtggtgcttaaccatgtgttcatagagcaaggatggactcctcaatccatagtagctttgggtttaacccacaggttcgagtctaagtacataactgttgtcctctacaaaccgctcacacggtaaccctaaaaattcagtgccacattgttctctctctttctttttttttcatctctcaattatgtgaaaacatgttctttgttcatagtgactagtgagtgcccaacatttgagtttattaacctctttcttacctggtttgtggtgcttgtgtacaaagcttctctcattgtaacgattgttgttttattttctgcaaaaactgtaaaatacattcgctaataatggctataagaagcttatctgctagc

SEQ ID NO: 37588 - protein, 284 aa, Arabidopsis thaliana
  peptide (1)..(284): Ceres Seq. ID no. 13509214
MGNANGKDEDAAAGSGGADVTSSSARSNGGDPSARSRHRRPSSDSMSSSPPGSPARSPSPFLFAPQVPVAPLQRANAPPSPNNIQWNQSQRVFDNPPEQGIPTIITWNQGGNDVTVEGSWDNWRSRKKLQKSGKDHSILFVLPSGIYHYKVIVDGESKYIPDLPFVADEVGNVCNILDVHNFVPENPESIVEFEAPPSPDHSYGQTLPAAEDYAKEPLAVPPQLHLTLLGTTEETAIATKPQHVVLNHVFIEQGWTPQSIVALGLTHRFESKYITVVLYKPLTR

SEQ ID NO: 37589 - protein, 239 aa, Arabidopsis thaliana
  peptide (1)..(239): Ceres Seq. ID no. 13509215
MSSSPPGSPARSPSPFLFAPQVPVAPLQRANAPPSPNNIQWNQSQRVFDNPPEQGIPTIITWNQGGNDVTVEGSWDNWRSRKKLQKSGKDHSILFVLPSGIYHYKVIVDGESKYIPDLPFVADEVGNVCNILDVHNFVPENPESIVEFEAPPSPDHSYGQTLPAAEDYAKEPLAVPPQLHLTLLGTTEETAIATKPQHVVLNHVFIEQGWTPQSIVALGLTHRFESKYITVVLYKPLTR

SEQ ID NO: 37590 - DNA, 2094 bp, Arabidopsis thaliana
  misc_feature (1)..(2094): Ceres Seq. ID no. 13495750
  misc_feature (1)..(2094): Ortholog of  Ceres SEQ ID NO 14310375 as cited in SEQ ID NO 59612
caaagcctaaaaaaatccgaccttttttgttttctctctctagaagtctctctgtttccatctttctctctctctagctcttcttcctcgtttctggcttttctgggaattttgctctatttgccccaattgttcgcttgaattacgaatccgatatcgccgatcgtcgtagatctgcgttgatattgtccggctgagtaaacagagtgaacgaaaaccaaaaacagagagggggtttaaaaatcctgaagaaaatcgcatgaatttgtttggaagcctgattttttcatcttcgatttcgagccacttcacgacttgtcttctcatctttattcttcatttctctccccagcttaatagtaataataataataataatagtaatcgtaattccaataatctcgagagtaatcgtttgatcaattgaaaaaaaaatcatggagtccaggaaaaactctgatcgtcaaatgcgtagagctaattgcttttcagctggtgagaggatgaagacaaggtcgccctccgtgattgtgatcggaggtggtttcggtgggatttcagctgctcgcactcttcaggatgcttcctttcaggttatggtactggagtcccgtgacagaattggtggacgagttcacactgattactcatttggttttcctgttgatcttggtgcatcatggctgcatggagtatgcaaggagaatcctctcgcaccagttattggaagacttggactgcccttgtatcgtactagcggtgacaattccgtcctgtatgatcatgatctcgagagctatgctctgtttgatatggatggcaaccaagttcctcaagaattggtaactcagattggcgtaacgtttgagcgtattttggaagagatcaataaagtcagggatgagcaggatgctgacatttcaatttctcaggctttctcaattgtcttttctaggaaacccgagctgaggttagaggggcttgcacacaacgtacttcaatggtatgtatgccgcatggaaggatggtttgccgcagatgctgaaaccatctctgcaaagtgttgggaccaggaggaattgttgcctggtggacacggtcttatggttagagggtatcgtcctgtcatcaatactctggcgaaaggtcttgatatccgagtaggccacagggttactaagattgtcaggcggtacaatggagtgaaggtaacgacagaaaacgggcaaacttttgttgcggatgctgcagtcattgctgtccctcttggagttttaaaatcgggaaccataaagttcgaacctaagctacctgagtggaaacaagaagcaatcaacgacctaggagtaggtattgagaacaagatcatactacattttgagaaagtcttttggccgaaagtagagtttctaggagtggtagctgaaacctcctacggttgcagttattttttgaacctgcacaaggccacgggtcatccggttctggtttacatgccggctggtcagcttgccaaagacattgagaaaatgtctgatgaagcagctgcaaatttcgccgtcttgcaactccagagaattcttcccgatgcattgcctccggtacagtatctcgtgtcgaggtggggatctgatgtgaattcaatgggatcttatagctatgatatcgtgggcaaacctcatgatctctacgagaggcttagggttccagtggataacttattctttgccggtgaagcgacgagctcgagcttcccgggctcggttcacggcgcttattcaactggattgatggcagctgaagattgtaggatgcgagttctggagcggtatggtgagttggatctgttccagcctgtgatgggcgaggaaggacctgcctctgtacctcttcttatatctcgtctctaaactccatcagttatcgtttactagaaggaacctcaagtgatgattgtcttaatatgaaactaaaattattctcgtgtcggatcgtttaaaacattcccagtcttattttctcagtgtttttaattcaataaattggaacattatatccttgtgatattatttatatatgataatcatctttaac

SEQ ID NO: 37591 - protein, 490 aa, Arabidopsis thaliana
  peptide (1)..(490): Ceres Seq. ID no. 15222960
MESRKNSDRQMRRANCFSAGERMKTRSPSVIVIGGGFGGISAARTLQDASFQVMVLESRDRIGGRVHTDYSFGFPVDLGASWLHGVCKENPLAPVIGRLGLPLYRTSGDNSVLYDHDLESYALFDMDGNQVPQELVTQIGVTFERILEEINKVRDEQDADISISQAFSIVFSRKPELRLEGLAHNVLQWYVCRMEGWFAADAETISAKCWDQEELLPGGHGLMVRGYRPVINTLAKGLDIRVGHRVTKIVRRYNGVKVTTENGQTFVADAAVIAVPLGVLKSGTIKFEPKLPEWKQEAINDLGVGIENKIILHFEKVFWPKVEFLGVVAETSYGCSYFLNLHKATGHPVLVYMPAGQLAKDIEKMSDEAAANFAVLQLQRILPDALPPVQYLVSRWGSDVNSMGSYSYDIVGKPHDLYERLRVPVDNLFFAGEATSSSFPGSVHGAYSTGLMAAEDCRMRVLERYGELDLFQPVMGEEGPASVPLLISRL

SEQ ID NO: 37592 - protein, 480 aa, Arabidopsis thaliana
  peptide (1)..(480): Ceres Seq. ID no. 15222961
MRRANCFSAGERMKTRSPSVIVIGGGFGGISAARTLQDASFQVMVLESRDRIGGRVHTDYSFGFPVDLGASWLHGVCKENPLAPVIGRLGLPLYRTSGDNSVLYDHDLESYALFDMDGNQVPQELVTQIGVTFERILEEINKVRDEQDADISISQAFSIVFSRKPELRLEGLAHNVLQWYVCRMEGWFAADAETISAKCWDQEELLPGGHGLMVRGYRPVINTLAKGLDIRVGHRVTKIVRRYNGVKVTTENGQTFVADAAVIAVPLGVLKSGTIKFEPKLPEWKQEAINDLGVGIENKIILHFEKVFWPKVEFLGVVAETSYGCSYFLNLHKATGHPVLVYMPAGQLAKDIEKMSDEAAANFAVLQLQRILPDALPPVQYLVSRWGSDVNSMGSYSYDIVGKPHDLYERLRVPVDNLFFAGEATSSSFPGSVHGAYSTGLMAAEDCRMRVLERYGELDLFQPVMGEEGPASVPLLISRL

SEQ ID NO: 37593 - protein, 468 aa, Arabidopsis thaliana
  peptide (1)..(468): Ceres Seq. ID no. 15222962
MKTRSPSVIVIGGGFGGISAARTLQDASFQVMVLESRDRIGGRVHTDYSFGFPVDLGASWLHGVCKENPLAPVIGRLGLPLYRTSGDNSVLYDHDLESYALFDMDGNQVPQELVTQIGVTFERILEEINKVRDEQDADISISQAFSIVFSRKPELRLEGLAHNVLQWYVCRMEGWFAADAETISAKCWDQEELLPGGHGLMVRGYRPVINTLAKGLDIRVGHRVTKIVRRYNGVKVTTENGQTFVADAAVIAVPLGVLKSGTIKFEPKLPEWKQEAINDLGVGIENKIILHFEKVFWPKVEFLGVVAETSYGCSYFLNLHKATGHPVLVYMPAGQLAKDIEKMSDEAAANFAVLQLQRILPDALPPVQYLVSRWGSDVNSMGSYSYDIVGKPHDLYERLRVPVDNLFFAGEATSSSFPGSVHGAYSTGLMAAEDCRMRVLERYGELDLFQPVMGEEGPASVPLLISRL

SEQ ID NO: 37594 - DNA, 1616 bp, Arabidopsis thaliana; identical to SEQ ID NO: 36446
  misc_feature (1)..(1616): Ceres Seq. ID no. 13493832
  misc_feature (1)..(1616): Ortholog of  Ceres SEQ ID NO 13594128 as cited in SEQ ID NO 58608
  misc_feature (1)..(1616): Ortholog of  Ceres SEQ ID NO 14309682 as cited in SEQ ID NO 58908
  misc_feature (1)..(1616): Ortholog of  Ceres SEQ ID NO 15176122 as cited in SEQ ID NO 62462
  misc_feature (1)..(1616): Ortholog of  Ceres SEQ ID NO 12624849 as cited in SEQ ID NO 62773

SEQ ID NO: 37595 - protein, 468 aa, Arabidopsis thaliana; identical to SEQ ID NO: 36447
  peptide (1)..(468): Ceres Seq. ID no. 13493833

SEQ ID NO: 37596 - protein, 428 aa, Arabidopsis thaliana; identical to SEQ ID NO: 36448
  peptide (1)..(428): Ceres Seq. ID no. 13493834

SEQ ID NO: 37597 - protein, 338 aa, Arabidopsis thaliana; identical to SEQ ID NO: 24106
  peptide (1)..(338): Ceres Seq. ID no. 13493835

SEQ ID NO: 37598 - DNA, 1167 bp, Arabidopsis thaliana; identical to SEQ ID NO: 36245
  misc_feature (1)..(1167): Ceres Seq. ID no. 12321925
  misc_feature (1)..(1167): Ortholog of  Ceres SEQ ID NO 13589868 as cited in SEQ ID NO 55521
  misc_feature (1)..(1167): Ortholog of  Ceres SEQ ID NO 12617659 as cited in SEQ ID NO 65286
  misc_feature (1)..(1167): Ortholog of  Ceres SEQ ID NO 12780566 as cited in SEQ ID NO 65822

SEQ ID NO: 37599 - protein, 199 aa, Arabidopsis thaliana; identical to SEQ ID NO: 36246
  peptide (1)..(199): Ceres Seq. ID no. 12321926
  misc_feature (86)..(86): Xaa is any aa, unknown or other
  misc_feature (89)..(89): Xaa is any aa, unknown or other

SEQ ID NO: 37600 - protein, 182 aa, Arabidopsis thaliana; identical to SEQ ID NO: 36247
  peptide (1)..(182): Ceres Seq. ID no. 12321927
  misc_feature (69)..(69): Xaa is any aa, unknown or other
  misc_feature (72)..(72): Xaa is any aa, unknown or other

SEQ ID NO: 37601 - protein, 178 aa, Arabidopsis thaliana; identical to SEQ ID NO: 36248
  peptide (1)..(178): Ceres Seq. ID no. 12321928
  misc_feature (65)..(65): Xaa is any aa, unknown or other
  misc_feature (68)..(68): Xaa is any aa, unknown or other

SEQ ID NO: 37602 - DNA, 692 bp, Arabidopsis thaliana
  misc_feature (1)..(692): Ceres Seq. ID no. 12331275
  misc_feature (1)..(692): Ortholog of  Ceres SEQ ID NO 13594501 as cited in SEQ ID NO 51327
aacttgtcacctgcagagaaagaaagaagccctagattttgtcaaaaggcggttgcagaacaaaaaaccatggccggaattggaccgataactcaggattgggagccggtggtgatccgtaagaaacccgctaacgccgctgccaagcgcgacgagaaaactgtcaacgccgctcgtcgatccggcgccgatatcgagaccgtcagaaaattcaatgctggaaccaacaaggcggcatcaagcggcacatctctgaacacaaaaatgcttgatgatgacactgagaaccttactcatgaacgtgtgcctactgagctaaagaaagccattatgcaagccaggacagacaagaagctaacccagtcccaacttgctcaaatcatcaatgagaagccacaagtgattcaagagtatgagtctggcaaagctatacccaaccagcaaatcctttctaagctggagagagcgcttggagctaagcttcgtggaaagaagtgagccaagttctactgatgtagcaagtaacaagaatcaatgctttcgtctaatgccgtaactttgccaagaagaatattttctgattgtaagaaagcaaaaccgtttgaatgtttgtttcgttgatggaatctctatctcataaactcatatcaatataataacttgggtcttttcatcacatagttgaactgctt

SEQ ID NO: 37603 - protein, 165 aa, Arabidopsis thaliana
  peptide (1)..(165): Ceres Seq. ID no. 12331276
NLSPAEKERSPRFCQKAVAEQKTMAGIGPITQDWEPVVIRKKPANAAAKRDEKTVNAARRSGADIETVRKFNAGTNKAASSGTSLNTKMLDDDTENLTHERVPTELKKAIMQARTDKKLTQSQLAQIINEKPQVIQEYESGKAIPNQQILSKLERALGAKLRGKK

SEQ ID NO: 37604 - protein, 142 aa, Arabidopsis thaliana
  peptide (1)..(142): Ceres Seq. ID no. 12331277
MAGIGPITQDWEPVVIRKKPANAAAKRDEKTVNAARRSGADIETVRKFNAGTNKAASSGTSLNTKMLDDDTENLTHERVPTELKKAIMQARTDKKLTQSQLAQIINEKPQVIQEYESGKAIPNQQILSKLERALGAKLRGKK

SEQ ID NO: 37605 - DNA, 2181 bp, Arabidopsis thaliana
  misc_feature (1)..(2181): Ceres Seq. ID no. 13646180
  misc_feature (1)..(2181): Ortholog of  Ceres SEQ ID NO 14303366 as cited in SEQ ID NO 54418
  misc_feature (1)..(2181): Ortholog of  Ceres SEQ ID NO 13503610 as cited in SEQ ID NO 62416
  misc_feature (1)..(2181): Ortholog of  Ceres SEQ ID NO 13657610 as cited in SEQ ID NO 66165
  misc_feature (1)..(2181): Ortholog of  Ceres SEQ ID NO 13598312 as cited in SEQ ID NO 68448
  misc_feature (1)..(2181): Ortholog of  Ceres SEQ ID NO 13596100 as cited in SEQ ID NO 68573
aaataccctaatcacattttgtaacaataatacaattatacattaaaactctccgacgatgcctcaggcaccgatgccagagttctctagctcggtgaagctcaagtacgtgaaacttggttaccaatatttggttaaccatttcttgagttttcttttgatcccgatcatggctattgtcgccgttgagcttcttcggatgggtcctgaagagatccttaatgtttggaattcactccagtttgacctagttcaggttctatgttcttccttctttgtcatcttcatctccactgtttacttcatgtccaagccacgcaccatctacctcgttgactattcttgttacaagccacctgtcacgtgtcgtgtccccttcgcaactttcatggaacactctcgtttgatcctcaaggacaagcctaagagcgtcgagttccaaatgagaatccttgaacgttctggcctcggtgaggagacttgtctccctccggctattcattatattcctcccacaccaaccatggacgcggctagaagcgaggctcagatggttatcttcgaggccatggacgatcttttcaagaaaaccggtcttaaacctaaagacgtcgacatccttatcgtcaactgctctcttttctctcccacaccatcgctctcagctatggtcatcaacaaatataagcttaggagtaatatcaagagcttcaatctttcggggatgggctgcagcgcgggcctgatctcagttgatctagcccgcgacttgctccaagttcatcccaattcaaatgcaatcatcgtcagcacggagatcataacgcctaattactatcaaggcaacgagagagccatgttgttacccaattgtctcttccgcatgggtgcggcagccatacacatgtcaaaccgccggtctgaccggtggcgagccaaatacaagctttcccacctcgtccggacacaccgtggcgctgacgacaagtctttctactgtgtctacgaacaggaagacaaagaaggacacgttggcatcaacttgtccaaagatctcatggccatcgccggtgaagccctcaaggcaaacatcaccacaataggtcctttggtcctaccggcgtcagaacaacttctcttcctcacgtccctaatcggacgtaaaatcttcaacccgaaatggaaaccatacataccggatttcaagctggccttcgaacacttttgcattcacgcaggaggcagagcggtgatcgacgagctccaaaagaatctacaactatcaggagaacacgttgaggcctcaagaatgacactacatcgttttggtaacacgtcatcttcatcgttatggtacgagcttagctacatcgagtctaaagggagaatgaggagaggcgatcgcgtttggcaaatcgcgtttgggagtggtttcaagtgtaactctgccgtgtggaaatgtaaccgtacgattaagacacctaaggacggaccatggtccgattgtatcgaccgttaccctgtctttattcccgaagttgtcaaactctaaactgaaaacgtctttgaacggtttagtaacggtttgattttgtgttacggtttaggtttatttggtctcgggatttggtttaaaggggattgagaaatgggaagttagagagaagaaaaagcaaagcataaatgtttgtatttaattgctctgcatatacttaaatctctgcttttcatttggggtattttttagtttctcgtgctgtaattaataacttgtggtgtactcaaataagaatatttctctctgttttattatttttaaattggagaataaacttctttgtttccaaaaaaaaaaaaaaaaaacgatgacaagaccaacgtcaaggccgcctggggtaaggtcggcgcgcacgctggcgagtatggtgcggaggccctggagaggatgttcctgtccttccccaccaccaagacctacttcccgcacttcgacctgagccacggctctgcccaggttaagggccacggcaagaaggtggccgacgcgctgaccaacgccgtggcgcacgtggacgacatgcccaacgcgctgtccgccctgagcgacctgcacgcgcacaagcttcgggtggacccggtcaacttcaagctcctaagccactgcctgctggtgagcccatc

SEQ ID NO: 37606 - protein, 497 aa, Arabidopsis thaliana; identical to SEQ ID NO: 23374
  peptide (1)..(497): Ceres Seq. ID no. 13646181

SEQ ID NO: 37607 - protein, 492 aa, Arabidopsis thaliana; identical to SEQ ID NO: 23375
  peptide (1)..(492): Ceres Seq. ID no. 13646182

SEQ ID NO: 37608 - protein, 460 aa, Arabidopsis thaliana; identical to SEQ ID NO: 23376
  peptide (1)..(460): Ceres Seq. ID no. 13646183

SEQ ID NO: 37609 - DNA, 1338 bp, Arabidopsis thaliana
  misc_feature (1)..(1338): Ceres Seq. ID no. 13496332
  misc_feature (1)..(1338): Ortholog of  Ceres SEQ ID NO 15175765 as cited in SEQ ID NO 54076
aaaagaaaaatcgaaaaaaaaaaactctccgactcggaagaagagggagagagatgaagaagccggtcggagccgagaagaagagggttaaacgatcatcgggatctgcatctacttccgttagagattctggttctgattctcaacctaggaagcaagctgtgaagaaggatagttttcagttgtttgctgagaaagttagagaccacaagggattagaatccagatgggctgttatggagcaagcacgagttgaatactttagagggaaagattttgtgagctttatgaagaataaccctgactttaaagatattctggaagaagataaagaccttgacacagacgatattgccaatgttttgttgggaaagaaccttttggtccgctgtgatcgtgttactaaaactcttcgtcccgggaagaaaaagctctctacttggcctgctcatttggagattttccgtgacgatcaatctttctctgaaaatgatgccttttttgcatggacgttcgaaaaacggcatccgctatggcaaacgcttttgtccttcttctggcctgtattgactcttgcaatttgtttgtttcctgtgtatccacaccgttgcaaactaattgtactctactcatgtgcgggcattcttctgatgattctctccttacttttcgtgagagcagttgctttcggtgctatgtggattcttttgggaaagcgtgtctggttcttccccaacattctagctgaggaagccacattgaaggaactgttccgtttctggccaaagaaagacgaggaagaaccgcccaagtggacatctcgacttttctacacagtagtggctattgttgttgtcatgctgcttaggcgtcatgcccctgatgaagctgctcgggccaggtaccaaagaaggatgtccaacatcattgatgatgtccttgagtggtcaccaaagctagcactttctggtttgatggagaatcagcaacctgtaaacatcacagatgcggcaaacaactcctcagattcagcaggaggtcccgaccagactgaagaggtcgacctagatgaaactcaaggcgaggacctagacgaaacgcaaggcaaggaggaagctgaaggttggactgactctgatcttaaaacataaaaaaaccaaaatatagaaacgaaagttcattgtaacaataagtcaacttaagtgaccaagacgaggtgagttctttataagaaagtcttgaaagattttgtggtactccattactcctttacattttgacacaatctggaatttagctctcaatcacagttttgtattccaaacttcaattccagct

SEQ ID NO: 37610 - protein, 382 aa, Arabidopsis thaliana
  peptide (1)..(382): Ceres Seq. ID no. 13496333
KKNRKKKTLRLGRRGREMKKPVGAEKKRVKRSSGSASTSVRDSGSDSQPRKQAVKKDSFQLFAEKVRDHKGLESRWAVMEQARVEYFRGKDFVSFMKNNPDFKDILEEDKDLDTDDIANVLLGKNLLVRCDRVTKTLRPGKKKLSTWPAHLEIFRDDQSFSENDAFFAWTFEKRHPLWQTLLSFFWPVLTLAICLFPVYPHRCKLIVLYSCAGILLMILSLLFVRAVAFGAMWILLGKRVWFFPNILAEEATLKELFRFWPKKDEEEPPKWTSRLFYTVVAIVVVMLLRRHAPDEAARARYQRRMSNIIDDVLEWSPKLALSGLMENQQPVNITDAANNSSDSAGGPDQTEEVDLDETQGEDLDETQGKEEAEGWTDSDLKT

SEQ ID NO: 37611 - protein, 365 aa, Arabidopsis thaliana
  peptide (1)..(365): Ceres Seq. ID no. 13496334
MKKPVGAEKKRVKRSSGSASTSVRDSGSDSQPRKQAVKKDSFQLFAEKVRDHKGLESRWAVMEQARVEYFRGKDFVSFMKNNPDFKDILEEDKDLDTDDIANVLLGKNLLVRCDRVTKTLRPGKKKLSTWPAHLEIFRDDQSFSENDAFFAWTFEKRHPLWQTLLSFFWPVLTLAICLFPVYPHRCKLIVLYSCAGILLMILSLLFVRAVAFGAMWILLGKRVWFFPNILAEEATLKELFRFWPKKDEEEPPKWTSRLFYTVVAIVVVMLLRRHAPDEAARARYQRRMSNIIDDVLEWSPKLALSGLMENQQPVNITDAANNSSDSAGGPDQTEEVDLDETQGEDLDETQGKEEAEGWTDSDLKT

SEQ ID NO: 37612 - protein, 304 aa, Arabidopsis thaliana
  peptide (1)..(304): Ceres Seq. ID no. 13496335
MEQARVEYFRGKDFVSFMKNNPDFKDILEEDKDLDTDDIANVLLGKNLLVRCDRVTKTLRPGKKKLSTWPAHLEIFRDDQSFSENDAFFAWTFEKRHPLWQTLLSFFWPVLTLAICLFPVYPHRCKLIVLYSCAGILLMILSLLFVRAVAFGAMWILLGKRVWFFPNILAEEATLKELFRFWPKKDEEEPPKWTSRLFYTVVAIVVVMLLRRHAPDEAARARYQRRMSNIIDDVLEWSPKLALSGLMENQQPVNITDAANNSSDSAGGPDQTEEVDLDETQGEDLDETQGKEEAEGWTDSDLKT

SEQ ID NO: 37613 - DNA, 968 bp, Arabidopsis thaliana
  misc_feature (1)..(968): Ceres Seq. ID no. 12331278
  misc_feature (1)..(968): Ortholog of  Ceres SEQ ID NO 15178873 as cited in SEQ ID NO 1103
  misc_feature (1)..(968): Ortholog of  Ceres SEQ ID NO 15173557 as cited in SEQ ID NO 60031
  misc_feature (1)..(968): Ortholog of  Ceres SEQ ID NO 13661430 as cited in SEQ ID NO 61258
  misc_feature (1)..(968): Ortholog of  Ceres SEQ ID NO 13590940 as cited in SEQ ID NO 68653
  misc_feature (1)..(968): Ortholog of  Ceres SEQ ID NO 15179001 as cited in SEQ ID NO 0
actcttttggccttatccgaaatctttttgtgggcagaaacgtttgtgtcttaggccaatctctgtgtctctctgtccagagagaaatggcagcatcatcagtactactctcgtgcttcaaatcccatcatcaaccaaaccttctccatggctgcaactactcatctaaccaaacactcctcagattcaacttttcaaccccaaaacctctcctgatctcctcacggagctgctcacgacgattcagagtcttgtcagagaccatcaccgtcaaattggaagaggaggagaaggatgatggtgcaagtgctgttcttgatcctcctgccgccgttaacactaagctctacttcggtaacttgccttacaatgttgacagtgcaactctggctcaaatcattcaagatttcgctaaccctgagctcgttgaggttctttacaacagagataccggacagagtcgtggattcgccttcgttaccatgagcaatgtcgaagattgcaacatcatcatcgataacctcgatggaactgagtatcttggtcgtgctttgaaagtgaactttgcagacaaaccaaagcctaacaaagaacctctgtatccagaaacagagcacaagctctttgttggtaacttatcatggactgttacttccgagtcattagctggagcgtttcgagaatgtggagatgtggttggggctagagttgtgtttgatggagatacaggaagatcacggggttatggctttgtatgttactcttccaaagcagaaatggaaaccgctcttgaatcgcttgacggatttgagctggagggtcgggcgattcgagtaaaccttgctcaagggaagaaattttgatatcatacaacaacattgtgtaatcattttgagttttatacattagagttatgtttatattgattgaactaattaactcaaaagatcaataaaactttttatgct

SEQ ID NO: 37614 - protein, 286 aa, Arabidopsis thaliana
  peptide (1)..(286): Ceres Seq. ID no. 12331279
SFGLIRNLFVGRNVCVLGQSLCLSVQREMAASSVLLSCFKSHHQPNLLHGCNYSSNQTLLRFNFSTPKPLLISSRSCSRRFRVLSETITVKLEEEEKDDGASAVLDPPAAVNTKLYFGNLPYNVDSATLAQIIQDFANPELVEVLYNRDTGQSRGFAFVTMSNVEDCNIIIDNLDGTEYLGRALKVNFADKPKPNKEPLYPETEHKLFVGNLSWTVTSESLAGAFRECGDVVGARVVFDGDTGRSRGYGFVCYSSKAEMETALESLDGFELEGRAIRVNLAQGKKF

SEQ ID NO: 37615 - protein, 258 aa, Arabidopsis thaliana
  peptide (1)..(258): Ceres Seq. ID no. 12331280
MAASSVLLSCFKSHHQPNLLHGCNYSSNQTLLRFNFSTPKPLLISSRSCSRRFRVLSETITVKLEEEEKDDGASAVLDPPAAVNTKLYFGNLPYNVDSATLAQIIQDFANPELVEVLYNRDTGQSRGFAFVTMSNVEDCNIIIDNLDGTEYLGRALKVNFADKPKPNKEPLYPETEHKLFVGNLSWTVTSESLAGAFRECGDVVGARVVFDGDTGRSRGYGFVCYSSKAEMETALESLDGFELEGRAIRVNLAQGKKF

SEQ ID NO: 37616 - DNA, 889 bp, Arabidopsis thaliana
  misc_feature (1)..(889): Ceres Seq. ID no. 13491579
  misc_feature (1)..(889): Ortholog of  Ceres SEQ ID NO 13600601 as cited in SEQ ID NO 497
  misc_feature (1)..(889): Ortholog of  Ceres SEQ ID NO 13664283 as cited in SEQ ID NO 61283
  misc_feature (1)..(889): Ortholog of  Ceres SEQ ID NO 12635513 as cited in SEQ ID NO 0
  misc_feature (1)..(889): Ortholog of  Ceres SEQ ID NO 15179044 as cited in SEQ ID NO 0
  misc_feature (1)..(889): Ortholog of  Ceres SEQ ID NO 15179333 as cited in SEQ ID NO 0
aagcaaaaaaaaaaaaaaacagagcaaaatggccgtagttttacgtggaggcatcaccggaggatttcttcaccatcgtcgtgacgcttcatccgtcatcacaagaagaatctcatccgtcaaagccgcaggaggaggcatcaacccaacggtggctgttgaacgtgccacgtggctacctggactaaaccctcctccttatcttgatggaaatttagctggagattacgggtttgacccactcgggttaggagaggatccggaaagcttgaagtggtatgttcaagcagagcttgttcactctcgtttcgctatgctcggtgttgcaggaatactcttcactgatctccttcggaccacagggattcgtaatttaccggtttggtatgaagctggagctgtgaaatttgattttgctagtacaaaaactctcatagttgtacagtttctacttatggggtttgctgagactaaaaggtatatggattttgtctctccgggatcacaagccaaagaaggatcgtttttctttggacttgaagcagcactcgaggggctcgagcctggatatcccggaggaccgcttttaaacccattaggccttgctaaggatgttcaaaatgctcatgactggaagcttaaggagatcaagaacggtcgtctagcgatgatggcgatgctcgggttctttgttcaagcctctgtgactcacactggccctattgataaccttgttgagcatctctctaatccatggcataagaccatcattcaaaccctcttcacctctacatcttaggtacattcttttgtaatgaaaaattcgattattcgacaagtgtatcaatacctttatttcatttaagagtacaacaaatctgttctaatc

SEQ ID NO: 37617 - protein, 265 aa, Arabidopsis thaliana
  peptide (1)..(265): Ceres Seq. ID no. 13491580
SKKKKKQSKMAVVLRGGITGGFLHHRRDASSVITRRISSVKAAGGGINPTVAVERATWLPGLNPPPYLDGNLAGDYGFDPLGLGEDPESLKWYVQAELVHSRFAMLGVAGILFTDLLRTTGIRNLPVWYEAGAVKFDFASTKTLIVVQFLLMGFAETKRYMDFVSPGSQAKEGSFFFGLEAALEGLEPGYPGGPLLNPLGLAKDVQNAHDWKLKEIKNGRLAMMAMLGFFVQASVTHTGPIDNLVEHLSNPWHKTIIQTLFTSTS

SEQ ID NO: 37618 - protein, 256 aa, Arabidopsis thaliana
  peptide (1)..(256): Ceres Seq. ID no. 13491581
MAVVLRGGITGGFLHHRRDASSVITRRISSVKAAGGGINPTVAVERATWLPGLNPPPYLDGNLAGDYGFDPLGLGEDPESLKWYVQAELVHSRFAMLGVAGILFTDLLRTTGIRNLPVWYEAGAVKFDFASTKTLIVVQFLLMGFAETKRYMDFVSPGSQAKEGSFFFGLEAALEGLEPGYPGGPLLNPLGLAKDVQNAHDWKLKEIKNGRLAMMAMLGFFVQASVTHTGPIDNLVEHLSNPWHKTIIQTLFTSTS

SEQ ID NO: 37619 - protein, 161 aa, Arabidopsis thaliana
  peptide (1)..(161): Ceres Seq. ID no. 13491582
MLGVAGILFTDLLRTTGIRNLPVWYEAGAVKFDFASTKTLIVVQFLLMGFAETKRYMDFVSPGSQAKEGSFFFGLEAALEGLEPGYPGGPLLNPLGLAKDVQNAHDWKLKEIKNGRLAMMAMLGFFVQASVTHTGPIDNLVEHLSNPWHKTIIQTLFTSTS

SEQ ID NO: 37620 - DNA, 1189 bp, Arabidopsis thaliana
  misc_feature (1)..(1189): Ceres Seq. ID no. 12599958
  misc_feature (1)..(1189): Ortholog of  Ceres SEQ ID NO 13593955 as cited in SEQ ID NO 54278
  misc_feature (1)..(1189): Ortholog of  Ceres SEQ ID NO 13597380 as cited in SEQ ID NO 64054
cagaaaaattttggacttattttcgatatgtttaggggaaaaatatttgtgttatcattattttctatttacgtcctctcatcagcggctgaaaaaaatacatcattttctgcgctttttgcttttggtgattcagtcttagatacgggaaacaataattttcttcttactcttctcaaaggaaattattggccatatggtttgagttttgactataaatttccgacgggaagattcggaaatggaagagttttcaccgatatagttgccgaagtttacagatcaaaagacttgtaccagcttatagcaagattcgtcgcatcagttctgaagaccttaagactggcgtttgttttgcatcaggtggttcaggaattgacgatcttacatcccgaacactgagagttttatcggcaggtgaccaagtaaaagactttaaagactatttgaagaaactaagaagagtagtgaaacgtaagaaaaaagtaaaagaaatagtttcaaaacccnggggcccccnttttngggtgtttcttatttctgaaggaaataatgatcttggatactttgtcgctcccgctcttcttcgattacagtccacaacaacatacaccagtaaaatggttgtttggaccagaaagtttctaaaagatttatatgatcttggagcgagaaaatttgcggtgatgggagtgatgcctgtgggatgtttgcctatccatcgagcctcattcggtggggtattcggatggtgtaacttcctcttgaatagagttacggaggacttcaacatgaaattgcagaaaggtcttacaagttacgcagtagaatatgatttcaaagatgcaaagtttgtttacgtcgacatatacggtactcttatggatcttgtcaaaaatcctatggcctatgggtttacagaagcgaaaaaagcttgttgttgtatgccgaatgcaataataccatgcttccatccagataaatacgtcttctatgactttgctcacccttcccagaaagcctacgaagtaatatctaaacctattgtctatcagatagcgaaaggccttgcctagctaattccttatttcctacaatgttttattataatctttgaaaattatcaccatatcgataaatatatgtaaatgtataagattcatgacaatctattcgtttttcttattgg

SEQ ID NO: 37621 - protein, 151 aa, Arabidopsis thaliana
  peptide (1)..(151): Ceres Seq. ID no. 12599959
MVVWTRKFLKDLYDLGARKFAVMGVMPVGCLPIHRASFGGVFGWCNFLLNRVTEDFNMKLQKGLTSYAVEYDFKDAKFVYVDIYGTLMDLVKNPMAYGFTEAKKACCCMPNAIIPCFHPDKYVFYDFAHPSQKAYEVISKPIVYQIAKGLA

SEQ ID NO: 37622 - protein, 133 aa, Arabidopsis thaliana
  peptide (1)..(133): Ceres Seq. ID no. 12599960
QKNFGLIFDMFRGKIFVLSLFSIYVLSSAAEKNTSFSALFAFGDSVLDTGNNNFLLTLLKGNYWPYGLSFDYKFPTGRFGNGRVFTDIVAEVYRSKDLYQLIARFVASVLKTLRLAFVLHQVVQELTILHPEH

SEQ ID NO: 37623 - protein, 129 aa, Arabidopsis thaliana
  peptide (1)..(129): Ceres Seq. ID no. 12599961
MGVMPVGCLPIHRASFGGVFGWCNFLLNRVTEDFNMKLQKGLTSYAVEYDFKDAKFVYVDIYGTLMDLVKNPMAYGFTEAKKACCCMPNAIIPCFHPDKYVFYDFAHPSQKAYEVISKPIVYQIAKGLA

SEQ ID NO: 37624 - DNA, 1225 bp, Arabidopsis thaliana
  misc_feature (1)..(1225): Ceres Seq. ID no. 12384468
  misc_feature (1)..(1225): Ortholog of  Ceres SEQ ID NO 15225993 as cited in SEQ ID NO 61065
aacccaagatctctccttcttgtttccccagatctgaaatttcaaaagctacccaattttaactcaagactctgaacaacacatctagatccatttccatggcgagcgcctggaaaaaagacaagaaccaaaaacttttatcaccaaagacactaatctcacttcttgtcctttccattatcttcctctcttctctcttcttcttcttctctaactcctctctccaatactccaatccaaatctctccatcaattccccatacccaatccctccttttgattgcttcaaatgtccacaatcaaaacccataatcgcaaacgtcgtcgagaatctcaagtacccttttgtttactctctcgctgatctcggtaatctcccggagaaaccacataagaacattgttaggctacttaaaggtaagccctttaggaaaccagatatctccgcaacgattcaggaggtattggatagtatgagagctagtggtaaaaatgggattgttgttgatgttggagctaatgttggtatggctagctttgctgctgcggttatggggtttaaagttcttgcctttgagcctgtttttgagaatttacagaggatttgtgatgggatttggtttaatagagtttcttctttggttactgtgtttgaagctgctgcttctgacagaacaggggatattaccttccataagttggtaggacggcttgacaatagcgcggtttcggaggtgggagcaaggcttgcattcaagtccaacaaagagatagcagtgcaagtcaaatccatacctcttgataaactaattccaccttctcaacctgttcttcttatcaagatcgacgttcaaggttgggaataccacgttttaaagggtgcgaagaagttgctttcaaggaaaccagcagaagctccttatctaatctatgaggaagatgagagattgctcacggcaagcaatagtagctcgaaagagatacgtgattttcttaaaagcgttggatatagtaagtgtagccagcatgggacagatgcacattgcaccaaggagtgaaagacattggacttaccgacaaatggtaataagatgccatacaagttgaggaatataaggaagatgagcaataggtatttgcagagaaaaacatttagtttataagttgccaaatttggtcagtcatgtttgtttctccttgtaatatgtactcaattttttttggt

SEQ ID NO: 37625 - protein, 319 aa, Arabidopsis thaliana
  peptide (1)..(319): Ceres Seq. ID no. 12384469
MASAWKKDKNQKLLSPKTLISLLVLSIIFLSSLFFFFSNSSLQYSNPNLSINSPYPIPPFDCFKCPQSKPIIANVVENLKYPFVYSLADLGNLPEKPHKNIVRLLKGKPFRKPDISATIQEVLDSMRASGKNGIVVDVGANVGMASFAAAVMGFKVLAFEPVFENLQRICDGIWFNRVSSLVTVFEAAASDRTGDITFHKLVGRLDNSAVSEVGARLAFKSNKEIAVQVKSIPLDKLIPPSQPVLLIKIDVQGWEYHVLKGAKKLLSRKPAEAPYLIYEEDERLLTASNSSSKEIRDFLKSVGYSKCSQHGTDAHCTKE

SEQ ID NO: 37626 - protein, 194 aa, Arabidopsis thaliana
  peptide (1)..(194): Ceres Seq. ID no. 12384470
MRASGKNGIVVDVGANVGMASFAAAVMGFKVLAFEPVFENLQRICDGIWFNRVSSLVTVFEAAASDRTGDITFHKLVGRLDNSAVSEVGARLAFKSNKEIAVQVKSIPLDKLIPPSQPVLLIKIDVQGWEYHVLKGAKKLLSRKPAEAPYLIYEEDERLLTASNSSSKEIRDFLKSVGYSKCSQHGTDAHCTKE

SEQ ID NO: 37627 - protein, 176 aa, Arabidopsis thaliana
  peptide (1)..(176): Ceres Seq. ID no. 12384471
MASFAAAVMGFKVLAFEPVFENLQRICDGIWFNRVSSLVTVFEAAASDRTGDITFHKLVGRLDNSAVSEVGARLAFKSNKEIAVQVKSIPLDKLIPPSQPVLLIKIDVQGWEYHVLKGAKKLLSRKPAEAPYLIYEEDERLLTASNSSSKEIRDFLKSVGYSKCSQHGTDAHCTKE

SEQ ID NO: 37628 - DNA, 1251 bp, Arabidopsis thaliana
  misc_feature (1)..(1251): Ceres Seq. ID no. 12577599
  misc_feature (1)..(1251): Ortholog of  Ceres SEQ ID NO 15171279 as cited in SEQ ID NO 51378
  misc_feature (1)..(1251): Ortholog of  Ceres SEQ ID NO 13596816 as cited in SEQ ID NO 62287
atacatatcaatgttaatttgtatataaggagctaagaacaaacccaattaggcaactagcaattgctaaaacacgtaagatctcaaatatgaccacgttattcctccttattgctctattcatcacaaccatcctcaacccaacaagtggagaatcagtaggtgtatgctatggaatgatggggaacaaccttccttctcaatcagacacaatcgctctctttagacaaaacaacatccgacgtgttagactctacgatccaaaccaagccgctttaaacgctcttagaaacacgggtatcgaagtcatcatcggcgttccaaacaccgatcttcgttcactcactaacccttcttccgctagatcatggctccaaaacaacgtcctcaactattaccccgccgttagcttcaagtacatcgccgtaggtaacgaagtatctccgtcgaacggcggtgatgttgtgctccctgccatgcgtaacgtttacgatgctctaagaggtgcaaatcttcaagatcgtattaaagtttctaccgccattgatatgactttgattggaaactctttccctccttcctccggagagtttcgtggtgacgttagatggtatatcgatcccgtcatcgggtttcttacgagtacgaactcagcgttactagccaacatctatccttacttcagctacgttgacaatccacgtgacatatctctctcttacgctctcttcacttctccttccgtcgtcgtatgggacggctctcgtggctaccaaaacctctttgacgctttacttgacgttgtttactctgccgttgaacgctcaggcggtggatctctcccagtggttgtttccgagagcggatggccttctaacggtggaaacgccgcgagtttcgataacgcgcgagctttttacacgaatcttgcgtcgcgtgtgagagagaacagaggaacaccgaagagacctggaagaggagtggaaacgtatttgttcgctatgtttgatgagaatcaaaagagtcctgagatcgagaagaattttggtttgttttttcctaataaacaaccaaaatttccgatcacattctctgccgcgagagacggtacggcggttgagtgatgattttatatgctgagatttatgtgaataattgggagattatcccataaaaggttccaaataaagacaaatttcaaataaaacctgttagtccaagttaaattaaatactcggctttgttttggtc

SEQ ID NO: 37629 - protein, 344 aa, Arabidopsis thaliana; identical to SEQ ID NO: 26618
  peptide (1)..(344): Ceres Seq. ID no. 12577600

SEQ ID NO: 37630 - protein, 315 aa, Arabidopsis thaliana; identical to SEQ ID NO: 26619
  peptide (1)..(315): Ceres Seq. ID no. 12577601

SEQ ID NO: 37631 - protein, 314 aa, Arabidopsis thaliana; identical to SEQ ID NO: 26620
  peptide (1)..(314): Ceres Seq. ID no. 12577602

SEQ ID NO: 37632 - DNA, 584 bp, Arabidopsis thaliana
  misc_feature (1)..(584): Ceres Seq. ID no. 12326973
  misc_feature (1)..(584): Ortholog of  Ceres SEQ ID NO 14304689 as cited in SEQ ID NO 53265
  misc_feature (1)..(584): Ortholog of  Ceres SEQ ID NO 14307820 as cited in SEQ ID NO 53938
  misc_feature (1)..(584): Ortholog of  Ceres SEQ ID NO 15177137 as cited in SEQ ID NO 55030
  misc_feature (1)..(584): Ortholog of  Ceres SEQ ID NO 13599557 as cited in SEQ ID NO 0
tcaattaacataaccttcgccgtcgatgaagctttcccttcaattcccactaccttcagcgtcgcaacgaaacaacactacgacgtaaaaccaatccaccatgaagtttatgacggagaaaggaagatatacgacatcagccaccagtacacgccggagttgccggtttgggagtcttcagaaggactagggaactttcttagacttgccgtgagtatgaagaatggatccgatgctaatatctcgaagatggaactatctgttcactctggaactcatgttgatgcaccaggccatttccatgaccattattatgagtctggttttgatactgattcacttgatcttcaaatccttaatggtaaacatttttggaactcttttttttttttttttttaagtagctagtgatcgtttttgaaattggtttctgtgaatttaatttataggtcctgctttattggttgatgttccaagagataagaacatttcaggtttgttgagagttttctaacattgaaatttttacaaaatcttcattaaatgtttgttacaaaatttttgtgtaatgatttggttgttgt

SEQ ID NO: 37633 - protein, 135 aa, Arabidopsis thaliana
  peptide (1)..(135): Ceres Seq. ID no. 12326974
SINITFAVDEAFPSIPTTFSVATKQHYDVKPIHHEVYDGERKIYDISHQYTPELPVWESSEGLGNFLRLAVSMKNGSDANISKMELSVHSGTHVDAPGHFHDHYYESGFDTDSLDLQILNGKHFWNSFFFFFLSS

SEQ ID NO: 37634 - DNA, 1688 bp, Arabidopsis thaliana
  misc_feature (1)..(1688): Ceres Seq. ID no. 12327466
  misc_feature (1)..(1688): Ortholog of  Ceres SEQ ID NO 13596816 as cited in SEQ ID NO 62287
aacaccactctctctttctctgtgtctccttcaaatcttcatctctctctccatctctcttctccacaagaagctgagtatggatctcctcacaccactcatcttcctcctcctcctcctctcaccattttcactctcagatgctggttccatcggagtaaactacggccgaatctccgacgaactcccctccgcattcaaagtagtccaactactaaaatcccaaggaatcacgcgagtcaaaatcttcgacgcagacccatcagttctcaaagcattatccggatctggaatcaaagtcaccgtagatctccccaacgagttactcttctccgccgccaaaagaacttccttcgccgtctcatgggtcaaacgcaacgtagcagcttatcatccttcaacacagatcgaatcaatagctgttggtaacgaagtcttcgttgatacacacaacactacaagcttcttgatccctgcaatgagaaacattcacaaagctcttatgagtttcaatctccactccgacattaaaatctcttctcctcttgctttaagcgctcttcaaaactcttacccttcttcctccggttctttccgaccagaacttgtcgactctgttatcaaaccaatgcttgacttcttacgtgaaactggttcaagacttatgatcaatgtctatcctttctttgcttatgaaggaaactctgacgtcattcctttagattatgctttgcttagagagaatccaggaatggttgattctggtaatggtttgagatactttaatctcttcgacgctcaaatcgacgccgttttcgcagcaatgtcggctttaaagtacgatgatatcgaaatcattgtcacggaaactggttggccctcgaaaggagatgagaatgaagtcggagctactctagctaacgcagcttcttacaacggaaacttaatccgtcggatcttgacacgtggaggtacaccgttacgtcctaaagcagatctaacggtctatcttttcgctctgttcaacgagaacaagaagttaggtccaacgtcggagagaaactatggtctcttcttccctgatgagaagaaagtctacgacattcctttcacaacagaggggttgaaacattaccgtgacggtggtcatactccggtcaccggaggagatcaggttacaaagcctccgatgagtggaggcgtgtcgaagagtttgaatggttatacttggtgtgtagctaatggtgatgctggtgaagaaaggttacaaggtggtttagattatgcttgtggtgaaggtggtgctgattgtcgcccgattcaacctggtgctaactgttatagtcctgatacacttgaggctcacgcttcgtttgctttcaatagttattaccagaagaagggtcgtgccggtgggagttgttacttcggcggcgccgcttacgtcgttagccaaccaccgaagtatggaagatgcgagtttccgacaggatattaaggaagaagaaggtttgagtttagattaatttctgctatataatatattcgtattttgatgtattttgtttggtgggaagttttagttaatttttgtaacaatgactttttaatgttgtgttgttaataccaacttagacgatgttattgatatttgatatttaggtaatgaaattaaatatgtttgtttc

SEQ ID NO: 37635 - protein, 498 aa, Arabidopsis thaliana
  peptide (1)..(498): Ceres Seq. ID no. 12327467
TPLSLSLCLLQIFISLSISLLHKKLSMDLLTPLIFLLLLLSPFSLSDAGSIGVNYGRISDELPSAFKVVQLLKSQGITRVKIFDADPSVLKALSGSGIKVTVDLPNELLFSAAKRTSFAVSWVKRNVAAYHPSTQIESIAVGNEVFVDTHNTTSFLIPAMRNIHKALMSFNLHSDIKISSPLALSALQNSYPSSSGSFRPELVDSVIKPMLDFLRETGSRLMINVYPFFAYEGNSDVIPLDYALLRENPGMVDSGNGLRYFNLFDAQIDAVFAAMSALKYDDIEIIVTETGWPSKGDENEVGATLANAASYNGNLIRRILTRGGTPLRPKADLTVYLFALFNENKKLGPTSERNYGLFFPDEKKVYDIPFTTEGLKHYRDGGHTPVTGGDQVTKPPMSGGVSKSLNGYTWCVANGDAGEERLQGGLDYACGEGGADCRPIQPGANCYSPDTLEAHASFAFNSYYQKKGRAGGSCYFGGAAYVVSQPPKYGRCEFPTGY

SEQ ID NO: 37636 - protein, 472 aa, Arabidopsis thaliana
  peptide (1)..(472): Ceres Seq. ID no. 12327468
MDLLTPLIFLLLLLSPFSLSDAGSIGVNYGRISDELPSAFKVVQLLKSQGITRVKIFDADPSVLKALSGSGIKVTVDLPNELLFSAAKRTSFAVSWVKRNVAAYHPSTQIESIAVGNEVFVDTHNTTSFLIPAMRNIHKALMSFNLHSDIKISSPLALSALQNSYPSSSGSFRPELVDSVIKPMLDFLRETGSRLMINVYPFFAYEGNSDVIPLDYALLRENPGMVDSGNGLRYFNLFDAQIDAVFAAMSALKYDDIEIIVTETGWPSKGDENEVGATLANAASYNGNLIRRILTRGGTPLRPKADLTVYLFALFNENKKLGPTSERNYGLFFPDEKKVYDIPFTTEGLKHYRDGGHTPVTGGDQVTKPPMSGGVSKSLNGYTWCVANGDAGEERLQGGLDYACGEGGADCRPIQPGANCYSPDTLEAHASFAFNSYYQKKGRAGGSCYFGGAAYVVSQPPKYGRCEFPTGY

SEQ ID NO: 37637 - protein, 339 aa, Arabidopsis thaliana
  peptide (1)..(339): Ceres Seq. ID no. 12327469
MRNIHKALMSFNLHSDIKISSPLALSALQNSYPSSSGSFRPELVDSVIKPMLDFLRETGSRLMINVYPFFAYEGNSDVIPLDYALLRENPGMVDSGNGLRYFNLFDAQIDAVFAAMSALKYDDIEIIVTETGWPSKGDENEVGATLANAASYNGNLIRRILTRGGTPLRPKADLTVYLFALFNENKKLGPTSERNYGLFFPDEKKVYDIPFTTEGLKHYRDGGHTPVTGGDQVTKPPMSGGVSKSLNGYTWCVANGDAGEERLQGGLDYACGEGGADCRPIQPGANCYSPDTLEAHASFAFNSYYQKKGRAGGSCYFGGAAYVVSQPPKYGRCEFPTGY

SEQ ID NO: 37638 - DNA, 1161 bp, Arabidopsis thaliana
  misc_feature (1)..(1161): Ceres Seq. ID no. 12369896
  misc_feature (1)..(1161): Ortholog of  Ceres SEQ ID NO 14304848 as cited in SEQ ID NO 54575
  misc_feature (1)..(1161): Ortholog of  Ceres SEQ ID NO 12617447 as cited in SEQ ID NO 65185
gttttcgaaacgttcacatcactgcgtctcgtttgataaaccctaagcccttttcttcttcgattctccattttcttcctctctgttccggcgacgcttctcctcgccgttccaatcctctccggcatagaaactcggtgtctccttcatcttcctttcccttctgttcgacttcttccttttcttctttctacattcctatggcgggaggagatggtcaggtgtctcattcgcttgagaagcagttcgagagtttccgtgttcaattggaagaatctgcagctttgagagagcagattcgtgctgtggttatggagattgagtctgctactaggcttattcaagctaatcttcttctcgttcatcaatcgcgtcctattcctgaggttatcgagaaagctaaggaaaaaatcgttgatttgaagcagtattatggtcggcttgctgaaattcttgaggagtgtcctggacaatactataggtaccatggagactggagaagtgaaacacaggcagtggtctcccagcttgcttttatgcactggctagaaactggaactcttctcgtgcataccgaagctgaagaaaaacttgggttgaacagtttggagtttggattggagacagaagattatctcactggaatttgtttcatgtcaaacgatttgcctaggtacgtggttaatcgagtgacagcaggagactatgactgcccaagaaaggtgatgaatttcctgacagatcttcatgcagcctttcgcatgctcaatctcaggaacgatttcctgcgcaagaaattcgacagtatgaagtacgacctaagaagagtggaagaagtttactatgatgtcaagatccgaggtttgatttccggcggagatcctcctggcgtccaagcagtccaaggccaatcctaaatgtcctcggctctttttaagtttttatgtataactttgtttagctagcatgaaaacgtcaaggagtgttcttctctaaaccaaaaacggcaaggaaaatagagagactgtagtttttaggtgtagtttgcaattactgaaaacggcaagtattccttttgtgggccttgaaagcccacattttagtcacaactttactgttatccgaagtcagcagcttaatagtataacagtagatgttcat

SEQ ID NO: 37639 - protein, 304 aa, Arabidopsis thaliana
  peptide (1)..(304): Ceres Seq. ID no. 12369897
FRNVHITASRLINPKPFSSSILHFLPLCSGDASPRRSNPLRHRNSVSPSSSFPFCSTSSFSSFYIPMAGGDGQVSHSLEKQFESFRVQLEESAALREQIRAVVMEIESATRLIQANLLLVHQSRPIPEVIEKAKEKIVDLKQYYGRLAEILEECPGQYYRYHGDWRSETQAVVSQLAFMHWLETGTLLVHTEAEEKLGLNSLEFGLETEDYLTGICFMSNDLPRYVVNRVTAGDYDCPRKVMNFLTDLHAAFRMLNLRNDFLRKKFDSMKYDLRRVEEVYYDVKIRGLISGGDPPGVQAVQGQS

SEQ ID NO: 37640 - protein, 238 aa, Arabidopsis thaliana
  peptide (1)..(238): Ceres Seq. ID no. 12369898
MAGGDGQVSHSLEKQFESFRVQLEESAALREQIRAVVMEIESATRLIQANLLLVHQSRPIPEVIEKAKEKIVDLKQYYGRLAEILEECPGQYYRYHGDWRSETQAVVSQLAFMHWLETGTLLVHTEAEEKLGLNSLEFGLETEDYLTGICFMSNDLPRYVVNRVTAGDYDCPRKVMNFLTDLHAAFRMLNLRNDFLRKKFDSMKYDLRRVEEVYYDVKIRGLISGGDPPGVQAVQGQS

SEQ ID NO: 37641 - protein, 201 aa, Arabidopsis thaliana
  peptide (1)..(201): Ceres Seq. ID no. 12369899
MEIESATRLIQANLLLVHQSRPIPEVIEKAKEKIVDLKQYYGRLAEILEECPGQYYRYHGDWRSETQAVVSQLAFMHWLETGTLLVHTEAEEKLGLNSLEFGLETEDYLTGICFMSNDLPRYVVNRVTAGDYDCPRKVMNFLTDLHAAFRMLNLRNDFLRKKFDSMKYDLRRVEEVYYDVKIRGLISGGDPPGVQAVQGQS

SEQ ID NO: 37642 - DNA, 1007 bp, Arabidopsis thaliana
  misc_feature (1)..(1007): Ceres Seq. ID no. 12331289
  misc_feature (1)..(1007): Ortholog of  Ceres SEQ ID NO 12377905 as cited in SEQ ID NO 1260
ccaaatttctccatggatcgttctttgaatctcctcgatttagccttagggttcgatgagcagctagctattccatcgccactaaatggaaaagtaatactaatagaagactgtgtagagacgagtggttcctttgtacttcaccagctaatgaaacgtgttctctcctctaactcctccgacgcacttatctttctcgcttttgctcgccctttctctcattatgatcgaatcttgcgtaaactgggatgtaatttagctacccataagtcgaataatcgattggtgttctttgacatgctcatggttaagtgttcagatggggatcaaatggaagacaatgtgagtgcagttgcgaaactatttcgggagatacaagaaaccgttcgaaagctacagagtgtaacaagtggtaacataactgttatggtggatgacatgtctctgctggaaattgctactaccggcagcaactcagatcacgtattggacttcttgcattattgccacacattaagttctgaaagcaattgttcattggtcatcctcaatcatgaagatatatacgcgagcatggagagacctgcatttttgctacagatggtatgccttgcagatgttgtgataaaggcagagcctttagcctctggtttagcaaatgatgtacatggccaattgactgttctgaacaaagggataagcaactcaggtagaggaagctcgaggaacaagttgcagaattttcaattcaggatcaaggaaaatggtatcgactatttctatcctggttgcagaagctgaggattagacaccgttctgagcattagcatggtagtgagatgcatctagacagttttgttatttgcgtttaggttaaacagagacactctgttcaacatttttactttagtgtctcttctggttgtaacttgatgacttagctaaagttgaatgcttgagacacagaaacttgtagacatggaaaattagtaacattctatatcttt

SEQ ID NO: 37643 - protein, 266 aa, Arabidopsis thaliana
  peptide (1)..(266): Ceres Seq. ID no. 12331290
PNFSMDRSLNLLDLALGFDEQLAIPSPLNGKVILIEDCVETSGSFVLHQLMKRVLSSNSSDALIFLAFARPFSHYDRILRKLGCNLATHKSNNRLVFFDMLMVKCSDGDQMEDNVSAVAKLFREIQETVRKLQSVTSGNITVMVDDMSLLEIATTGSNSDHVLDFLHYCHTLSSESNCSLVILNHEDIYASMERPAFLLQMVCLADVVIKAEPLASGLANDVHGQLTVLNKGISNSGRGSSRNKLQNFQFRIKENGIDYFYPGCRS

SEQ ID NO: 37644 - protein, 262 aa, Arabidopsis thaliana
  peptide (1)..(262): Ceres Seq. ID no. 12331291
MDRSLNLLDLALGFDEQLAIPSPLNGKVILIEDCVETSGSFVLHQLMKRVLSSNSSDALIFLAFARPFSHYDRILRKLGCNLATHKSNNRLVFFDMLMVKCSDGDQMEDNVSAVAKLFREIQETVRKLQSVTSGNITVMVDDMSLLEIATTGSNSDHVLDFLHYCHTLSSESNCSLVILNHEDIYASMERPAFLLQMVCLADVVIKAEPLASGLANDVHGQLTVLNKGISNSGRGSSRNKLQNFQFRIKENGIDYFYPGCRS

SEQ ID NO: 37645 - protein, 216 aa, Arabidopsis thaliana
  peptide (1)..(216): Ceres Seq. ID no. 12331292
MKRVLSSNSSDALIFLAFARPFSHYDRILRKLGCNLATHKSNNRLVFFDMLMVKCSDGDQMEDNVSAVAKLFREIQETVRKLQSVTSGNITVMVDDMSLLEIATTGSNSDHVLDFLHYCHTLSSESNCSLVILNHEDIYASMERPAFLLQMVCLADVVIKAEPLASGLANDVHGQLTVLNKGISNSGRGSSRNKLQNFQFRIKENGIDYFYPGCRS

SEQ ID NO: 37646 - DNA, 1347 bp, Arabidopsis thaliana; identical to SEQ ID NO: 20832
  misc_feature (1)..(1347): Ceres Seq. ID no. 13486853
  misc_feature (1)..(1347): Ortholog of  Ceres SEQ ID NO 13598741 as cited in SEQ ID NO 62749
  misc_feature (1)..(1347): Ortholog of  Ceres SEQ ID NO 12587535 as cited in SEQ ID NO 64020
  misc_feature (1)..(1347): Ortholog of  Ceres SEQ ID NO 12586366 as cited in SEQ ID NO 68983

SEQ ID NO: 37647 - protein, 401 aa, Arabidopsis thaliana; identical to SEQ ID NO: 20833
  peptide (1)..(401): Ceres Seq. ID no. 13486854

SEQ ID NO: 37648 - protein, 365 aa, Arabidopsis thaliana; identical to SEQ ID NO: 20834
  peptide (1)..(365): Ceres Seq. ID no. 13486855

SEQ ID NO: 37649 - protein, 323 aa, Arabidopsis thaliana; identical to SEQ ID NO: 20835
  peptide (1)..(323): Ceres Seq. ID no. 13486856

SEQ ID NO: 37650 - DNA, 1411 bp, Arabidopsis thaliana
  misc_feature (1)..(1411): Ceres Seq. ID no. 13491583
  misc_feature (1)..(1411): Ortholog of  Ceres SEQ ID NO 15176709 as cited in SEQ ID NO 1148
  misc_feature (1)..(1411): Ortholog of  Ceres SEQ ID NO 13658922 as cited in SEQ ID NO 66316
agctctctctctctctctcgttaacgcttcggcgaaaaatccacgagtcagcttttactgatttgtacaaaaaatggatggatcaaagcatccatcagtctttcagaagctacatggacaatcttacttgatcaatagactttctccgagtgtgcaagctcgtggttactgtgtctctggtgcttatgtcaatggaggtttgcagagtctattgcagccaactagccatggcgttggctcgtctcttatacctcatggttcatttcctgtattagctcacgctcctagtgagaaaactggtactggtttcttgatcgatttccttatgggaggagtctcagctgctgtttcgaagacggcagccgcgcctatagagcgtgtgaagctcttgattcagaatcaagatgaaatgatcaaagctgggcgtctctctgagccatataaaggaatcagtgattgttttgctcgaacggtcaaagacgaaggaatgcttgctctttggagaggaaacactgccaatgttatcagatacttccccactcaggctttaaactttgcgttcaaagactacttcaagaggctgtttaacttcaagaaagaaaaagatggctactggaagtggtttgcagggaacctggcgtctggtggtgcagctggtgcatcatctctgctttttgtgtactctttggattacgctcgtacccgtttagccaatgatgcgaaggcggccaagaaaggtggtcagcggcagtttaatggcatggtcgacgtgtacaagaagactatagcctctgatggcattgtcgggctttaccgtggtttcaacatctcatgcgttggaattgtcgtgtaccgggggctttactttggattgtatgattccttgaagcctgtggttctagttgatggtctccaggatagcttccttgctagtttcttactgggatggggaatcaccattggagctggattggcgtcttacccaattgacacggttcgcagaagaatgatgatgacgtcaggtgaagcagtgaagtacaagagctctcttcaggccttctctcagatcgtcaagaacgaaggggccaagtcactcttcaagggtgcaggtgccaacatccttcgtgcggttgcaggcgctggtgtactggccggctatgacaagctccagctcattgtgttgggtaagaagtatggctctggtggtggctaaacgatgaggatgatgaaagaatagcccttgaggtctgtgaatgaataaagcagtgtgtccgttcgtataaatgttgcttttagaatatagagtgtctctgtcaagttgtggccctttgtcttagttctatacttctatgacttttgttgacaaaagaataaatacaaagaaaaccaataccatgtttatgttttttgt

SEQ ID NO: 37651 - protein, 379 aa, Arabidopsis thaliana
  peptide (1)..(379): Ceres Seq. ID no. 13491584
MDGSKHPSVFQKLHGQSYLINRLSPSVQARGYCVSGAYVNGGLQSLLQPTSHGVGSSLIPHGSFPVLAHAPSEKTGTGFLIDFLMGGVSAAVSKTAAAPIERVKLLIQNQDEMIKAGRLSEPYKGISDCFARTVKDEGMLALWRGNTANVIRYFPTQALNFAFKDYFKRLFNFKKEKDGYWKWFAGNLASGGAAGASSLLFVYSLDYARTRLANDAKAAKKGGQRQFNGMVDVYKKTIASDGIVGLYRGFNISCVGIVVYRGLYFGLYDSLKPVVLVDGLQDSFLASFLLGWGITIGAGLASYPIDTVRRRMMMTSGEAVKYKSSLQAFSQIVKNEGAKSLFKGAGANILRAVAGAGVLAGYDKLQLIVLGKKYGSGGG

SEQ ID NO: 37652 - protein, 295 aa, Arabidopsis thaliana
  peptide (1)..(295): Ceres Seq. ID no. 13491585
MGGVSAAVSKTAAAPIERVKLLIQNQDEMIKAGRLSEPYKGISDCFARTVKDEGMLALWRGNTANVIRYFPTQALNFAFKDYFKRLFNFKKEKDGYWKWFAGNLASGGAAGASSLLFVYSLDYARTRLANDAKAAKKGGQRQFNGMVDVYKKTIASDGIVGLYRGFNISCVGIVVYRGLYFGLYDSLKPVVLVDGLQDSFLASFLLGWGITIGAGLASYPIDTVRRRMMMTSGEAVKYKSSLQAFSQIVKNEGAKSLFKGAGANILRAVAGAGVLAGYDKLQLIVLGKKYGSGGG

SEQ ID NO: 37653 - protein, 267 aa, Arabidopsis thaliana
  peptide (1)..(267): Ceres Seq. ID no. 13491586
MIKAGRLSEPYKGISDCFARTVKDEGMLALWRGNTANVIRYFPTQALNFAFKDYFKRLFNFKKEKDGYWKWFAGNLASGGAAGASSLLFVYSLDYARTRLANDAKAAKKGGQRQFNGMVDVYKKTIASDGIVGLYRGFNISCVGIVVYRGLYFGLYDSLKPVVLVDGLQDSFLASFLLGWGITIGAGLASYPIDTVRRRMMMTSGEAVKYKSSLQAFSQIVKNEGAKSLFKGAGANILRAVAGAGVLAGYDKLQLIVLGKKYGSGGG

SEQ ID NO: 37654 - DNA, 1356 bp, Arabidopsis thaliana
  misc_feature (1)..(1356): Ceres Seq. ID no. 13488086
  misc_feature (1)..(1356): Ortholog of  Ceres SEQ ID NO 13598443 as cited in SEQ ID NO 69024
gaaaagctctagcacaaaccaaacaccaaatctcatttcttcttcttcttctttttccacattttctgattagcagatcaaatgatgcttgttcgatctgtatttcgatctcagttgcgaccctctgtctcgggtggtctgcaatctgcttcttgctattcttcattatctgctgcttcagctgaagctgagaggactatcagagaaggtcccagaaacgattggagtagagatgaaatcaagtctgtttatgattctcctcttcttgacctcctcttccatggagctcaggttcatagacatgttcataacttcagggaggtacaacaatgtaccctcctctccataaagactggtggctgtagtgaagactgttcatattgtcctcagtcttcgagatatagcactggagttaaggcacaaagactcatgtctaaggacgctgtcattgatgctgctaagaaggcaaaagaagctgggagcacacgtttttgcatgggtgctgcttggcgagatacaattggacggaaaaccaacttcagccagattcttgaatacatcaaagaaataagaggcatggggatggaagtttgctgcaccttaggcatgattgagaaacaacaagcactagagctaaagaaggctggcctcactgcttataaccacaatcttgatacttcaagagagtactacccaaacgtcatcactactagaagttatgacgatcgccttgaaactcttagccatgttcgtgatgctggaatcaacgtttgttcaggaggaatcatagggcttggtgaggcagaggaagacagaataggtttattacacacgctggcaacacttccttctcaccctgagagtgttcccattaatgctctacttgcagtgaaaggcactcctcttgaagaccagaagccagttgagatatgggagatgatcaggatgattggaaccgcacgtattgtaatgccaaaagcgatggtgagactgtctgctggtagagtccggttctcaatgtccgaacaagctctctgtttccttgctggtgcaaactctatcttcaccggagagaagcttttaaccacaccaaacaatgattttgacgctgaccagctcatgttcaagacattaggcctcattcctaaaccgccaagtttctctgaagatgattctgaatcagaaaactgcgagaaagttgcttccgcttctcactaatatcattatccacttttttttttgtttggagtcgggacactatagagcagtcccttttactatgtagcatggtttgacgattttgtgatatcatttttcgttaatcgttattcgaagatgtctagatttctcatctga

SEQ ID NO: 37655 - protein, 378 aa, Arabidopsis thaliana
  peptide (1)..(378): Ceres Seq. ID no. 13488087
MMLVRSVFRSQLRPSVSGGLQSASCYSSLSAASAEAERTIREGPRNDWSRDEIKSVYDSPLLDLLFHGAQVHRHVHNFREVQQCTLLSIKTGGCSEDCSYCPQSSRYSTGVKAQRLMSKDAVIDAAKKAKEAGSTRFCMGAAWRDTIGRKTNFSQILEYIKEIRGMGMEVCCTLGMIEKQQALELKKAGLTAYNHNLDTSREYYPNVITTRSYDDRLETLSHVRDAGINVCSGGIIGLGEAEEDRIGLLHTLATLPSHPESVPINALLAVKGTPLEDQKPVEIWEMIRMIGTARIVMPKAMVRLSAGRVRFSMSEQALCFLAGANSIFTGEKLLTTPNNDFDADQLMFKTLGLIPKPPSFSEDDSESENCEKVASASH

SEQ ID NO: 37656 - protein, 377 aa, Arabidopsis thaliana
  peptide (1)..(377): Ceres Seq. ID no. 13488088
MLVRSVFRSQLRPSVSGGLQSASCYSSLSAASAEAERTIREGPRNDWSRDEIKSVYDSPLLDLLFHGAQVHRHVHNFREVQQCTLLSIKTGGCSEDCSYCPQSSRYSTGVKAQRLMSKDAVIDAAKKAKEAGSTRFCMGAAWRDTIGRKTNFSQILEYIKEIRGMGMEVCCTLGMIEKQQALELKKAGLTAYNHNLDTSREYYPNVITTRSYDDRLETLSHVRDAGINVCSGGIIGLGEAEEDRIGLLHTLATLPSHPESVPINALLAVKGTPLEDQKPVEIWEMIRMIGTARIVMPKAMVRLSAGRVRFSMSEQALCFLAGANSIFTGEKLLTTPNNDFDADQLMFKTLGLIPKPPSFSEDDSESENCEKVASASH

SEQ ID NO: 37657 - protein, 262 aa, Arabidopsis thaliana
  peptide (1)..(262): Ceres Seq. ID no. 13488089
MSKDAVIDAAKKAKEAGSTRFCMGAAWRDTIGRKTNFSQILEYIKEIRGMGMEVCCTLGMIEKQQALELKKAGLTAYNHNLDTSREYYPNVITTRSYDDRLETLSHVRDAGINVCSGGIIGLGEAEEDRIGLLHTLATLPSHPESVPINALLAVKGTPLEDQKPVEIWEMIRMIGTARIVMPKAMVRLSAGRVRFSMSEQALCFLAGANSIFTGEKLLTTPNNDFDADQLMFKTLGLIPKPPSFSEDDSESENCEKVASASH

SEQ ID NO: 37658 - DNA, 1615 bp, Arabidopsis thaliana
  misc_feature (1)..(1615): Ceres Seq. ID no. 12369892
  misc_feature (1)..(1615): Ortholog of  Ceres SEQ ID NO 13594349 as cited in SEQ ID NO 58161
  misc_feature (1)..(1615): Ortholog of  Ceres SEQ ID NO 13663419 as cited in SEQ ID NO 66561
  misc_feature (1)..(1615): Ortholog of  Ceres SEQ ID NO 15177892 as cited in SEQ ID NO 0
aatctcaaaaagtctccgacactctctagatttcctttgctccttcgttctggccatggcaatggcaatggcaaaactcgcaattttcaccactcttatggccatactcgtaatgacatctcaaggaaggattccaacagaaggaggagagaaagaagcagaggctgacagaattacgtcacttccaggtcagcctaacgtcacgttcgagcagttttccggctacgtcaccgtcgataaactctccggaagatcactcttttattggctcactgaagcttctgacctccctctctccaaacctctcgtaatttggctcaacggaggaccgggatgttcgtcggtagcgtacggtgcgtcggaggagattggaccattcaggataagcaaaggtggttccggtttgtatctcaacaagttcgcatggaactcaatctccaatctcttgttcctcgaagctcccgccggcgtcggcttctcttacactaaccgctcctccgatctcttcaacaccggtgatcgccgtaccgccaaagattcacttcagtttcttattcaatggcttcaccggtttccgagatacaaccaccgggaaatctacatcaccggcgagagttacgccggacattacgttcctcagctggccaaagagatcatgaattacaacaaacgatcaaagaatccgttaaatctcaaaggaatcatggttggaaacgcggtgacggacaatcactatgataacctaggaacggtttcgtattggtggagccacgcgatgatctctgatcggacgtatcatcagttgataagcacttgcgattttagtcgtcagaaggaatctgatgaatgcgaaaccctttattcttacgctatggagcaggagtttggtaacattgatcagtacaacatctatgcgccgccgtgtaacaagtcaagcgacggtggtggtagctacaatggttcttccggccgccggagtatgcggcttcctcaccttccccactccgtattgaggaaaatttccggttatgatccatgtaccgagagatatgcagagatctattataaccggcctgatgttcagaaagctcttcacgccaacaccaccaagattccgtataaatggacagcttgcagtgaggtgctaaaccggaattggaacgacacagattcaacggttctccctatataccgggaaatgattgccggcggaattagagtttgggttttcagtggtgacgtcgattcagttgtaccagtgacagctactagatactcactagcaagacttagtttgagtaccaaacttccttggtatccttggtatgtcaagaaacaggttggaggatggacggaagtgtatgaaggactaacgttcgtgacggttagaggagcaggtcacgaggtgccattgttcaagccacgtgctgcttttgagctttttaagtatttcttgagaggcaagccacttccaaaggcttaaaaaaattgaagtcaagagagagattgtaacatttgaaatcatgcccgagaaaaatgaaaatgtaaagtttgggttatgagatggtatttaattaaatctagtctattaatgacagcaagtatttaattattt

SEQ ID NO: 37659 - protein, 493 aa, Arabidopsis thaliana
  peptide (1)..(493): Ceres Seq. ID no. 12369893
ISKSLRHSLDFLCSFVLAMAMAMAKLAIFTTLMAILVMTSQGRIPTEGGEKEAEADRITSLPGQPNVTFEQFSGYVTVDKLSGRSLFYWLTEASDLPLSKPLVIWLNGGPGCSSVAYGASEEIGPFRISKGGSGLYLNKFAWNSISNLLFLEAPAGVGFSYTNRSSDLFNTGDRRTAKDSLQFLIQWLHRFPRYNHREIYITGESYAGHYVPQLAKEIMNYNKRSKNPLNLKGIMVGNAVTDNHYDNLGTVSYWWSHAMISDRTYHQLISTCDFSRQKESDECETLYSYAMEQEFGNIDQYNIYAPPCNKSSDGGGSYNGSSGRRSMRLPHLPHSVLRKISGYDPCTERYAEIYYNRPDVQKALHANTTKIPYKWTACSEVLNRNWNDTDSTVLPIYREMIAGGIRVWVFSGDVDSVVPVTATRYSLARLSLSTKLPWYPWYVKKQVGGWTEVYEGLTFVTVRGAGHEVPLFKPRAAFELFKYFLRGKPLPKA

SEQ ID NO: 37660 - protein, 475 aa, Arabidopsis thaliana
  peptide (1)..(475): Ceres Seq. ID no. 12369894
MAMAMAKLAIFTTLMAILVMTSQGRIPTEGGEKEAEADRITSLPGQPNVTFEQFSGYVTVDKLSGRSLFYWLTEASDLPLSKPLVIWLNGGPGCSSVAYGASEEIGPFRISKGGSGLYLNKFAWNSISNLLFLEAPAGVGFSYTNRSSDLFNTGDRRTAKDSLQFLIQWLHRFPRYNHREIYITGESYAGHYVPQLAKEIMNYNKRSKNPLNLKGIMVGNAVTDNHYDNLGTVSYWWSHAMISDRTYHQLISTCDFSRQKESDECETLYSYAMEQEFGNIDQYNIYAPPCNKSSDGGGSYNGSSGRRSMRLPHLPHSVLRKISGYDPCTERYAEIYYNRPDVQKALHANTTKIPYKWTACSEVLNRNWNDTDSTVLPIYREMIAGGIRVWVFSGDVDSVVPVTATRYSLARLSLSTKLPWYPWYVKKQVGGWTEVYEGLTFVTVRGAGHEVPLFKPRAAFELFKYFLRGKPLPKA

SEQ ID NO: 37661 - protein, 473 aa, Arabidopsis thaliana
  peptide (1)..(473): Ceres Seq. ID no. 12369895
MAMAKLAIFTTLMAILVMTSQGRIPTEGGEKEAEADRITSLPGQPNVTFEQFSGYVTVDKLSGRSLFYWLTEASDLPLSKPLVIWLNGGPGCSSVAYGASEEIGPFRISKGGSGLYLNKFAWNSISNLLFLEAPAGVGFSYTNRSSDLFNTGDRRTAKDSLQFLIQWLHRFPRYNHREIYITGESYAGHYVPQLAKEIMNYNKRSKNPLNLKGIMVGNAVTDNHYDNLGTVSYWWSHAMISDRTYHQLISTCDFSRQKESDECETLYSYAMEQEFGNIDQYNIYAPPCNKSSDGGGSYNGSSGRRSMRLPHLPHSVLRKISGYDPCTERYAEIYYNRPDVQKALHANTTKIPYKWTACSEVLNRNWNDTDSTVLPIYREMIAGGIRVWVFSGDVDSVVPVTATRYSLARLSLSTKLPWYPWYVKKQVGGWTEVYEGLTFVTVRGAGHEVPLFKPRAAFELFKYFLRGKPLPKA

SEQ ID NO: 37662 - DNA, 681 bp, Arabidopsis thaliana
  misc_feature (1)..(681): Ceres Seq. ID no. 12367005
  misc_feature (1)..(681): Ortholog of  Ceres SEQ ID NO 12612236 as cited in SEQ ID NO 58141
agaaaaaaagaaagcgaaatgggattattggccgcgatcggagttctgttgccatttccgttctactggtggctgtggacgaatcctcagtcatgggtcaatctctgcggccgagaaagagacccatcgacggtaatggcacgtgtttctcacgtgctcaaggctgctcaactcctttctctcttctccgttgcttctctctcctggccgtctccgctctacttctggcctctcatggcctttggccagtttctcaacttcagggtataccaattgttaggtgaagctgggacttattacggtgttcgattcgggaagaacataccatgggttacagagttcccatttggagtcattagagatccacagtatgttgggagtatcatgtctctattggcatgcctctcttgggttccatttcaatacattctcctctggtctctcggttatgttttcatgatgtttctcgagtcaaaggaggatccaaatgctcgtgccaaatccatctcatgattcctaagcataacccactagtcttagaagagctcaactcccatgaacgtcaggtcttgactgttttctttatgagtttgtattctcttttgtactcaaactgatgctacactttcatggataatgcagttaccttttctcgggttatcggtagtctacagaattgtc

SEQ ID NO: 37663 - protein, 170 aa, Arabidopsis thaliana
  peptide (1)..(170): Ceres Seq. ID no. 12367006
RKKESEMGLLAAIGVLLPFPFYWWLWTNPQSWVNLCGRERDPSTVMARVSHVLKAAQLLSLFSVASLSWPSPLYFWPLMAFGQFLNFRVYQLLGEAGTYYGVRFGKNIPWVTEFPFGVIRDPQYVGSIMSLLACLSWVPFQYILLWSLGYVFMMFLESKEDPNARAKSIS

SEQ ID NO: 37664 - protein, 164 aa, Arabidopsis thaliana
  peptide (1)..(164): Ceres Seq. ID no. 12367007
MGLLAAIGVLLPFPFYWWLWTNPQSWVNLCGRERDPSTVMARVSHVLKAAQLLSLFSVASLSWPSPLYFWPLMAFGQFLNFRVYQLLGEAGTYYGVRFGKNIPWVTEFPFGVIRDPQYVGSIMSLLACLSWVPFQYILLWSLGYVFMMFLESKEDPNARAKSIS

SEQ ID NO: 37665 - protein, 125 aa, Arabidopsis thaliana
  peptide (1)..(125): Ceres Seq. ID no. 12367008
MARVSHVLKAAQLLSLFSVASLSWPSPLYFWPLMAFGQFLNFRVYQLLGEAGTYYGVRFGKNIPWVTEFPFGVIRDPQYVGSIMSLLACLSWVPFQYILLWSLGYVFMMFLESKEDPNARAKSIS

SEQ ID NO: 37666 - DNA, 1598 bp, Arabidopsis thaliana
  misc_feature (1)..(1598): Ceres Seq. ID no. 12605969
  misc_feature (1)..(1598): Ortholog of  Ceres SEQ ID NO 15172321 as cited in SEQ ID NO 55415
atcgtcttcatcgttaacttcgcagactctgttgattagtcaacacagatcagaatctgaggctttggccgagacgagagaagcagaagaagaaaatggcggagactgtacattctccgatcgttacttacgcatcgatgttatcgcttctcgccttctgtccacctttcgtcattctcctatggtacacaatggttcatcaggatggttctgttactcagacctttggcttcttttgggagaatggagttcaaggacttatcaacatatggccaagacccactttgattgcttggaaaattatattttgctatggagcatttgaagctattcttcagctgcttctgcctggtaaaagagttgagggtccaatatctccagccggaaaccgaccagtttacaaggccaatggtctggctgcttactttgtgacactagcaacctatcttggtctttggtggtttggaatcttcaaccctgcaattgtctatgatcacttgggtgaaatattttcggcactaatattcggaagcttcatattttgtgttttgttgtacataaaaggccatgttgcaccttcatcaagtgactctggttcatgtggtaacctaataattgacttctattggggcatggagttgtaccctcgaattggtaagagctttgacatcaaggtgtttactaattgcagattcggaatgatgtcttgggcagttcttgcagtcacgtactgcataaaacagtatgaaataaatggcaaagtatctgattcaatgctggtgaacaccatcctgatgctggtgtatgtcacaaaattcttctggtgggaagctggttattggaacaccatggacattgcacatgaccgagctggattctatatatgctggggttgtctagtgtgggtgccttctgtctacacttctccaggcatgtaccttgtgaaccaccccgtcgaactcggaactcagttggcaatatacattctcgttgcaggaattctgtgcatttacataaactatgactgtgatagacaaaggcaagagttcaggaggacaaacgggaaatgtttggtttggggaagagccccgtcaaagattgtggcgtcgtatactacaacatctggtgaaactaaaactagtcttctcttaacgtctggatggtggggattggctcgtcatttccattatgttcctgagatcttaagtgctttcttctggaccgtaccggctctcttcgataacttcttggcatacttctacgtcatatttctcacccttcttctctttgatcgagccaagagagacgatgaccgatgccgatcaaagtatgggaaatattggaagctgtattgtgagaaagtcaaatacaggatcattccgggaatttattgattgtaacgaagtctgttgttctcattttctagttattacgttaattcgaacgttggaatcatcaaaagaccgtgccaaaacaaaaatgcaaattgatgcgatagacattcttttgctgatttgtatgctataggttttcaaatctctagctacgcttatgtatttccctagattatcaaagttagcctgccgttttctaatttt

SEQ ID NO: 37667 - protein, 432 aa, Arabidopsis thaliana
  peptide (1)..(432): Ceres Seq. ID no. 12605970
MAETVHSPIVTYASMLSLLAFCPPFVILLWYTMVHQDGSVTQTFGFFWENGVQGLINIWPRPTLIAWKIIFCYGAFEAILQLLLPGKRVEGPISPAGNRPVYKANGLAAYFVTLATYLGLWWFGIFNPAIVYDHLGEIFSALIFGSFIFCVLLYIKGHVAPSSSDSGSCGNLIIDFYWGMELYPRIGKSFDIKVFTNCRFGMMSWAVLAVTYCIKQYEINGKVSDSMLVNTILMLVYVTKFFWWEAGYWNTMDIAHDRAGFYICWGCLVWVPSVYTSPGMYLVNHPVELGTQLAIYILVAGILCIYINYDCDRQRQEFRRTNGKCLVWGRAPSKIVASYTTTSGETKTSLLLTSGWWGLARHFHYVPEILSAFFWTVPALFDNFLAYFYVIFLTLLLFDRAKRDDDRCRSKYGKYWKLYCEKVKYRIIPGIY

SEQ ID NO: 37668 - protein, 418 aa, Arabidopsis thaliana
  peptide (1)..(418): Ceres Seq. ID no. 12605971
MLSLLAFCPPFVILLWYTMVHQDGSVTQTFGFFWENGVQGLINIWPRPTLIAWKIIFCYGAFEAILQLLLPGKRVEGPISPAGNRPVYKANGLAAYFVTLATYLGLWWFGIFNPAIVYDHLGEIFSALIFGSFIFCVLLYIKGHVAPSSSDSGSCGNLIIDFYWGMELYPRIGKSFDIKVFTNCRFGMMSWAVLAVTYCIKQYEINGKVSDSMLVNTILMLVYVTKFFWWEAGYWNTMDIAHDRAGFYICWGCLVWVPSVYTSPGMYLVNHPVELGTQLAIYILVAGILCIYINYDCDRQRQEFRRTNGKCLVWGRAPSKIVASYTTTSGETKTSLLLTSGWWGLARHFHYVPEILSAFFWTVPALFDNFLAYFYVIFLTLLLFDRAKRDDDRCRSKYGKYWKLYCEKVKYRIIPGIY

SEQ ID NO: 37669 - protein, 400 aa, Arabidopsis thaliana
  peptide (1)..(400): Ceres Seq. ID no. 12605972
MVHQDGSVTQTFGFFWENGVQGLINIWPRPTLIAWKIIFCYGAFEAILQLLLPGKRVEGPISPAGNRPVYKANGLAAYFVTLATYLGLWWFGIFNPAIVYDHLGEIFSALIFGSFIFCVLLYIKGHVAPSSSDSGSCGNLIIDFYWGMELYPRIGKSFDIKVFTNCRFGMMSWAVLAVTYCIKQYEINGKVSDSMLVNTILMLVYVTKFFWWEAGYWNTMDIAHDRAGFYICWGCLVWVPSVYTSPGMYLVNHPVELGTQLAIYILVAGILCIYINYDCDRQRQEFRRTNGKCLVWGRAPSKIVASYTTTSGETKTSLLLTSGWWGLARHFHYVPEILSAFFWTVPALFDNFLAYFYVIFLTLLLFDRAKRDDDRCRSKYGKYWKLYCEKVKYRIIPGIY

SEQ ID NO: 37670 - DNA, 866 bp, Arabidopsis thaliana
  misc_feature (1)..(866): Ceres Seq. ID no. 12393035
  misc_feature (1)..(866): Ortholog of  Ceres SEQ ID NO 12473409 as cited in SEQ ID NO 104
  misc_feature (1)..(866): Ortholog of  Ceres SEQ ID NO 15170477 as cited in SEQ ID NO 52825
  misc_feature (1)..(866): Ortholog of  Ceres SEQ ID NO 13595055 as cited in SEQ ID NO 55744
  misc_feature (1)..(866): Ortholog of  Ceres SEQ ID NO 13662009 as cited in SEQ ID NO 61951
aaaaaccctctaaccactcaaaaaaatatctctgctctgctccaatggcgtcgttactcgattccgtcaccgtgacccgcgtgttttctctgccgattgcggcttcggtctcgtcttcttcagctgctccgtcggtttcacgacgccggatttctcccgccaggtttctggaattcagaggtttgaagtcttcgcggagtttggtgactcagtcggccagtctgggtgcgaatcgtagaaccagaatcgctcgcggtggacgaatcgcctgtgaggctcaggacaccactgccgccgccgtcgaagtaccaaatctgtctgattcagaatggcaaacaaaggttctggaatcagatgtcccagttctggtcgagttctgggcaccatggtgtggaccttgccgtatgattcaccccatagttgaccagctagccaaagatttcgcagggaagttcaaattctacaaaatcaacactgacgagagccctaatacagcaaaccgttacgggatacgaagcgttccaacagtaatcatcttcaaaggcggtgagaagaaagatagcatcattggagctgtgcctagagagacgttggagaaaactatagaaagattcttggtcgagtaacaaaatttgactcttttgtcactctgaaccattttaccttatcttctctcttgtaatctctgtaaagtcttttaagtttttgactattatgttatcgtgggtcctctttgtcttcttcaataaaaaaaatggaaacaaagtaatccaccgacgcatgagaagcataactccacgttgaaccacatgccattgttcttcctaattcaccgtacaatctatatacatacatatgttttgagt

SEQ ID NO: 37671 - protein, 207 aa, Arabidopsis thaliana
  peptide (1)..(207): Ceres Seq. ID no. 12393036
KPSNHSKKYLCSAPMASLLDSVTVTRVFSLPIAASVSSSSAAPSVSRRRISPARFLEFRGLKSSRSLVTQSASLGANRRTRIARGGRIACEAQDTTAAAVEVPNLSDSEWQTKVLESDVPVLVEFWAPWCGPCRMIHPIVDQLAKDFAGKFKFYKINTDESPNTANRYGIRSVPTVIIFKGGEKKDSIIGAVPRETLEKTIERFLVE

SEQ ID NO: 37672 - protein, 193 aa, Arabidopsis thaliana
  peptide (1)..(193): Ceres Seq. ID no. 12393037
MASLLDSVTVTRVFSLPIAASVSSSSAAPSVSRRRISPARFLEFRGLKSSRSLVTQSASLGANRRTRIARGGRIACEAQDTTAAAVEVPNLSDSEWQTKVLESDVPVLVEFWAPWCGPCRMIHPIVDQLAKDFAGKFKFYKINTDESPNTANRYGIRSVPTVIIFKGGEKKDSIIGAVPRETLEKTIERFLVE

SEQ ID NO: 37673 - DNA, 1214 bp, Arabidopsis thaliana
  misc_feature (1)..(1214): Ceres Seq. ID no. 12604914
  misc_feature (1)..(1214): Ortholog of  Ceres SEQ ID NO 14306671 as cited in SEQ ID NO 53809
  misc_feature (1)..(1214): Ortholog of  Ceres SEQ ID NO 15178206 as cited in SEQ ID NO 57238
aggctgcttttcttcgtgaatctcagaatcttaaaagactcttcaaatttgagaaaacgtttcactatctaaatccatttctctccctctctctatagccatttagaatgaagaaaagtctcactctactcatcctcctcctctgtactctcctcttctccaccgtcttgagcaacctactcgtcgaaccggtccaacccaacaccgtaccggctttcccggtcgaaacccaagctcaaagctgccggcttgacctctccaacgagctattcggtggcgtcaacgaagcttgcggaagaaaccttgaccggagtcgatgttgccctgttttagccgcttggctcttcgcagctcacgctcgctctgctctccagttaccagctcctgctccaacgccggaatcttctgatcccgacgaacccatgaagcctgacgactctcagaagtgcgtcaacacattgcaaagtgcgcttttgactaaacaaatcaagatccctcagcctaattctagctgtgacgcaatcttgtgcttctgtggtattcgtctccaccagattagctcactctcttgtcccgccgctttcaatgtctcctccggcttcaaaaacgcaactccgaccgccgccgtgaagaatcttgaaaaagaatgccggaactcttcttactccggttgtaccagatgcctcggtgctcttcaaaagctaaaggtaagaggaggaaacaagaagacaacaacagagagagggactaagatgatgagcaaagattgccagctcatgggactcacatggctactagctcgtaacaaaacggcatacattcccactgtttcggctgtgttaagagctattatgtatagtccacacccacctcacctcaacaagtgtagtcctgaccaagagaacatgcctttagcagttgactctctacagtttcaaaagagcttctcttcatcatctcatctttttggggttttaccgtttttacccttagtcctttgtatctttctctttctactgtgatttttttctgtattttttggtcgggaggggtaaagagagtcacgtgaagctacaagacagttgtgtgtatgtaaatgctgtgctctttttttggttctgcaaactcttaaccctcattttttggttttaactgtgttttgtcccatttaacactttgtacgaggtcttgaaattttaaaaaatcatcttggc

SEQ ID NO: 37674 - protein, 304 aa, Arabidopsis thaliana
  peptide (1)..(304): Ceres Seq. ID no. 12604915
MKKSLTLLILLLCTLLFSTVLSNLLVEPVQPNTVPAFPVETQAQSCRLDLSNELFGGVNEACGRNLDRSRCCPVLAAWLFAAHARSALQLPAPAPTPESSDPDEPMKPDDSQKCVNTLQSALLTKQIKIPQPNSSCDAILCFCGIRLHQISSLSCPAAFNVSSGFKNATPTAAVKNLEKECRNSSYSGCTRCLGALQKLKVRGGNKKTTTERGTKMMSKDCQLMGLTWLLARNKTAYIPTVSAVLRAIMYSPHPPHLNKCSPDQENMPLAVDSLQFQKSFSSSSHLFGVLPFLPLVLCIFLFLL

SEQ ID NO: 37675 - protein, 199 aa, Arabidopsis thaliana
  peptide (1)..(199): Ceres Seq. ID no. 12604916
MKPDDSQKCVNTLQSALLTKQIKIPQPNSSCDAILCFCGIRLHQISSLSCPAAFNVSSGFKNATPTAAVKNLEKECRNSSYSGCTRCLGALQKLKVRGGNKKTTTERGTKMMSKDCQLMGLTWLLARNKTAYIPTVSAVLRAIMYSPHPPHLNKCSPDQENMPLAVDSLQFQKSFSSSSHLFGVLPFLPLVLCIFLFLL

SEQ ID NO: 37676 - DNA, 524 bp, Arabidopsis thaliana
  misc_feature (1)..(524): Ceres Seq. ID no. 12331297
  misc_feature (1)..(524): Ortholog of  Ceres SEQ ID NO 12321778 as cited in SEQ ID NO 20535
aaaacagaacaaacacaaacacaaacagagaatcaacgaagaagaaaaatggtgaaggtgatgtgggtttccgttttagctctggcggcggcgattctccttttgacggtcccggtggcagaaggggtgacgtgctcgcctatgcagctggcttcatgtgcggcggcgatgacgtcatcgtcgccgccatcggaggcgtgttgcacaaagctgagagagcagcagccatgcctttgtgggtacatgaggaaccctaccctccgccaatacgttagctcccctaacgcaaggaaagtctccaacagttgcaagattccttccccaagctgttaaggaaatgttaatcatgattaattagtgacaagtttcgctgattatagtggttaatgctggtcttatcttcgtcagtactacttaaaataataaatgagtgatgatgattgatgattatcatcatcatgcttgaatgttatgttttctatcttataaaatatgaaatatactttagaaatatgtttcgtcgt

SEQ ID NO: 37677 - protein, 110 aa, Arabidopsis thaliana
  peptide (1)..(110): Ceres Seq. ID no. 12331298
KTEQTQTQTENQRRRKMVKVMWVSVLALAAAILLLTVPVAEGVTCSPMQLASCAAAMTSSSPPSEACCTKLREQQPCLCGYMRNPTLRQYVSSPNARKVSNSCKIPSPSC

SEQ ID NO: 37678 - protein, 94 aa, Arabidopsis thaliana
  peptide (1)..(94): Ceres Seq. ID no. 12331299
MVKVMWVSVLALAAAILLLTVPVAEGVTCSPMQLASCAAAMTSSSPPSEACCTKLREQQPCLCGYMRNPTLRQYVSSPNARKVSNSCKIPSPSC

SEQ ID NO: 37679 - protein, 90 aa, Arabidopsis thaliana
  peptide (1)..(90): Ceres Seq. ID no. 12331300
NRTNTNTNRESTKKKNGEGDVGFRFSSGGGDSPFDGPGGRRGDVLAYAAGFMCGGDDVIVAAIGGVLHKAERAAAMPLWVHEEPYPPPIR

SEQ ID NO: 37680 - DNA, 1190 bp, Arabidopsis thaliana
  misc_feature (1)..(1190): Ceres Seq. ID no. 12337456
  misc_feature (1)..(1190): Ortholog of  Ceres SEQ ID NO 12609045 as cited in SEQ ID NO 51314
  misc_feature (1)..(1190): Ortholog of  Ceres SEQ ID NO 14316312 as cited in SEQ ID NO 60042
  misc_feature (1)..(1190): Ortholog of  Ceres SEQ ID NO 13595877 as cited in SEQ ID NO 67702
  misc_feature (1)..(1190): Ortholog of  Ceres SEQ ID NO 13654367 as cited in SEQ ID NO 67993
attaatcatcatcttttcttcacagagaggaaaaaaaaaaaatggcgacagattctcaaccaaaccaaaagctaacgcttccgttaaaaacaagaatcgctctcaccgttatctccaccatgaccgataacgctcaacgtcctgacggaactatcaaccgccgtttcctccgcctcttcgatttccgtgctcctcccaatcctaaacccgtcaacatcgtctccacctccgatttcgtcgtggatcaatcccgtgatctctggttccgattgtacactccacatgtctccggcgataaaatccccgtcgttgttttcttccacggcggtggtttcgctttccttagtcctaatgcgtatccttacgataatgtatgccggagattcgctaggaaattacctgcttatgtcatctccgttaactaccgtctcgctccggagcatcgttatcctgctcaatacgacgacggtttcgatgctttgaagtacatcgaggagaatcacggttcgattcttccggcgaacgctgatctctcgagatgcttcttcgccggagacagtgcaggtggaaacatcgcgcacaacgtcgcgattcgaatttgtcgcgagccgcggtcatctttcaccgccgtgaaactcatcggacttatctcgattcaacctttcttcggcggagaagagagaacggaagcggagaaacaactcgtcggagctcctttggtttcaccggaccgaacagattggtgctggaaagcgatgggattaaaccgggatcatgaagcggttaacgtaggcggaccaaacgcggttgatatatcgggtctggattatccggagacgatggtggtagtagctgggtttgatccgttaaaagattggcagagaagttactacgagtggttaaagttatgcggtaaaaaagcaacgttaatcgaatattcaaacatgtttcatgcgttttacattttccctgaattgcctgaggcgggtcagttaattatgcggattaaggattttgttgatgagcgcgtggcttcactctccgcttaatcaccttcgctaatgatggatttttaaattagctcaatgaataataatgtattaagctctatgcttgtgtcttgtttagtgttttaaaaatggtgtaggtcgatctattttcattattaatcaagtgttcaactttaagtg

SEQ ID NO: 37681 - protein, 335 aa, Arabidopsis thaliana; identical to SEQ ID NO: 28285
  peptide (1)..(335): Ceres Seq. ID no. 12337457

SEQ ID NO: 37682 - protein, 309 aa, Arabidopsis thaliana; identical to SEQ ID NO: 28286
  peptide (1)..(309): Ceres Seq. ID no. 12337458

SEQ ID NO: 37683 - DNA, 1913 bp, Arabidopsis thaliana
  misc_feature (1)..(1913): Ceres Seq. ID no. 13645775
  misc_feature (1)..(1913): Ortholog of  Ceres SEQ ID NO 12556889 as cited in SEQ ID NO 125
  misc_feature (1)..(1913): Ortholog of  Ceres SEQ ID NO 15172982 as cited in SEQ ID NO 51725
  misc_feature (1)..(1913): Ortholog of  Ceres SEQ ID NO 13598188 as cited in SEQ ID NO 61498
atggagaagaagaagaagaagagagatgaggaagaaacgagaggctaaagatgaaaatgaagaagaagaagaggagaagaagaagagactagagttgatgaaggcagctgcgcaggcttggctcagccactcccaaacctcaaaacatactgttttagagttcgatgcgcagagaaagcatgcttttgtcaaagggaaggcatcacgtttcaaaacggaagccttgtccgcaaagcatcatccgtcgtttttggattgggaattcggacagtcgctgtgggatccctacgagattctttcggtctctaagaaactggaacgcgaactcactttagaagaacaaaccttctcttcttcagataatgatggcctcaagaagatgaagaagaagaaaactagagacagcagaaacagccttaggagtttgttcactcgttcgtcttcaaagagattctaacaaactcatcatgttactacttcaaacttgtaaatttttctcaaaaagtgaaatcaattatgaatgtcttttattggtcgaaaaaaaaaaaaaaaaaagcttttttttttttttttttgcaaagaaagctttgttttgattgataatattacacataaccaagagagagcatatagtacaaacgaaaacaagaatagttatccttagaagtaatcctcagtcctgcccttgaatccgatttgtccgaaagtgaggcagaggaagaggcctaagtgccacgtaaccaaccacaaccagaactgtgaagtgagagctggaggagtcgggaagtgagcgagctcagttccgatgctatcgaagaagagacccgtcaggctcttcccatttatcgctggaatgctcgacggagctagccatccgatcagcccaaatcctaccacgttcaaatctctcctcaaccagttcctctcaaagcaagtgactcttcctcccgatgcaccggcgagtctcaaagggttcttggcgcttaatgttggttttaaaaaggatgaagagaagggtttggtggtgatggatgatcctccgaggcctatcaccgtcgatggtgttgcaaatgttgctgccatttttcttctgggctgctcacaagaccgactttttctcggacaagttcggtgtgaggtcaatcagggacaataacgatgaactaatgggtgctgtgtatctacaagttagtatcatcagtcaagctctaatctttgtcaccaggtcaaggagttggtcatttgtcgaacgtcctggggcgcttctgatgattgcattcgtcattgcacaactggttgcaactttgatcgcagtgtatgccgactggacatttgcaaaggtgaagggtatcggttggggatgggcaggtgtgatttggatttacagtatcgtaacatacttcccacaggacattttgaagtttgccattcggtatatcttgagtggaaaggcttgggccagcttgtttgacaacaggaccgctttcacaaccaagaaagattacggtattggagaaagagaagctcaatgggcacaagctcaaaggacattgcacggtctgcagccaaaagaagatgttaatatcttcccagagaaaggaagttacagagagctgtctgagatcgcagagcaagccaagagaagggccgagatagctaggcttagggagcttcacacattgaagggacatgtggaatcagtcgcaaagctaaagggattggacattgatacagcaggacatcactacactgtgtagttggagttgcacaacaacacaaacatttaccgaaaaccaaccccatcatgactcatcttttgttttgtcttcacaaatctctctttaaaagtcattacagtagagggaagagaactcttgtgtattgccataactcttccaaaactcttttttctt

SEQ ID NO: 37684 - protein, 241 aa, Arabidopsis thaliana
  peptide (1)..(241): Ceres Seq. ID no. 13645776
MILRGLSPSMVLQMLLPFFFWAAHKTDFFSDKFGVRSIRDNNDELMGAVYLQVSIISQALIFVTRSRSWSFVERPGALLMIAFVIAQLVATLIAVYADWTFAKVKGIGWGWAGVIWIYSIVTYFPQDILKFAIRYILSGKAWASLFDNRTAFTTKKDYGIGEREAQWAQAQRTLHGLQPKEDVNIFPEKGSYRELSEIAEQAKRRAEIARLRELHTLKGHVESVAKLKGLDIDTAGHHYTV

SEQ ID NO: 37685 - protein, 232 aa, Arabidopsis thaliana
  peptide (1)..(232): Ceres Seq. ID no. 13645777
MVLQMLLPFFFWAAHKTDFFSDKFGVRSIRDNNDELMGAVYLQVSIISQALIFVTRSRSWSFVERPGALLMIAFVIAQLVATLIAVYADWTFAKVKGIGWGWAGVIWIYSIVTYFPQDILKFAIRYILSGKAWASLFDNRTAFTTKKDYGIGEREAQWAQAQRTLHGLQPKEDVNIFPEKGSYRELSEIAEQAKRRAEIARLRELHTLKGHVESVAKLKGLDIDTAGHHYTV

SEQ ID NO: 37686 - protein, 228 aa, Arabidopsis thaliana
  peptide (1)..(228): Ceres Seq. ID no. 13645778
MLLPFFFWAAHKTDFFSDKFGVRSIRDNNDELMGAVYLQVSIISQALIFVTRSRSWSFVERPGALLMIAFVIAQLVATLIAVYADWTFAKVKGIGWGWAGVIWIYSIVTYFPQDILKFAIRYILSGKAWASLFDNRTAFTTKKDYGIGEREAQWAQAQRTLHGLQPKEDVNIFPEKGSYRELSEIAEQAKRRAEIARLRELHTLKGHVESVAKLKGLDIDTAGHHYTV

SEQ ID NO: 37687 - DNA, 823 bp, Arabidopsis thaliana
  misc_feature (1)..(823): Ceres Seq. ID no. 12337242
  misc_feature (1)..(823): Ortholog of  Ceres SEQ ID NO 15174752 as cited in SEQ ID NO 53279
  misc_feature (1)..(823): Ortholog of  Ceres SEQ ID NO 15226087 as cited in SEQ ID NO 58655
acaaacttcactcaaaacctaattaacttagagagaaagagagagagagaagggttgcaaaatgcgttcttcgtaccaagaatctccaccgttgcttcttgaagatcttaaggttacgatcaaagaatcaacactcattttcccatctgaagaaaccagcgagagaaaatccatgttcttatccaacgtcgaccaaattctcaactttgacgttcaaacagttcatttcttccgacctaacaaggagtttccaccggagatggtctcggagaagctgagaaaggcgttggtgaaactcatggacgcttatgagttcttggccgggagactctgcgtggatcctagctctggacggcttgatgttgactgtaacggtgctggagctggctttgtgacggcggcgagtgactacacgttggaggaacttggagatttggtttatccaaatccagcttttgctcaattggttacaagtcagcttcagagtttgcccaaagatgatcaacccttgtttgtctttcaggaagaaagaaaaaaaaaatcaaaagttttgagtgtataaacacaaagaagcttccttagaatcaaaaaaatttcgaacatgttcacaataaattttgtgaacttttagctattttgcaacctcgagggagggatctcaaggatctaagtaccatcatgatatttatagaaatctagtttatataggtcattagtcgaggaccatgtgggtaaaatagaataaaaacttgtttcttctatagagtccaagtattaatcggagttttgtgtgagatcctccgtattcaaaatataaatgttt

SEQ ID NO: 37688 - protein, 166 aa, Arabidopsis thaliana
  peptide (1)..(166): Ceres Seq. ID no. 12337243
MRSSYQESPPLLLEDLKVTIKESTLIFPSEETSERKSMFLSNVDQILNFDVQTVHFFRPNKEFPPEMVSEKLRKALVKLMDAYEFLAGRLCVDPSSGRLDVDCNGAGAGFVTAASDYTLEELGDLVYPNPAFAQLVTSQLQSLPKDDQPLFVFQEERKKKSKVLSV

SEQ ID NO: 37689 - protein, 129 aa, Arabidopsis thaliana
  peptide (1)..(129): Ceres Seq. ID no. 12337244
MFLSNVDQILNFDVQTVHFFRPNKEFPPEMVSEKLRKALVKLMDAYEFLAGRLCVDPSSGRLDVDCNGAGAGFVTAASDYTLEELGDLVYPNPAFAQLVTSQLQSLPKDDQPLFVFQEERKKKSKVLSV

SEQ ID NO: 37690 - protein, 100 aa, Arabidopsis thaliana
  peptide (1)..(100): Ceres Seq. ID no. 12337245
MVSEKLRKALVKLMDAYEFLAGRLCVDPSSGRLDVDCNGAGAGFVTAASDYTLEELGDLVYPNPAFAQLVTSQLQSLPKDDQPLFVFQEERKKKSKVLSV

SEQ ID NO: 37691 - DNA, 1283 bp, Arabidopsis thaliana
  misc_feature (1)..(1283): Ceres Seq. ID no. 13509079
  misc_feature (1)..(1283): Ortholog of  Ceres SEQ ID NO 14310972 as cited in SEQ ID NO 53376
gacggctaagtcttcctctctctctctctctctctctctctctgcaatggactctctggtagcgagctacgcttcgtcggacgaagaagaagatcttcaaccacgtcgagaagctttcactgtaaaatcctcagaaccttccgcttcgtctctattctcagctattcctcaacctaaagaactcaaatcctccgaagatggtgatttaggctcatcttcctctcgaggaaaatcttcttctttcctctcatctctccctcctcccaaatcctcaatttcacggaaaaaaaatcccaatccgtcgtcaattccgaaacgtgtcgtccagatcaggcttccagtaaaccctagaccgagcaatcttgacgacgaagacgacgaagaagaagagaaagctaggaagaagcgtaaacagatggaatctgcttccgcatctcacgattcatcagtaagatcgttcttatccgccatgcctgcacctaaaagctcacaaacactaggtgctcttccttcattgggatcaggatcaggtcgaagatcgaatctcgaaacagaaacaccttcaattgcatttcctcaaacggattcaggtattagtgatcaacaaaaccagagctatgaatcgtttagtcatagtaatagcgaaacggaacaaatcgttggagtagataactattatgctactggttatgatggtggatacgaaacaattcctagtggtagtagtgtgggatatgatggtagtagctatggaggtaatacttggaatggtggtgggtttgaggcaatgacgggattgcctgaagcggttgtagctatggatagtggtgcgaggagaggaaggagagggaggaatcagatgccagagattgttgaggttaagcaagatgagcttatgaagaataggccacgagttgatcaggttaaatctactggaatcgcctttggacctgcgtatcagccggtaacatcttcatctaaagggaaagtgtcaaagcttcacaagaggaagcatcaaatcactgcgttgttcatggacatgaagcacaaggagtcggagttgacagagagacgttctagaggattgctcacgaaagccgagacacaagctaaatacggatggtgatttgccgctattgtttttctcaatttgtgaaatttgcaacagattttctgtaactcagagtgtaatttttttcttttactattttccaagatccaagctttgaatgtaatactcatttccgtgaatgaatctaatctcagcagaatgctttgacccg

SEQ ID NO: 37692 - protein, 374 aa, Arabidopsis thaliana
  peptide (1)..(374): Ceres Seq. ID no. 13509080
TAKSSSLSLSLSLSAMDSLVASYASSDEEEDLQPRREAFTVKSSEPSASSLFSAIPQPKELKSSEDGDLGSSSSRGKSSSFLSSLPPPKSSISRKKNPNPSSIPKRVVQIRLPVNPRPSNLDDEDDEEEEKARKKRKQMESASASHDSSVRSFLSAMPAPKSSQTLGALPSLGSGSGRRSNLETETPSIAFPQTDSGISDQQNQSYESFSHSNSETEQIVGVDNYYATGYDGGYETIPSGSSVGYDGSSYGGNTWNGGGFEAMTGLPEAVVAMDSGARRGRRGRNQMPEIVEVKQDELMKNRPRVDQVKSTGIAFGPAYQPVTSSSKGKVSKLHKRKHQITALFMDMKHKESELTERRSRGLLTKAETQAKYGW

SEQ ID NO: 37693 - protein, 359 aa, Arabidopsis thaliana
  peptide (1)..(359): Ceres Seq. ID no. 13509081
MDSLVASYASSDEEEDLQPRREAFTVKSSEPSASSLFSAIPQPKELKSSEDGDLGSSSSRGKSSSFLSSLPPPKSSISRKKNPNPSSIPKRVVQIRLPVNPRPSNLDDEDDEEEEKARKKRKQMESASASHDSSVRSFLSAMPAPKSSQTLGALPSLGSGSGRRSNLETETPSIAFPQTDSGISDQQNQSYESFSHSNSETEQIVGVDNYYATGYDGGYETIPSGSSVGYDGSSYGGNTWNGGGFEAMTGLPEAVVAMDSGARRGRRGRNQMPEIVEVKQDELMKNRPRVDQVKSTGIAFGPAYQPVTSSSKGKVSKLHKRKHQITALFMDMKHKESELTERRSRGLLTKAETQAKYGW

SEQ ID NO: 37694 - protein, 236 aa, Arabidopsis thaliana
  peptide (1)..(236): Ceres Seq. ID no. 13509082
MESASASHDSSVRSFLSAMPAPKSSQTLGALPSLGSGSGRRSNLETETPSIAFPQTDSGISDQQNQSYESFSHSNSETEQIVGVDNYYATGYDGGYETIPSGSSVGYDGSSYGGNTWNGGGFEAMTGLPEAVVAMDSGARRGRRGRNQMPEIVEVKQDELMKNRPRVDQVKSTGIAFGPAYQPVTSSSKGKVSKLHKRKHQITALFMDMKHKESELTERRSRGLLTKAETQAKYGW

SEQ ID NO: 37695 - DNA, 684 bp, Arabidopsis thaliana
  misc_feature (1)..(684): Ceres Seq. ID no. 12326967
  misc_feature (1)..(684): Ortholog of  Ceres SEQ ID NO 15227150 as cited in SEQ ID NO 59837
gagtgagtgagagaagaatcagagaaaatgccgccgaaattggatccatctcaaatcgtcgacgtctacgtccgagtcaccggaggtgaggtcggagcagcgtcttcactcgctccaaagatcggtccactcggtctggcaccaaagaagatcggagaagacatcgccaaagagacagcgaaagaatggaaaggtcttcgagtcaccgtgaagcttacggtacagaatcgtcaagctaaggtcacagtggttccatccgcagcggctctagtcatcaaagccctcaaggagccagagagagataggaagaaagtgaagaacatcaaacataatggcaacatttcgtttgatgatgtgattgagattgctaagataatgcgtcctagatctatcgctaaggaattgagtggaacagtgaaggagattttaggaacttgtgtctctgttggttgcactgttgatggtaaagaccctaaggatcttcaggaagaaattaacagtggtgacattgatattcctaacgagtgataaaggtttttacttttgagttctctatcgttttattttttgtatttgattttgaggatttggtattagtaatactatatttcggaagttgagaattgttggcttttgcccatttgaatcctttcttgggattaatcaaaatgttcaattttctac

SEQ ID NO: 37696 - protein, 166 aa, Arabidopsis thaliana
  peptide (1)..(166): Ceres Seq. ID no. 12326968
MPPKLDPSQIVDVYVRVTGGEVGAASSLAPKIGPLGLAPKKIGEDIAKETAKEWKGLRVTVKLTVQNRQAKVTVVPSAAALVIKALKEPERDRKKVKNIKHNGNISFDDVIEIAKIMRPRSIAKELSGTVKEILGTCVSVGCTVDGKDPKDLQEEINSGDIDIPNE

SEQ ID NO: 37697 - DNA, 1352 bp, Arabidopsis thaliana
  misc_feature (1)..(1352): Ceres Seq. ID no. 13509120
  misc_feature (1)..(1352): Ortholog of  Ceres SEQ ID NO 12618555 as cited in SEQ ID NO 64345
  misc_feature (1)..(1352): Ortholog of  Ceres SEQ ID NO 13597612 as cited in SEQ ID NO 65302
aaagtgaaatgaagtcagcaatttcatcgtcactcttcttcaattcgaagaatcttttaaaccctaatcctctttctcgcttcatttctctcaaatctaacttcctccctaaattatctccgagatcgatcactagtcacaccttgaagctcccatcttcgtcaacctcagctttaagatccatttcctcttccatggcttcttctttcaaccctgaacaagctagagttccctctgctcttcctctcccagctcctccgttgaccaaattcaacatcggattgtgtcagctatctgttacatctgacaaaaagagaaacatctctcatgctaaaaaagccattgaagaagctgcttctaaaggagctaagcttgttctcttacccgaaatttggaacagtccgtattccaatgatagttttccagtttatgcggaggagattgatgcaggtggtgatgcttctccttcaacggcaatgctttctgaagtttccaaacgtctcaagattacaatcattggtggatctataccagaaagagttggagatcgtttgtataacacttgctgtgtctttggttccgatggagagctaaaagctaagcatcggaagatacatttatttgatatagacattcccgggaagattacttttatggaatccaaaactcttactgctggagagacaccaacaatcgttgacacagatgtagggcgtattggaataggcatctgttatgatatcaggttccaggagttagctatgatatatgctgcaagaggggctcatttgctgtgctacccgggagcctttaacatgacaactggaccattgcattgggaattactacaaagggccagggctacggataatcagttatatgtggcgacatgctcacctgccagagattcaggagctggctacactgcttgggggcactcaacactcgttgggccttttggagaagtactagcaacgactgagcatgaggaggccattatcatagcagagattgattactctatccttgaacaacgaaggactagccttccattgaataggcagcggcggggagatctttaccagcttgtagacgtacagcgcttagactctaaatgaacgcagcagtaactgtatatctgagagatattgcgagttgagcacgatttggttacttacaacttcatgcatgatcagtcatttctccacaactttgctgagatatgtaaaagaataaaaatcaaacttttgagttaaaatcgaacaaaggcaagtaaattctgcttagataatgtgaactccacccacttgccatgtgtttgttgtttataaacttcaatgcattctgataac

SEQ ID NO: 37698 - protein, 371 aa, Arabidopsis thaliana
  peptide (1)..(371): Ceres Seq. ID no. 13509121
SEMKSAISSSLFFNSKNLLNPNPLSRFISLKSNFLPKLSPRSITSHTLKLPSSSTSALRSISSSMASSFNPEQARVPSALPLPAPPLTKFNIGLCQLSVTSDKKRNISHAKKAIEEAASKGAKLVLLPEIWNSPYSNDSFPVYAEEIDAGGDASPSTAMLSEVSKRLKITIIGGSIPERVGDRLYNTCCVFGSDGELKAKHRKIHLFDIDIPGKITFMESKTLTAGETPTIVDTDVGRIGIGICYDIRFQELAMIYAARGAHLLCYPGAFNMTTGPLHWELLQRARATDNQLYVATCSPARDSGAGYTAWGHSTLVGPFGEVLATTEHEEAIIIAEIDYSILEQRRTSLPLNRQRRGDLYQLVDVQRLDSK

SEQ ID NO: 37699 - protein, 369 aa, Arabidopsis thaliana
  peptide (1)..(369): Ceres Seq. ID no. 13509122
MKSAISSSLFFNSKNLLNPNPLSRFISLKSNFLPKLSPRSITSHTLKLPSSSTSALRSISSSMASSFNPEQARVPSALPLPAPPLTKFNIGLCQLSVTSDKKRNISHAKKAIEEAASKGAKLVLLPEIWNSPYSNDSFPVYAEEIDAGGDASPSTAMLSEVSKRLKITIIGGSIPERVGDRLYNTCCVFGSDGELKAKHRKIHLFDIDIPGKITFMESKTLTAGETPTIVDTDVGRIGIGICYDIRFQELAMIYAARGAHLLCYPGAFNMTTGPLHWELLQRARATDNQLYVATCSPARDSGAGYTAWGHSTLVGPFGEVLATTEHEEAIIIAEIDYSILEQRRTSLPLNRQRRGDLYQLVDVQRLDSK

SEQ ID NO: 37700 - protein, 307 aa, Arabidopsis thaliana
  peptide (1)..(307): Ceres Seq. ID no. 13509123
MASSFNPEQARVPSALPLPAPPLTKFNIGLCQLSVTSDKKRNISHAKKAIEEAASKGAKLVLLPEIWNSPYSNDSFPVYAEEIDAGGDASPSTAMLSEVSKRLKITIIGGSIPERVGDRLYNTCCVFGSDGELKAKHRKIHLFDIDIPGKITFMESKTLTAGETPTIVDTDVGRIGIGICYDIRFQELAMIYAARGAHLLCYPGAFNMTTGPLHWELLQRARATDNQLYVATCSPARDSGAGYTAWGHSTLVGPFGEVLATTEHEEAIIIAEIDYSILEQRRTSLPLNRQRRGDLYQLVDVQRLDSK

SEQ ID NO: 37701 - DNA, 1758 bp, Arabidopsis thaliana
  misc_feature (1)..(1758): Ceres Seq. ID no. 13580639
  misc_feature (1)..(1758): Ortholog of  Ceres SEQ ID NO 15177320 as cited in SEQ ID NO 52645
  misc_feature (1)..(1758): Ortholog of  Ceres SEQ ID NO 15171359 as cited in SEQ ID NO 57279
  misc_feature (1)..(1758): Ortholog of  Ceres SEQ ID NO 14313840 as cited in SEQ ID NO 59568
  misc_feature (1)..(1758): Ortholog of  Ceres SEQ ID NO 13662245 as cited in SEQ ID NO 62708
  misc_feature (1)..(1758): Ortholog of  Ceres SEQ ID NO 14314084 as cited in SEQ ID NO 63256
  misc_feature (1)..(1758): Ortholog of  Ceres SEQ ID NO 14303091 as cited in SEQ ID NO 66369
aaagcttaacaacctccactagagactttcttgagcaaaaaagattggttataaaggaccaaccattgtcatgttattgagtgtcatttttgtgagggagagaattaagagagcaaaatgagcataaataggaatctgttgaatatcataataatcctttgtatatgtctcaatttgggttgtaacgatggagctcaagaaagagagactgattctcatactatccaagtcagctctctcctcccttcatcatcatcatcttgtgttctttctcccagagcgtctactacaaagtcttcactgcacgtgacgcatagacacggcacgtgttcgcgtctaaacaatggcaaggccacgagtccagaccatgtcgagatcctaagactcgaccaggctcgcgtaaactcaatccactcaaaactatcgaagaaactcgcaacagatcacgtcagtgaaagcaagtcaacggatctaccggctaaagacggaagcacactcggttcaggtaactacatcgtgacggtcggcctcgggacaccaaagaacgatctatcactaatcttcgacactggaagcgatttaacgtggactcagtgtcagccatgtgttcgaacttgctatgaccagaaggaaccaatctttaacccttctaagtctacttcttactacaacgtatcctgctcatcggctgcgtgtggttctctctcttctgctacaggaaacgccggaagctgttcggcttcgaattgcatctacggtattcaatacggcgatcaatcgttctccgtcggatttctcgccaaggagaagtttacactaacgaactccgacgtatttgacggcgtttatttcggttgcggcgagaacaaccaaggacttttcaccggtgtcgccggacttctcggtcttggtcgtgacaagctttcgtttccgtcgcagacggcaacggcttacaataagatcttctcttactgcctcccttcctccgctagctacaccggacatctcacattcggatccgccggaatctccagatccgttaaattcacaccaatttcaaccatcactgatggaacttccttctacggccttaatatcgtcgcaatcaccgtcggcggtcagaaattgccgattccttcaactgtattctctactccgggagctttaatcgattccggcaccgttatcactcgtctcccgccgaaagcctacgcggcgttaagaagctcgttcaaggcgaagatgtcaaagtatccgaccacgtcgggcgtctcgatcttggacacgtgtttcgatctcagcgggtttaagacggtgactatcccgaaagtggcgttctctttcagcggtggcgccgtcgtggagcttggttcgaaagggatattttacgtgtttaagatatctcaggtttgtctggcgtttgcagggaatagcgatgacagtaacgctgccatctttggaaacgttcagcagcaaacgctagaagttgtgtatgatggtgcgggtgggcgggtcgggtttgctccaaacgggtgtagttaagttagttaatgaaaaacagaacggggtaaattttaaatttatggatttggcacaaattagctttatccttaatcaagtgtgtaatttgggtaaagatcggaattcgtgatggtctttgaagtaattgtatagtaataagtttgtgtgcatgatacaacaattacaagaacaaactgtttattgtaaaattttattccaatacaactatacaagatg

SEQ ID NO: 37702 - protein, 474 aa, Arabidopsis thaliana
  peptide (1)..(474): Ceres Seq. ID no. 13580640
MSINRNLLNIIIILCICLNLGCNDGAQERETDSHTIQVSSLLPSSSSSCVLSPRASTTKSSLHVTHRHGTCSRLNNGKATSPDHVEILRLDQARVNSIHSKLSKKLATDHVSESKSTDLPAKDGSTLGSGNYIVTVGLGTPKNDLSLIFDTGSDLTWTQCQPCVRTCYDQKEPIFNPSKSTSYYNVSCSSAACGSLSSATGNAGSCSASNCIYGIQYGDQSFSVGFLAKEKFTLTNSDVFDGVYFGCGENNQGLFTGVAGLLGLGRDKLSFPSQTATAYNKIFSYCLPSSASYTGHLTFGSAGISRSVKFTPISTITDGTSFYGLNIVAITVGGQKLPIPSTVFSTPGALIDSGTVITRLPPKAYAALRSSFKAKMSKYPTTSGVSILDTCFDLSGFKTVTIPKVAFSFSGGAVVELGSKGIFYVFKISQVCLAFAGNSDDSNAAIFGNVQQQTLEVVYDGAGGRVGFAPNGCS

SEQ ID NO: 37703 - DNA, 1120 bp, Arabidopsis thaliana
  misc_feature (1)..(1120): Ceres Seq. ID no. 12466478
  misc_feature (1)..(1120): Ortholog of  Ceres SEQ ID NO 14310358 as cited in SEQ ID NO 54582
  misc_feature (1)..(1120): Ortholog of  Ceres SEQ ID NO 15176085 as cited in SEQ ID NO 69305
aatcatttgcagaagaaaaataaaaaaaaaaaacagagaaaaggagatatggaatcaatcggagtccttatgatgtgccccatgtcctcctacctcgagaacgagcttgagaagcgcttcaaccttcttcgcttctggacttctccggagaaatccgtcctcctagaaactcatcggaactccatccgcgccgtcgttgggaatgcttctgccggcgccgatgctcagctcatcagcgatctgcccaaccttgagattgtatccagcttcagcgtcgggctcgacaagatcgatttggggaaatgcaaagaaaaagggatccgcgtcaccaacacccccgacgttctcaccgaagacgtcgcagatctcgccatcgggcttatcctggctctccttcgacggctgtgtgagtgcgatcgctatgtaaggagcggaaaatggaagcaaggtgaattccaactcactaccaagtttagtggaaaatccgtggggatcattggtctaggtagaattgggactgccatcgcaaagagggctgaagcctttagctgcccaatcaattactactcaagaaccattaagcctgatgtcgcctacaagtattatccgacggtggttgaccttgctcaaaactcagacatcctcgtcgtcgcatgcccgttgaccgagcagaccagacacattgtggaccggcaggtcatggatgcattaggagctaagggcgtcctcataaacattggccgtggaccacatgttgatgagcaagagcttattaaagctctaacagaaggccgcctaggtggggctgcccttgatgtgtttgagcaggagcctcacgtgcccgaggagctctttggccttgagaatgtagttctcctccctcacgttgggagtggcactgtggaaacacggaatgccatggccgatcttgtcgtgggtaacttggaagcgcacttttctgggaaatcacttctgactccggtcgtctgagtcatgtgacacatttgggatttggtttcacttcatttgaaaggtttttatgttaacgaactcatgaaaagggtaatttctcttccaaaagaaagttgcactgtcgtatataaggaacggatttgaacac

SEQ ID NO: 37704 - protein, 329 aa, Arabidopsis thaliana
  peptide (1)..(329): Ceres Seq. ID no. 12466479
NHLQKKNKKKKQRKGDMESIGVLMMCPMSSYLENELEKRFNLLRFWTSPEKSVLLETHRNSIRAVVGNASAGADAQLISDLPNLEIVSSFSVGLDKIDLGKCKEKGIRVTNTPDVLTEDVADLAIGLILALLRRLCECDRYVRSGKWKQGEFQLTTKFSGKSVGIIGLGRIGTAIAKRAEAFSCPINYYSRTIKPDVAYKYYPTVVDLAQNSDILVVACPLTEQTRHIVDRQVMDALGAKGVLINIGRGPHVDEQELIKALTEGRLGGAALDVFEQEPHVPEELFGLENVVLLPHVGSGTVETRNAMADLVVGNLEAHFSGKSLLTPVV

SEQ ID NO: 37705 - protein, 313 aa, Arabidopsis thaliana
  peptide (1)..(313): Ceres Seq. ID no. 12466480
MESIGVLMMCPMSSYLENELEKRFNLLRFWTSPEKSVLLETHRNSIRAVVGNASAGADAQLISDLPNLEIVSSFSVGLDKIDLGKCKEKGIRVTNTPDVLTEDVADLAIGLILALLRRLCECDRYVRSGKWKQGEFQLTTKFSGKSVGIIGLGRIGTAIAKRAEAFSCPINYYSRTIKPDVAYKYYPTVVDLAQNSDILVVACPLTEQTRHIVDRQVMDALGAKGVLINIGRGPHVDEQELIKALTEGRLGGAALDVFEQEPHVPEELFGLENVVLLPHVGSGTVETRNAMADLVVGNLEAHFSGKSLLTPVV

SEQ ID NO: 37706 - protein, 306 aa, Arabidopsis thaliana
  peptide (1)..(306): Ceres Seq. ID no. 12466481
MMCPMSSYLENELEKRFNLLRFWTSPEKSVLLETHRNSIRAVVGNASAGADAQLISDLPNLEIVSSFSVGLDKIDLGKCKEKGIRVTNTPDVLTEDVADLAIGLILALLRRLCECDRYVRSGKWKQGEFQLTTKFSGKSVGIIGLGRIGTAIAKRAEAFSCPINYYSRTIKPDVAYKYYPTVVDLAQNSDILVVACPLTEQTRHIVDRQVMDALGAKGVLINIGRGPHVDEQELIKALTEGRLGGAALDVFEQEPHVPEELFGLENVVLLPHVGSGTVETRNAMADLVVGNLEAHFSGKSLLTPVV

SEQ ID NO: 37707 - DNA, 766 bp, Arabidopsis thaliana
  misc_feature (1)..(766): Ceres Seq. ID no. 13489647
  misc_feature (1)..(766): Ortholog of  Ceres SEQ ID NO 13600048 as cited in SEQ ID NO 377
  misc_feature (1)..(766): Ortholog of  Ceres SEQ ID NO 15173379 as cited in SEQ ID NO 63694
ctctgaaacttttgccttgcttgcttgcccagaaagtcgccgagaaagttaaaagtagaacggcggaggaaaaaaaaacgaagaggaagaggagagatggagtcgcagaagaagatagctcatgagatcggaggtatgaagaacgatgctcttcgctttggtcttcacggcgttaagagcgatatccttagatctcatcctctcgaaacggcttacgaatctgggaagcaatcacaagaagaaatgaagaggagagtgatcacgcatacttatggagctgctcttcctttgaagatggatcttgatagacaaatcctttctcggtttcagagacctcctggaccaattccttcatcaatgcttggccttgaagtctacacaggagctctagataattttggttttgaggattacttgaatgatcctcgcgaatccgagacgctgaaaccagtagactttcaccacgggatggaagttcggcttggtctctccaaaggcccagcttccccaagtttcatgtagtcaccaccatcaaagtatttccttcgtcaggtctcatatgctttttaatctgagtaagatcatgttatgaatttccaccagccctaaaagaatctacttgttgtttgatctcttctctatactgtgtctcctttgctctgaacatgataaaacatatgaactgtgtttcagttcttatctctctcagttcacaatttgttggacttgcttagttatttaaataagattatgctcctatttcatt

SEQ ID NO: 37708 - protein, 141 aa, Arabidopsis thaliana
  peptide (1)..(141): Ceres Seq. ID no. 13489648
MESQKKIAHEIGGMKNDALRFGLHGVKSDILRSHPLETAYESGKQSQEEMKRRVITHTYGAALPLKMDLDRQILSRFQRPPGPIPSSMLGLEVYTGALDNFGFEDYLNDPRESETLKPVDFHHGMEVRLGLSKGPASPSFM

SEQ ID NO: 37709 - protein, 128 aa, Arabidopsis thaliana
  peptide (1)..(128): Ceres Seq. ID no. 13489649
MKNDALRFGLHGVKSDILRSHPLETAYESGKQSQEEMKRRVITHTYGAALPLKMDLDRQILSRFQRPPGPIPSSMLGLEVYTGALDNFGFEDYLNDPRESETLKPVDFHHGMEVRLGLSKGPASPSFM

SEQ ID NO: 37710 - protein, 92 aa, Arabidopsis thaliana
  peptide (1)..(92): Ceres Seq. ID no. 13489650
MKRRVITHTYGAALPLKMDLDRQILSRFQRPPGPIPSSMLGLEVYTGALDNFGFEDYLNDPRESETLKPVDFHHGMEVRLGLSKGPASPSFM

SEQ ID NO: 37711 - DNA, 1148 bp, Arabidopsis thaliana
  misc_feature (1)..(1148): Ceres Seq. ID no. 12577151
  misc_feature (1)..(1148): Ortholog of  Ceres SEQ ID NO 13595507 as cited in SEQ ID NO 56651
  misc_feature (1)..(1148): Ortholog of  Ceres SEQ ID NO 15227285 as cited in SEQ ID NO 58357
atcgtcgataaagcaaaaaatcaaatcaagcttcttcttcgatcttcttcttcgatcttcttcctctcgtcaggtttcgtgtggttcgttctaatcgcgttgtattctttctccaaggaagatggctctaaaggaacagctagataaattcaacaaacagcaagtgaaatgccaatctactctttcgagcattgcttcttccagagaaagaacgagttcttcgaggcagaatgtgcctttgcctgcggcaatcacgcagaagaagcctgatgcagctcctgtcaagttttcaagcgataccgagcgacttcagaacattaacaacattagaaaagctcctgttggagctcaaatcaagcgtgtcattgatcttctctatgagagaaggctagccttgacgccagagcaaataaatgaatggtgtcatgtagatatgcatgctaataaggctgtttttgatagtttaaggaagaatccgaaagcacattatgatggaagaaggttctcttataaggctacgcacgatgttaatgataagaaccagcttctttcattggtgagaaaataccttgatgggattgcggtggttgatctcaaagacgcttaccctaatgtaatggaggatttgaaggctctgagtgcttcaggggacatctacttgctatcaaattcacaagaggacattgcatacccaaatgatttcaagtgtgagattaaggttgatgacgaatttaaagctctattccgtgacataaacatcccgaacgacatgctggacgtggagaaggagctgctgaaaatcggtttgaagccggcgacaaacactgcagagaggagagctgctgcacagacgcatggcatatcgaataaaccaaaggataagaagaagaagaaacaagagatcagcaagagaaccaaactcaccaatgcccatcttcccgagcttttccagaaccttaacggcagcagttcccggaactgaacctcataaatggatgatcatgcggttctaaattcatattgagcctgaattttcttgtaattgtaataattgttacaatctttagtttacaaattacaatgattctcatgtattctcacgacatttgctagaaatatagaataaacacatttgggagttgggtctt

SEQ ID NO: 37712 - protein, 286 aa, Arabidopsis thaliana; identical to SEQ ID NO: 22985
  peptide (1)..(286): Ceres Seq. ID no. 12577152

SEQ ID NO: 37713 - protein, 182 aa, Arabidopsis thaliana; identical to SEQ ID NO: 22986
  peptide (1)..(182): Ceres Seq. ID no. 12577153

SEQ ID NO: 37714 - DNA, 1093 bp, Arabidopsis thaliana
  misc_feature (1)..(1093): Ceres Seq. ID no. 13509083
  misc_feature (1)..(1093): Ortholog of  Ceres SEQ ID NO 14304359 as cited in SEQ ID NO 52581
gttagctgcgaaacaagatgctgttacagtcatagaagtcttatgcgtacacgactccgatttcaaaatctgaacggaatataaactctcgacgacgaaaatctcaaaatccccaaaatctcctccaactccgagttatggctacatgttccctcttaccaccaccgtctttttctccgcgccggcgattctgtagtttttctcacaatcgccggtctctaccttcaatattcagtttcaacaaagagcgtgtctcacgaagagtcttctgtagctccaaagagaacgatataaacagagatcggaatcagtctacaggaattcaagtctacggcgaaatcgagaggttattaacagagactgtaaaaaattctcagagtagctccggtggatcctctgattggtcagaagttgagggagcatgggtgctgaaaccaagaaactcgaaaccgaagatggtttgttcatttcattggcggtatatttgtcggtgcagcaccacagcttacttatcgattgtttctcgagagattagcggagaagagawgattttgttccaaaaccagaagaaacaagacgccttataagatcctactatggaayctctaggaatctgttgataaaattcgaggatgattcaatagatgaaacatcaatcctagctcaggtgcttggtgtggaatcatccataagctcaaagctagacatgtctatccgtacactgcccggagatcacggtctccctctgcaacaggctcttccggatgttccaccaggaatggcagaagcggtgaatcgaggaagtgagtttttagcgaatattgctgtcgggactccgagggaatctatggctaaagaggttggaggttcgctgggaatggactcgaagatccttcgtgctgacatgtccaaagatcttgcgcagctcgttgatgcaatcacttcttggatgatttcaaatatgggtccaaagcttctgagaccataatgttttctcatgtacacaaaacatacaaaaatctattaacacagggcgattgcatactatttaatgtaatgtaactgtatatattataacatgaagagtttggtc

SEQ ID NO: 37715 - protein, 149 aa, Arabidopsis thaliana
  peptide (1)..(149): Ceres Seq. ID no. 15222823
  misc_feature (137)..(137): Xaa is any aa, unknown or other
MATCSLLPPPSFSPRRRFCSFSHNRRSLPSIFSFNKERVSRRVFCSSKENDINRDRNQSTGIQVYGEIERLLTETVKNSQSSSGGSSDWSEVEGAWVLKPRNSKPKMVCSFHWRYICRCSTTAYLSIVSREISGEEXILFQNQKKQDAL

SEQ ID NO: 37716 - protein, 93 aa, Arabidopsis thaliana
  peptide (1)..(93): Ceres Seq. ID no. 15222824
MSIRTLPGDHGLPLQQALPDVPPGMAEAVNRGSEFLANIAVGTPRESMAKEVGGSLGMDSKILRADMSKDLAQLVDAITSWMISNMGPKLLRP

SEQ ID NO: 37717 - DNA, 864 bp, Arabidopsis thaliana
  misc_feature (1)..(864): Ceres Seq. ID no. 13509088
  misc_feature (1)..(864): Ortholog of  Ceres SEQ ID NO 13624571 as cited in SEQ ID NO 0
tctgttgttgattcgcaaaggcgaagattatccatcttctcagttactcctactggaaccaaaagctcagaaccttaaaacatggagtctctatctcttcccgttctaaatcctctgttagcttctggttctaatctttttagaaaccagcactcgaggatgacctcttcaatggtatcttcacttaaatcccccattggaggcacatcgctctccactgttcgtcgctttggagtaggtgttgttaggatgcaagctgttgatgaagatattgatttgaagcaaatgagagacatagctgctgctaaaaagcgttgggatggtttgttaagggaaggaaaagtgaagcttcttacaccaagagaagcaggctatgctatttctctttcaaacaaacctctccttgatgttcgtccctctagcgagcgcaacaaggcatggattaaaggctccacttgggttcctatcttcgacaatgatgacaaccttgacgctggaactctttccaaaaaagtcactagttttgctatggggggatggtggagtggagcacctacactatcttttaataggtatgtctgcgagaggtatgagaatctgttctgggtacaaggtggtttagaatctgctcaagacgaggatctagtgacagaaggtgtccaacccttgaagcttgctggtattggaggtttttcagagttcctcggttggacagaccagcaaagagctcaagctgcgaaagaaggttgggggtaccgtttggtatatactgctcgtctgtttggagttgttctggctgctgatgctttgttcgttggggctcagcaactaggccattatattcaggagttaagaggccattag

SEQ ID NO: 37718 - protein, 260 aa, Arabidopsis thaliana
  peptide (1)..(260): Ceres Seq. ID no. 13509089
MESLSLPVLNPLLASGSNLFRNQHSRMTSSMVSSLKSPIGGTSLSTVRRFGVGVVRMQAVDEDIDLKQMRDIAAAKKRWDGLLREGKVKLLTPREAGYAISLSNKPLLDVRPSSERNKAWIKGSTWVPIFDNDDNLDAGTLSKKVTSFAMGGWWSGAPTLSFNRYVCERYENLFWVQGGLESAQDEDLVTEGVQPLKLAGIGGFSEFLGWTDQQRAQAAKEGWGYRLVYTARLFGVVLAADALFVGAQQLGHYIQELRGH

SEQ ID NO: 37719 - protein, 234 aa, Arabidopsis thaliana
  peptide (1)..(234): Ceres Seq. ID no. 13509090
MTSSMVSSLKSPIGGTSLSTVRRFGVGVVRMQAVDEDIDLKQMRDIAAAKKRWDGLLREGKVKLLTPREAGYAISLSNKPLLDVRPSSERNKAWIKGSTWVPIFDNDDNLDAGTLSKKVTSFAMGGWWSGAPTLSFNRYVCERYENLFWVQGGLESAQDEDLVTEGVQPLKLAGIGGFSEFLGWTDQQRAQAAKEGWGYRLVYTARLFGVVLAADALFVGAQQLGHYIQELRGH

SEQ ID NO: 37720 - protein, 230 aa, Arabidopsis thaliana
  peptide (1)..(230): Ceres Seq. ID no. 13509091
MVSSLKSPIGGTSLSTVRRFGVGVVRMQAVDEDIDLKQMRDIAAAKKRWDGLLREGKVKLLTPREAGYAISLSNKPLLDVRPSSERNKAWIKGSTWVPIFDNDDNLDAGTLSKKVTSFAMGGWWSGAPTLSFNRYVCERYENLFWVQGGLESAQDEDLVTEGVQPLKLAGIGGFSEFLGWTDQQRAQAAKEGWGYRLVYTARLFGVVLAADALFVGAQQLGHYIQELRGH

SEQ ID NO: 37721 - DNA, 1808 bp, Arabidopsis thaliana
  misc_feature (1)..(1808): Ceres Seq. ID no. 13509124
  misc_feature (1)..(1808): Ortholog of  Ceres SEQ ID NO 14307831 as cited in SEQ ID NO 54732
aaaaaaattaatcttcttctacactccaaaaattcaagacctttcagagacaaaaacgtgaaacaacacaacttcgatgaaagccgccgttttccgtaacgaagacggagacgaggaggaggaagaagaagaagaagaagaagtctgtaatgttttcgacggcggcgaggtagagtctaagagaaacaacgaaaccaaaaacctcaaaggatttttcacttctttgcttttgatggaggagcacgagaagcaagaccaggaagctcgtaacgctgcttctcgccgtgaaatgtctgattttcaatctaattaccggaaaagagctagaactatgtccgattactactccgatctcaacgattactacgctgatgctgaggaaagtggagatatcaatctgaagaagtcacgcgtctcacgcgccgtcgcttccgttgctgttgctgctgcttcggagattgaggcggagagcagtgagataaccggatccggatcggttcgtggtaccggttcgggtcagcaaagacggttatgggttaaagatcggagcagagcttggtgggaagagtgtagccgattggattatccagaagaagatttcaaaaaagcgtttcgaatgtctaaatcaacgtttgagttaatctgcgatgagcttaattcagcggttgctaaagaagacaccgcgttaagaaacgcgattccagtgcgtcagcgagtcgcggtttgtatatggagattagccaccggtgagccacttcgtcttgtctccaagaagtttggtttaggaatctcaacttgtcacaagcttgttcttgaggtatgtaaagctattaaggacgttttaatgcctaagtatcttcaatggccagatgatgaatctcttagaaacattagagaacgtttcgaatcggtttcgggtattccaaacgttgttggctctatgtatactactcacattccgattatagctcctaagattagtgtagcctcttatttcaataagaggcatactgagaggaaccagaagacgtcgtattcgattacaattcaagccgttgtgaacccgaaaggtgtttttactgacttgtgcatcggatggcccgggtcaatgccggatgataaggtgttagagaagtcattgttgtatcaaagagctaacaatggaggtttgttgaaggggatgtgggttgctggtggaccgggtcatccgttgttggactgggttttggttccgtatacgcaacagaacttgacgtggacgcagcatgcgtttaatgagaagatgagcgaagtgcagggagtggctaaggaagcgtttgggaggttgaaagggcggtgggcgtgtctgcagaaacggactgaagtgaagctgcaggatttgcctaccgttttgggtgcttgttgtgtgcttcacaacatatgtgaaatgagagaggagaagatggagccagagctgatggttgaagtgattgatgatgaggttttgcctgaaaacgtattgagatcggttaatgcgatgaaggctagagatactatctcacataatctattgcatcacggcctcgcgggtacttctttcctataaaggataatggaaatgttcttttaatttccttctatatgataaactaaacttactttgattctttggtttatgcataatgtattattgtacctttagatcacagatgttatatgaggcaatagaagaaaattaaattatatacacatactatacatttatttccagtctcttttgatgagtgttagacatgaatgtataataagctcaatgagattttcattcg

SEQ ID NO: 37722 - protein, 502 aa, Arabidopsis thaliana
  peptide (1)..(502): Ceres Seq. ID no. 13509125
MKAAVFRNEDGDEEEEEEEEEEVCNVFDGGEVESKRNNETKNLKGFFTSLLLMEEHEKQDQEARNAASRREMSDFQSNYRKRARTMSDYYSDLNDYYADAEESGDINLKKSRVSRAVASVAVAAASEIEAESSEITGSGSVRGTGSGQQRRLWVKDRSRAWWEECSRLDYPEEDFKKAFRMSKSTFELICDELNSAVAKEDTALRNAIPVRQRVAVCIWRLATGEPLRLVSKKFGLGISTCHKLVLEVCKAIKDVLMPKYLQWPDDESLRNIRERFESVSGIPNVVGSMYTTHIPIIAPKISVASYFNKRHTERNQKTSYSITIQAVVNPKGVFTDLCIGWPGSMPDDKVLEKSLLYQRANNGGLLKGMWVAGGPGHPLLDWVLVPYTQQNLTWTQHAFNEKMSEVQGVAKEAFGRLKGRWACLQKRTEVKLQDLPTVLGACCVLHNICEMREEKMEPELMVEVIDDEVLPENVLRSVNAMKARDTISHNLLHHGLAGTSFL

SEQ ID NO: 37723 - protein, 450 aa, Arabidopsis thaliana
  peptide (1)..(450): Ceres Seq. ID no. 13509126
MEEHEKQDQEARNAASRREMSDFQSNYRKRARTMSDYYSDLNDYYADAEESGDINLKKSRVSRAVASVAVAAASEIEAESSEITGSGSVRGTGSGQQRRLWVKDRSRAWWEECSRLDYPEEDFKKAFRMSKSTFELICDELNSAVAKEDTALRNAIPVRQRVAVCIWRLATGEPLRLVSKKFGLGISTCHKLVLEVCKAIKDVLMPKYLQWPDDESLRNIRERFESVSGIPNVVGSMYTTHIPIIAPKISVASYFNKRHTERNQKTSYSITIQAVVNPKGVFTDLCIGWPGSMPDDKVLEKSLLYQRANNGGLLKGMWVAGGPGHPLLDWVLVPYTQQNLTWTQHAFNEKMSEVQGVAKEAFGRLKGRWACLQKRTEVKLQDLPTVLGACCVLHNICEMREEKMEPELMVEVIDDEVLPENVLRSVNAMKARDTISHNLLHHGLAGTSFL

SEQ ID NO: 37724 - protein, 431 aa, Arabidopsis thaliana
  peptide (1)..(431): Ceres Seq. ID no. 13509127
MSDFQSNYRKRARTMSDYYSDLNDYYADAEESGDINLKKSRVSRAVASVAVAAASEIEAESSEITGSGSVRGTGSGQQRRLWVKDRSRAWWEECSRLDYPEEDFKKAFRMSKSTFELICDELNSAVAKEDTALRNAIPVRQRVAVCIWRLATGEPLRLVSKKFGLGISTCHKLVLEVCKAIKDVLMPKYLQWPDDESLRNIRERFESVSGIPNVVGSMYTTHIPIIAPKISVASYFNKRHTERNQKTSYSITIQAVVNPKGVFTDLCIGWPGSMPDDKVLEKSLLYQRANNGGLLKGMWVAGGPGHPLLDWVLVPYTQQNLTWTQHAFNEKMSEVQGVAKEAFGRLKGRWACLQKRTEVKLQDLPTVLGACCVLHNICEMREEKMEPELMVEVIDDEVLPENVLRSVNAMKARDTISHNLLHHGLAGTSFL

SEQ ID NO: 37725 - DNA, 939 bp, Arabidopsis thaliana
  misc_feature (1)..(939): Ceres Seq. ID no. 12390589
  misc_feature (1)..(939): Ortholog of  Ceres SEQ ID NO 14305671 as cited in SEQ ID NO 57687
ataacaaaccagggtcagggttttatcttccatattcttttcccactgattcttacaatcgatctaagggaatctacgaactgtttggtaatttctggtgggaaaagtcttgatcttgctgtttggtttggagtaatggtgagtgcttggtttgttgttggctcaccggtgatggactcttcgagcagtccatgtttatgtctggatgctcacacgacgggtaccatcaggaggaagaagatccttggcaaagcaagaaatctggaattaggaagctctttcactggctcacgcattgtttttaggctttctccgaagcgtgtatcgagaattgcgaatcgaaagagcaaaaagctcttgattgtgaatgaggatgttgctggtaattacgacgataccttcggtgatgtacaaaagcaaattgttaattattttacatacaaagctgtgaggacggttcttcatcagctgtacgaaatgaatcctcctcaatacacttggttctataatcatatcataacaaacagaccgacggatggcaaacgtttcctccgtgccctcggcaaggagagtcaggagcttgcagaaagagtgatgatcacgcgtcttcacttgtatggcaaatggatcaagaaatgcgaccatgggaagatataccaggaaatatcggatgaaaacttggcgttgatgcgtgaacgcctgatggagaccgtgatatggccttccgatgacacaaactcaaggtaataggctgaagaagacagcgcacaccacagcacaacatttgctttgtcaatttgcttctcagtttttaggacttcgagttttttagtttgattacatattactatagtgaaagagcagtgtgtatatgatgtctattcttggcatgtactatatgatattaggggcaaaaaacaacacccttcttgtgctcct

SEQ ID NO: 37726 - protein, 248 aa, Arabidopsis thaliana
  peptide (1)..(248): Ceres Seq. ID no. 12390590
ITNQGQGFIFHILFPLILTIDLRESTNCLVISGGKSLDLAVWFGVMVSAWFVVGSPVMDSSSSPCLCLDAHTTGTIRRKKILGKARNLELGSSFTGSRIVFRLSPKRVSRIANRKSKKLLIVNEDVAGNYDDTFGDVQKQIVNYFTYKAVRTVLHQLYEMNPPQYTWFYNHIITNRPTDGKRFLRALGKESQELAERVMITRLHLYGKWIKKCDHGKIYQEISDENLALMRERLMETVIWPSDDTNSR

SEQ ID NO: 37727 - protein, 203 aa, Arabidopsis thaliana
  peptide (1)..(203): Ceres Seq. ID no. 12390591
MVSAWFVVGSPVMDSSSSPCLCLDAHTTGTIRRKKILGKARNLELGSSFTGSRIVFRLSPKRVSRIANRKSKKLLIVNEDVAGNYDDTFGDVQKQIVNYFTYKAVRTVLHQLYEMNPPQYTWFYNHIITNRPTDGKRFLRALGKESQELAERVMITRLHLYGKWIKKCDHGKIYQEISDENLALMRERLMETVIWPSDDTNSR

SEQ ID NO: 37728 - protein, 191 aa, Arabidopsis thaliana
  peptide (1)..(191): Ceres Seq. ID no. 12390592
MDSSSSPCLCLDAHTTGTIRRKKILGKARNLELGSSFTGSRIVFRLSPKRVSRIANRKSKKLLIVNEDVAGNYDDTFGDVQKQIVNYFTYKAVRTVLHQLYEMNPPQYTWFYNHIITNRPTDGKRFLRALGKESQELAERVMITRLHLYGKWIKKCDHGKIYQEISDENLALMRERLMETVIWPSDDTNSR

SEQ ID NO: 37729 - DNA, 1413 bp, Arabidopsis thaliana
  misc_feature (1)..(1413): Ceres Seq. ID no. 13509128
  misc_feature (1)..(1413): Ortholog of  Ceres SEQ ID NO 13596194 as cited in SEQ ID NO 68484
gcagtgtgttttcttacagcgaagagccccaaagagaagaacaaaatttcgaaaatagagaaagagaagaagttgacgatggattcaaaggcgaagcagatgattctttcagctctctgcaaacacttctctttggatcctgaaccttttgtgggcggagcgggtgaaagtgatatcaagacactttattctaatgtattgaaggcatctggaaaggaagtatctgcacaaaacaacgatgttttgaagtggctagattttgcggaaggtttctcttcagattcaaaggattggttttcagctcttgaaaagttgaatttagagttagctaccaagtcagtgctcttgggaaacggattgacgccatcggcagctgatgttgctgtgttttcagctctgcattcttcagtgcttggcctctcagattcagacaaggagaaagtaccacatgtcataagatgggtgaattacatccagaataaagaagagttgtcgacattatttgcaccaatacctgtgaagctaccagaatttagcttcgaggtaccaaaacctgccattaaggtggaaacaaattctaattcaaaaaaagctgcagaaggtgtaaagcctgttgacaagccagatgtgcagccgcagctgggcacaaagaaaactgagccagaggaaccaaagaaaaatgcagcaaaagagaaggatgccaaaaaggaaaagaagaagcctgctgaaccagaaccagctaagaaagaggcagagcttagtgtcagtttgcttaacattcaggttggtctaattcgtaaagcatggaagcacccatcggcggatagtttgctggtggaagaaatagatgtcggggaggataaagtgagacaagtagttagtggcttagcaaagttctgcagtcctgaggatctaacgaaccgcctcgttgcactcatcacaaatgtcaaacctggaaagctaagagatgtaatgtcacaaggactggttctttgtgcttcaagtgaagatcactcggtggtagagccgttgctaccacctgctggtgctaaaccaggagagcgtgtttcattttcagggattgaaggaaagccagaagatgtactgaacccaaaaaagaagcaactagagaagataacaccgggtctctacactgatgaaaatggcgtagccacatacaaaggcatacaattcatgacctcggctggaccttgcacttccagcatccccaaggcgaccatcaagtagtaaactcagttgatacttctctcctctactctagcgtttttctttgatattcgcaaactcagttggaaaaagaaaagatgttctttttgtcacaattcgaattaatctaaaaactttcttcttattagctttttgacaaacatcattgtttcaatttccgttttg

SEQ ID NO: 37730 - protein, 415 aa, Arabidopsis thaliana
  peptide (1)..(415): Ceres Seq. ID no. 13509129
AVCFLTAKSPKEKNKISKIEKEKKLTMDSKAKQMILSALCKHFSLDPEPFVGGAGESDIKTLYSNVLKASGKEVSAQNNDVLKWLDFAEGFSSDSKDWFSALEKLNLELATKSVLLGNGLTPSAADVAVFSALHSSVLGLSDSDKEKVPHVIRWVNYIQNKEELSTLFAPIPVKLPEFSFEVPKPAIKVETNSNSKKAAEGVKPVDKPDVQPQLGTKKTEPEEPKKNAAKEKDAKKEKKKPAEPEPAKKEAELSVSLLNIQVGLIRKAWKHPSADSLLVEEIDVGEDKVRQVVSGLAKFCSPEDLTNRLVALITNVKPGKLRDVMSQGLVLCASSEDHSVVEPLLPPAGAKPGERVSFSGIEGKPEDVLNPKKKQLEKITPGLYTDENGVATYKGIQFMTSAGPCTSSIPKATIK

SEQ ID NO: 37731 - protein, 389 aa, Arabidopsis thaliana
  peptide (1)..(389): Ceres Seq. ID no. 13509130
MDSKAKQMILSALCKHFSLDPEPFVGGAGESDIKTLYSNVLKASGKEVSAQNNDVLKWLDFAEGFSSDSKDWFSALEKLNLELATKSVLLGNGLTPSAADVAVFSALHSSVLGLSDSDKEKVPHVIRWVNYIQNKEELSTLFAPIPVKLPEFSFEVPKPAIKVETNSNSKKAAEGVKPVDKPDVQPQLGTKKTEPEEPKKNAAKEKDAKKEKKKPAEPEPAKKEAELSVSLLNIQVGLIRKAWKHPSADSLLVEEIDVGEDKVRQVVSGLAKFCSPEDLTNRLVALITNVKPGKLRDVMSQGLVLCASSEDHSVVEPLLPPAGAKPGERVSFSGIEGKPEDVLNPKKKQLEKITPGLYTDENGVATYKGIQFMTSAGPCTSSIPKATIK

SEQ ID NO: 37732 - protein, 382 aa, Arabidopsis thaliana
  peptide (1)..(382): Ceres Seq. ID no. 13509131
MILSALCKHFSLDPEPFVGGAGESDIKTLYSNVLKASGKEVSAQNNDVLKWLDFAEGFSSDSKDWFSALEKLNLELATKSVLLGNGLTPSAADVAVFSALHSSVLGLSDSDKEKVPHVIRWVNYIQNKEELSTLFAPIPVKLPEFSFEVPKPAIKVETNSNSKKAAEGVKPVDKPDVQPQLGTKKTEPEEPKKNAAKEKDAKKEKKKPAEPEPAKKEAELSVSLLNIQVGLIRKAWKHPSADSLLVEEIDVGEDKVRQVVSGLAKFCSPEDLTNRLVALITNVKPGKLRDVMSQGLVLCASSEDHSVVEPLLPPAGAKPGERVSFSGIEGKPEDVLNPKKKQLEKITPGLYTDENGVATYKGIQFMTSAGPCTSSIPKATIK

SEQ ID NO: 37733 - DNA, 981 bp, Arabidopsis thaliana
  misc_feature (1)..(981): Ceres Seq. ID no. 12337818
  misc_feature (1)..(981): Ortholog of  Ceres SEQ ID NO 15179139 as cited in SEQ ID NO 1093
  misc_feature (1)..(981): Ortholog of  Ceres SEQ ID NO 15226793 as cited in SEQ ID NO 58689
atcacgatcaaaaatgccatagtacataaagtatccattaaaacgtagatctagtctcttcacaacacttcaactaataacgcaaaaatcagtttctctttgagtaagtgtttactacaattaaactaactcaggcaagtctatgatcatggcttcttctgctgctgcatcgatctctatgataactctaaggaacctctctcgcaatcatcaatctcaccaaagcactcttctcggtttctctagatccttccataaccaaaggatctcatctaacagtccaggtctctccacacgagcaagatccaccacttcctccactggaggtttcttcagaaccatttgcagcagcagcagcaacgacaactccagaccaactaagatccaagagcttaacgtctacgagttcaacgaaggtgatcgaaactccagcggttttaaaactagggaaaaaaccagatcagctttgtctcggagatcttgtccccttcacaaacaaactctacacaggagatctcacaaaacgcataggaatcaccgcaggtctctgcgttttgatccaacacgttccagagaagaaaggtgatcgctttgaagcttcttacagtttctacttcggagattacggtcacatatcagttcaaggaccttatctcacttacgaggatacgtttcttgctatcaccggtggctccggcgtgtttgaaggagcttacggacaggtcaagcttcgtcagcttgtgtatcctacgaagctgttttacactttttacttgaaaggtgttgctgctgatttaccggtggagcttaccgggaaacatgttgagccgtaaggaagtgaaaccggcggctgaagctcaggcgactcagcccggcgctacgatcgctaactttactaattgaaatctaaatctttgtgggtgtctttgtcatggatcttattgggctgttgttcattgtgtttacattttaataatgggc

SEQ ID NO: 37734 - protein, 147 aa, Arabidopsis thaliana
  peptide (1)..(147): Ceres Seq. ID no. 12337819
MIMASSAAASISMITLRNLSRNHQSHQSTLLGFSRSFHNQRISSNSPGLSTRARSTTSSTGGFFRTICSSSSNDNSRPTKIQELNVYEFNEGDRNSSGFKTREKTRSALSRRSCPLHKQTLHRRSHKTHRNHRRSLRFDPTRSREER

SEQ ID NO: 37735 - protein, 145 aa, Arabidopsis thaliana
  peptide (1)..(145): Ceres Seq. ID no. 12337820
MASSAAASISMITLRNLSRNHQSHQSTLLGFSRSFHNQRISSNSPGLSTRARSTTSSTGGFFRTICSSSSNDNSRPTKIQELNVYEFNEGDRNSSGFKTREKTRSALSRRSCPLHKQTLHRRSHKTHRNHRRSLRFDPTRSREER

SEQ ID NO: 37736 - protein, 135 aa, Arabidopsis thaliana
  peptide (1)..(135): Ceres Seq. ID no. 12337821
MITLRNLSRNHQSHQSTLLGFSRSFHNQRISSNSPGLSTRARSTTSSTGGFFRTICSSSSNDNSRPTKIQELNVYEFNEGDRNSSGFKTREKTRSALSRRSCPLHKQTLHRRSHKTHRNHRRSLRFDPTRSREER

SEQ ID NO: 37737 - DNA, 1011 bp, Arabidopsis thaliana
  misc_feature (1)..(1011): Ceres Seq. ID no. 12738934
  misc_feature (1)..(1011): Ortholog of  Ceres SEQ ID NO 14311713 as cited in SEQ ID NO 51356
  misc_feature (1)..(1011): Ortholog of  Ceres SEQ ID NO 14303126 as cited in SEQ ID NO 67219
ctgtttctttttgcttccttagacttctccgtcgattaacccttgccgagggtcatttttttttcttgaattttttcaccaagtgttcgttcacggcattgcttgtcctccagtatgagtatctccggtgctgcagttggttcaggcagaaatttaagaagagcggtagagtttgggaaaactcatgtggttaggcctaaagggaaacatcaagcaactattgtctggttacatgggcttggggacaatggctcgagctggtcccagcttttggagacccttccccttccaaatatcaaatggatttgcccgactgctccttctcaaccaataagtttatttggtggttttccctccacagcttggtttgatgttgtggacatcaatgaagatggacctgatgatatggaaggattggatgtggctgctgcacatgttgcaaatctgttgtcgaatgagcctgctgacattaaattaggtgttggaggattcagcatgggtgcggcgacatctctatattctgcaacttgttttgctctcggtaaatatggaaatggcaatccataccctatcaatttaagcgcaatcataggcttaagcggctggcttccttgtgcaaagacattggctggcaaactagaagaggaacagatcaagaaccgagctgcatcgttacccattgttgtctgtcatggaaaagctgatgatgtggtaccgttcaagtttggggagaaatcttcacaggctttgctttcaaatgggtttaagaaggtgaccttcaaaccttacagtgcacttggtcaccacacaatcccacaggagttggatgagttgtgcgcatggttgacatccacgctcagcctcgaaggttgatacttcctatgatgtagctttctgatgaaaacccttcaactcttgagagtttgattgaattggatgtttcaggatttcacaatgttttcattggaatatttgtgtaagacacattcgtctagtagcaaatcttctccc

SEQ ID NO: 37738 - protein, 252 aa, Arabidopsis thaliana
  peptide (1)..(252): Ceres Seq. ID no. 12738935
MSISGAAVGSGRNLRRAVEFGKTHVVRPKGKHQATIVWLHGLGDNGSSWSQLLETLPLPNIKWICPTAPSQPISLFGGFPSTAWFDVVDINEDGPDDMEGLDVAAAHVANLLSNEPADIKLGVGGFSMGAATSLYSATCFALGKYGNGNPYPINLSAIIGLSGWLPCAKTLAGKLEEEQIKNRAASLPIVVCHGKADDVVPFKFGEKSSQALLSNGFKKVTFKPYSALGHHTIPQELDELCAWLTSTLSLEG

SEQ ID NO: 37739 - protein, 155 aa, Arabidopsis thaliana
  peptide (1)..(155): Ceres Seq. ID no. 12738936
MEGLDVAAAHVANLLSNEPADIKLGVGGFSMGAATSLYSATCFALGKYGNGNPYPINLSAIIGLSGWLPCAKTLAGKLEEEQIKNRAASLPIVVCHGKADDVVPFKFGEKSSQALLSNGFKKVTFKPYSALGHHTIPQELDELCAWLTSTLSLEG

SEQ ID NO: 37740 - DNA, 1420 bp, Arabidopsis thaliana; identical to SEQ ID NO: 29119
  misc_feature (1)..(1420): Ceres Seq. ID no. 12602555
  misc_feature (1)..(1420): Ortholog of  Ceres SEQ ID NO 15175857 as cited in SEQ ID NO 59046

SEQ ID NO: 37741 - protein, 341 aa, Arabidopsis thaliana; identical to SEQ ID NO: 29120
  peptide (1)..(341): Ceres Seq. ID no. 12602556

SEQ ID NO: 37742 - protein, 330 aa, Arabidopsis thaliana; identical to SEQ ID NO: 29121
  peptide (1)..(330): Ceres Seq. ID no. 12602557

SEQ ID NO: 37743 - protein, 319 aa, Arabidopsis thaliana; identical to SEQ ID NO: 29122
  peptide (1)..(319): Ceres Seq. ID no. 12602558

SEQ ID NO: 37744 - DNA, 1699 bp, Arabidopsis thaliana
  misc_feature (1)..(1699): Ceres Seq. ID no. 12369916
  misc_feature (1)..(1699): Ortholog of  Ceres SEQ ID NO 13596984 as cited in SEQ ID NO 63196
cccaaaagatgaaaaacgatactctactttttatgaatcctttaattgaacaaacggaaccaacacaacaacagattgtgaagaagaaagaaaaaacaacaatggcttcacaaaccaaactcaagaaacctaattctcattttagcctttgtactttcctcttcttcaccgtcctctttaccatcccggctctctttctcctccgcacctcctcttgctcctcctccaccgctgcagtctcctcctcctctgacacagaccagccaccgtggtctggcgacctccaaaccgcccaatttgcctggaaccgccttgatttctccttaaccaaccctcctcccaaaacactaaaactcgctgttttctcccggaaatggcccacgggtcccaatcctggcggcatggaacgccacgccttcactctatacactgccttagctcgccgtggacatcgtgtccacgttttcacctctcccttagaccaatcccctgaaaccaacaaaattccccctgtttccgaccaaatcatttaccctataatccattctcacggagacgcggagcccggaaaatggcggtacaacaaagcgtgggagctttaccaagaagaaaacaagaaagaacctttcgatgcggttcactctgaaagtgttgctttacctcactggatcgcccgggaggttccaaacctcgctgtatcctggcacggcattgcgttagagagcttacaatcaagcatttaccaagacctgatccgtaaaccagacgaaccaagatcacaaggcttcaatgcaagtctatacggtgccgtgcttcccaagatactagacgaaatcagattcttccacaactacgctcaccacatcgctatcagcgatagctgtggagaaatgctaagagacgtttaccaaatcccggaaaaaagggttcacgtgatcctcaacggagtcgacgaaaacggattcacatcagacaagaagctacgtactctgtttaggtcaaaattagggttaccagaaaactcatcaacgattgttttaggagctgctgggagattagtcaaagacaaaggacatccattgctattcgaagctttcgcgaaactaatccaaacgtattcaaatgtctacctcgtagtagctggatcagggccatgggagcaacgatacaaagaattaggcgaaaaagtttccattttgggatctctaaacccaaacgaactcaagggtttctacaacgggatcgatttgttcgtgaatccaacgcttagaccacaaggtcttgatttaacgttaatggaagcgatgttgagtggtaaaccagtgatggcgtcgaggtacgcaagcataaagagaagtatagtggtgaatgatgagtttgggtttatgtttgcgccaaatgtggaagctctgacggcggtaatggaggttgctgtggcggaaggagcggagagattggcggagagagggaggaagtgtaaagagtatgcggcggagatgtttacggcgagtaagatggctttggcttatgagaggctttttctttgtattaacgatcagaaattttgtatttatccttaattagtaatttactcaacatcttaatttttttttcattattggaaaagtgagtcgtattatactcatggcaaagataatcaaatacatatgcgacccttacatatctaaagttatctttt

SEQ ID NO: 37745 - protein, 525 aa, Arabidopsis thaliana
  peptide (1)..(525): Ceres Seq. ID no. 12369917
QKMKNDTLLFMNPLIEQTEPTQQQIVKKKEKTTMASQTKLKKPNSHFSLCTFLFFTVLFTIPALFLLRTSSCSSSTAAVSSSSDTDQPPWSGDLQTAQFAWNRLDFSLTNPPPKTLKLAVFSRKWPTGPNPGGMERHAFTLYTALARRGHRVHVFTSPLDQSPETNKIPPVSDQIIYPIIHSHGDAEPGKWRYNKAWELYQEENKKEPFDAVHSESVALPHWIAREVPNLAVSWHGIALESLQSSIYQDLIRKPDEPRSQGFNASLYGAVLPKILDEIRFFHNYAHHIAISDSCGEMLRDVYQIPEKRVHVILNGVDENGFTSDKKLRTLFRSKLGLPENSSTIVLGAAGRLVKDKGHPLLFEAFAKLIQTYSNVYLVVAGSGPWEQRYKELGEKVSILGSLNPNELKGFYNGIDLFVNPTLRPQGLDLTLMEAMLSGKPVMASRYASIKRSIVVNDEFGFMFAPNVEALTAVMEVAVAEGAERLAERGRKCKEYAAEMFTASKMALAYERLFLCINDQKFCIYP

SEQ ID NO: 37746 - protein, 523 aa, Arabidopsis thaliana
  peptide (1)..(523): Ceres Seq. ID no. 12369918
MKNDTLLFMNPLIEQTEPTQQQIVKKKEKTTMASQTKLKKPNSHFSLCTFLFFTVLFTIPALFLLRTSSCSSSTAAVSSSSDTDQPPWSGDLQTAQFAWNRLDFSLTNPPPKTLKLAVFSRKWPTGPNPGGMERHAFTLYTALARRGHRVHVFTSPLDQSPETNKIPPVSDQIIYPIIHSHGDAEPGKWRYNKAWELYQEENKKEPFDAVHSESVALPHWIAREVPNLAVSWHGIALESLQSSIYQDLIRKPDEPRSQGFNASLYGAVLPKILDEIRFFHNYAHHIAISDSCGEMLRDVYQIPEKRVHVILNGVDENGFTSDKKLRTLFRSKLGLPENSSTIVLGAAGRLVKDKGHPLLFEAFAKLIQTYSNVYLVVAGSGPWEQRYKELGEKVSILGSLNPNELKGFYNGIDLFVNPTLRPQGLDLTLMEAMLSGKPVMASRYASIKRSIVVNDEFGFMFAPNVEALTAVMEVAVAEGAERLAERGRKCKEYAAEMFTASKMALAYERLFLCINDQKFCIYP

SEQ ID NO: 37747 - protein, 515 aa, Arabidopsis thaliana
  peptide (1)..(515): Ceres Seq. ID no. 12369919
MNPLIEQTEPTQQQIVKKKEKTTMASQTKLKKPNSHFSLCTFLFFTVLFTIPALFLLRTSSCSSSTAAVSSSSDTDQPPWSGDLQTAQFAWNRLDFSLTNPPPKTLKLAVFSRKWPTGPNPGGMERHAFTLYTALARRGHRVHVFTSPLDQSPETNKIPPVSDQIIYPIIHSHGDAEPGKWRYNKAWELYQEENKKEPFDAVHSESVALPHWIAREVPNLAVSWHGIALESLQSSIYQDLIRKPDEPRSQGFNASLYGAVLPKILDEIRFFHNYAHHIAISDSCGEMLRDVYQIPEKRVHVILNGVDENGFTSDKKLRTLFRSKLGLPENSSTIVLGAAGRLVKDKGHPLLFEAFAKLIQTYSNVYLVVAGSGPWEQRYKELGEKVSILGSLNPNELKGFYNGIDLFVNPTLRPQGLDLTLMEAMLSGKPVMASRYASIKRSIVVNDEFGFMFAPNVEALTAVMEVAVAEGAERLAERGRKCKEYAAEMFTASKMALAYERLFLCINDQKFCIYP

SEQ ID NO: 37748 - DNA, 1272 bp, Arabidopsis thaliana
  misc_feature (1)..(1272): Ceres Seq. ID no. 12384472
  misc_feature (1)..(1272): Ortholog of  Ceres SEQ ID NO 14302396 as cited in SEQ ID NO 66907
  misc_feature (1)..(1272): Ortholog of  Ceres SEQ ID NO 13496281 as cited in SEQ ID NO 69175
agtgaacagtaaaactcccaaatttgcaaatgactcatcttcttcacctggagagaatctagggttccagatttactcttcgtcttcctctcttcgcttcttccccactgggattttccttttcttctccttttttctctacccatcgatctacacatcctgatcttcttagaagccccaatccttatacattccgggaacaaaaaacctagctttttttttattccggcttaaccagttttcgaaaaaccctagcttccatggcgaaaactcgacctggtgtcgcctccaaaattaagacgggaaggaaggagctggactcttataccatcaagggcaccaacaaagttgtgagagcgggagactgtgtgttgatgcgcccatcagatgctggtaaaccaccatatgtggcccgtgttgagaagattgaagctgatgcgaggaacaatgtgaaggtgcactgtcgatggtattaccgccctgaggagtcacttggtggtaggagacaatttcatggagccaaagagcttttcttgtctgaccattttgatgttcaaagtgcacacaccattgagggaaaatgcattgttcacaccttcaaaaactacacgaggcttgaaaacgttggggcagaggattattattgtagattcgagtacaaggctgctactggcgcatttacccctgatcgagttgctgtgtactgcaaatgtgaaatgccttacaatccagacgatctcatggtgcagtgtgaaggctgcaaagactggtatcatcctgcgtgtgttggcatgacgattgaagaagcaaagaagcttgatcactttgtatgtgctgaatgcagttctgatgacgatgtcaaaaaatcgcagaatgggtttacttcatctccagctgatgatgttaaggtggaaacgaagcgcagaaaaaggtaatcgcgagttcttggggataaaagccacaagagatgataagttatataacttgggaagctctttggtgcagattttagtaagttagggtttatctttgtcggtctttgtcgtctatggttgtgatgtctgtatggtgcgttccaaaacttagagaaatgtgaaaaagaggagagatcagagagatgatgaagaaaactatgttggcagaatcagttgtatagacttccgtggggtttaagttaactttaggtttgtttattgttatggtctgttgttattttgtggctgatgagaacagatgaacatgaacaacgcttttgacttgggtcatctcagc

SEQ ID NO: 37749 - protein, 224 aa, Arabidopsis thaliana
  peptide (1)..(224): Ceres Seq. ID no. 12384473
MAKTRPGVASKIKTGRKELDSYTIKGTNKVVRAGDCVLMRPSDAGKPPYVARVEKIEADARNNVKVHCRWYYRPEESLGGRRQFHGAKELFLSDHFDVQSAHTIEGKCIVHTFKNYTRLENVGAEDYYCRFEYKAATGAFTPDRVAVYCKCEMPYNPDDLMVQCEGCKDWYHPACVGMTIEEAKKLDHFVCAECSSDDDVKKSQNGFTSSPADDVKVETKRRKR

SEQ ID NO: 37750 - protein, 186 aa, Arabidopsis thaliana; identical to SEQ ID NO: 23851
  peptide (1)..(186): Ceres Seq. ID no. 12384474

SEQ ID NO: 37751 - DNA, 1391 bp, Arabidopsis thaliana
  misc_feature (1)..(1391): Ceres Seq. ID no. 13580630
  misc_feature (1)..(1391): Ortholog of  Ceres SEQ ID NO 14303493 as cited in SEQ ID NO 54484
  misc_feature (1)..(1391): Ortholog of  Ceres SEQ ID NO 14312258 as cited in SEQ ID NO 57251
atggaagaattagaaaaaacccagaaatttcagaagaagaagaagcaacaacaagagaaacaagaccagtcttcaccaatcaacttcgagatgtcttcaagatcatcacttcattcattaccacaaacaacgattgaatcacctcctgattcaccaaccctctcttcaatccccgatagccatggatcttctcctcacacgattattccaactccttctgtggccaagacggagactccttttagggttactaacggagaggaggagaagaaagtcagcgagagtaggagacaattgagaccgagcttttcttcttcttcttctactccgcgtgaatcgaaatgggcaagtttgattaggaaagctctacttggatttagggttattgcgtttgtttcgtgtcttgtttcgttctctgtaatggtttctgatagagataaaggatgggctcatgattctttctacaactacaaagaattcaggttctgtttggctgcgaatgtgattggttttgtctactctggttttatgatatgtgatcttgtatacctgttatctactagcatccgaagatcacgacataacctgcgacatttcttggaatttggtcttgatcaaatgctagcttatcttcttgcatcagcttcaacttcagcttcgatccgcgtagatgattggcaatcaaactggggagcagacaagttcccagacttagctagagcatctgtcgcactgtcttacgtctcctttgtcgcattcgccttctgctcattggcttccggttatgctctatgtgcactccggtccatctaaactaaacaagcgcaagctcgagacaaaaagtctcattttgtctactctcagaagttgtatccttgaccctaaacgggtccagtttctgatttttagaagaaacttttattttatatagtggagaatattccatcttgttaaaagatggtgcgaatgctcgtttatacatcactttatctatttcactttttattatatagttctaagaaaagctatatgatgctatcttctccccaaaaaaaaaaaaaaaaaaatcaagaattcgcacgagaccattacctagaacatcctaatcaaaaaaattgggttattagtacgaattttataatgagtgtgccataatttacctaaaaaagaaaaaaaaagaaaaaaagagtgttgtatgtacgtgtgtttgacttggataattagtgacattttaagcaaatgtgtatttggaaaagtgatgtcaatgaaatatgaatatgggtcgaataaagaagcgaagatccgtagactgttgcttctctgcatctgttgttgtattcccgatcatattgttgtatgtttataatttattaaaagcaaattgtcttccc

SEQ ID NO: 37752 - protein, 270 aa, Arabidopsis thaliana
  peptide (1)..(270): Ceres Seq. ID no. 13580631
MEELEKTQKFQKKKKQQQEKQDQSSPINFEMSSRSSLHSLPQTTIESPPDSPTLSSIPDSHGSSPHTIIPTPSVAKTETPFRVTNGEEEKKVSESRRQLRPSFSSSSSTPRESKWASLIRKALLGFRVIAFVSCLVSFSVMVSDRDKGWAHDSFYNYKEFRFCLAANVIGFVYSGFMICDLVYLLSTSIRRSRHNLRHFLEFGLDQMLAYLLASASTSASIRVDDWQSNWGADKFPDLARASVALSYVSFVAFAFCSLASGYALCALRSI

SEQ ID NO: 37753 - protein, 240 aa, Arabidopsis thaliana
  peptide (1)..(240): Ceres Seq. ID no. 13580632
MSSRSSLHSLPQTTIESPPDSPTLSSIPDSHGSSPHTIIPTPSVAKTETPFRVTNGEEEKKVSESRRQLRPSFSSSSSTPRESKWASLIRKALLGFRVIAFVSCLVSFSVMVSDRDKGWAHDSFYNYKEFRFCLAANVIGFVYSGFMICDLVYLLSTSIRRSRHNLRHFLEFGLDQMLAYLLASASTSASIRVDDWQSNWGADKFPDLARASVALSYVSFVAFAFCSLASGYALCALRSI

SEQ ID NO: 37754 - DNA, 1667 bp, Arabidopsis thaliana
  misc_feature (1)..(1667): Ceres Seq. ID no. 13487703
  misc_feature (1)..(1667): Ortholog of  Ceres SEQ ID NO 14303850 as cited in SEQ ID NO 53464
  misc_feature (1)..(1667): Ortholog of  Ceres SEQ ID NO 15176262 as cited in SEQ ID NO 54751
  misc_feature (1)..(1667): Ortholog of  Ceres SEQ ID NO 13656177 as cited in SEQ ID NO 64997
aagcaaagtaaaacctaaaaaaaaaaaaagaccgtaagtagttacaagggtggaagtataaaggagcagtcttttcttcttctttcaaccccacggcgcagatcctacgagtttggtctttgtctctatcttttcaatctttctctctcaatcgctcttcaatttgataacagcaaagtcatggcaggaatggcatctgatggaactcaatatgatcctcgtcagtttgatactaagatgaatgccattctcggcgaggaaggagaggaaacattctacactaactatgacgaagtttgcgacagctttgatgcaatggaattgcaaccagatcttctcaggggtatttatgcttacggtttcgagaagccttctgctattcagcaaagaggaattattccattctgcaagggtcttgatgtgatccagcaagctcaatctggaactggaaagaccgctaccttttgctctggtgttttacagcagctcgatattagtttggttcaatgccaagctcttgttttggcacctacccgagaacttgcccagcaaattgaaaaggttatgagggcacttggtgactaccttggcgtcaaggctcaggcttgtgttggtggaacaagtgttcgtgaggatcaacgtgttcttcagtctggtgttcatgttgttgttggaacccctggtcgtgtctttgacttgttacgcagacaatccctccgtgctgatgcaatcaaaatgtttgttcttgatgaagctgatgaaatgctctctcgtggtttcaaggatcagatatacgacatcttccagcttcttccttccaaggttcaggttggtgttttctctgctacaatgcctcccgaagcccttgagatcacaaggaagttcatgaacaaaccagtcaggattctggtcaagcgagacgagctgactcttgaaggtatcaagcagttttatgtcaatgtagacaaggaagagtggaaactcgagacactatgcgatctctacgagacactggccatcactcaaagcgtcatctttgtgaacacaaggcgtaaggttgattggctaaccgacaaaatgagaagccgtgaccacactgtttcagctacacacggagacatggaccagaacacaagagacatcatcatgcgcgaattccgctctgggtcttcccgtgtcctcataaccactgacctccttgctcgtggtatcgatgttcagcaagtctctctggtcataaactttgacctcccaacccaaccggagaattaccttcatcgtattggaagaagtggaaggtttgggagaaagggagtagcaatcaatttcatgacatcggaggatgagagaatgatggctgatattcagaggttttacaatgtggtcgttgaggagttgccaagcaatgttgctgatcttctctgaagcctttcttttttctgttttttactgagaaagtgctgtgtttacccctttttttggcagcttctctatgctttgatttttgttttcaggctactacttagatttatagttcttggctaaaagcgaacataactcattacatgattttgcttttttggcaatcaagaatttcggcattatttatctttttgtgaacgtggcttacaaggaaggatactctatgagactaaagacttttctct

SEQ ID NO: 37755 - protein, 414 aa, Arabidopsis thaliana
  peptide (1)..(414): Ceres Seq. ID no. 13487704
MAGMASDGTQYDPRQFDTKMNAILGEEGEETFYTNYDEVCDSFDAMELQPDLLRGIYAYGFEKPSAIQQRGIIPFCKGLDVIQQAQSGTGKTATFCSGVLQQLDISLVQCQALVLAPTRELAQQIEKVMRALGDYLGVKAQACVGGTSVREDQRVLQSGVHVVVGTPGRVFDLLRRQSLRADAIKMFVLDEADEMLSRGFKDQIYDIFQLLPSKVQVGVFSATMPPEALEITRKFMNKPVRILVKRDELTLEGIKQFYVNVDKEEWKLETLCDLYETLAITQSVIFVNTRRKVDWLTDKMRSRDHTVSATHGDMDQNTRDIIMREFRSGSSRVLITTDLLARGIDVQQVSLVINFDLPTQPENYLHRIGRSGRFGRKGVAINFMTSEDERMMADIQRFYNVVVEELPSNVADLL

SEQ ID NO: 37756 - protein, 411 aa, Arabidopsis thaliana
  peptide (1)..(411): Ceres Seq. ID no. 13487705
MASDGTQYDPRQFDTKMNAILGEEGEETFYTNYDEVCDSFDAMELQPDLLRGIYAYGFEKPSAIQQRGIIPFCKGLDVIQQAQSGTGKTATFCSGVLQQLDISLVQCQALVLAPTRELAQQIEKVMRALGDYLGVKAQACVGGTSVREDQRVLQSGVHVVVGTPGRVFDLLRRQSLRADAIKMFVLDEADEMLSRGFKDQIYDIFQLLPSKVQVGVFSATMPPEALEITRKFMNKPVRILVKRDELTLEGIKQFYVNVDKEEWKLETLCDLYETLAITQSVIFVNTRRKVDWLTDKMRSRDHTVSATHGDMDQNTRDIIMREFRSGSSRVLITTDLLARGIDVQQVSLVINFDLPTQPENYLHRIGRSGRFGRKGVAINFMTSEDERMMADIQRFYNVVVEELPSNVADLL

SEQ ID NO: 37757 - protein, 395 aa, Arabidopsis thaliana
  peptide (1)..(395): Ceres Seq. ID no. 13487706
MNAILGEEGEETFYTNYDEVCDSFDAMELQPDLLRGIYAYGFEKPSAIQQRGIIPFCKGLDVIQQAQSGTGKTATFCSGVLQQLDISLVQCQALVLAPTRELAQQIEKVMRALGDYLGVKAQACVGGTSVREDQRVLQSGVHVVVGTPGRVFDLLRRQSLRADAIKMFVLDEADEMLSRGFKDQIYDIFQLLPSKVQVGVFSATMPPEALEITRKFMNKPVRILVKRDELTLEGIKQFYVNVDKEEWKLETLCDLYETLAITQSVIFVNTRRKVDWLTDKMRSRDHTVSATHGDMDQNTRDIIMREFRSGSSRVLITTDLLARGIDVQQVSLVINFDLPTQPENYLHRIGRSGRFGRKGVAINFMTSEDERMMADIQRFYNVVVEELPSNVADLL

SEQ ID NO: 37758 - DNA, 1167 bp, Arabidopsis thaliana
  misc_feature (1)..(1167): Ceres Seq. ID no. 12661399
  misc_feature (1)..(1167): Ortholog of  Ceres SEQ ID NO 14302919 as cited in SEQ ID NO 20338
  misc_feature (1)..(1167): Ortholog of  Ceres SEQ ID NO 13595497 as cited in SEQ ID NO 51127
  misc_feature (1)..(1167): Ortholog of  Ceres SEQ ID NO 14306765 as cited in SEQ ID NO 53275
  misc_feature (1)..(1167): Ortholog of  Ceres SEQ ID NO 14314046 as cited in SEQ ID NO 59316
tgcccccagctagtcacatactcatgattgcaaaatctctctctctctctgcctctctatatattaacctttcttcttcctttactttctcatcttctatctctcaaaagaaaagcagacaactttatttgcaaaaacagagtttttttttcttatcttgagaaagttcaacagaagatgatgttcgagaaagacgatctgggtctaagcttaggcttgaattttccaaagaaacagatcaatctcaaatcaaatccatctgtttctgttactccttcttcttcttcttttggattattcagaagatcttcatggaacgagagttttacttcttcagttccaaactcagattcgtcacaaaaagaaacaagaactttcatccgaggaatcgacgtgaacagaccaccgtctacagcggaatacggcgacgaagacgctggagtatcttcacctaacagtacagtctcaagctctacagggaaaagaagcgagagagaagaagacacagatccacaaggctcaagaggaatcagtgacgatgaagatggtgataactccaggaaaaagcttagactttccaaagatcaatctgctattcttgaagagaccttcaaagatcacagtactctcaatccgaagcagaagcaagcattggctaaacaattagggttacgagcaagacaagtggaagtttggtttcagaacagacgagcaagaacaaagctgaagcaaacggaggtagactgcgagttcttacggagatgctgcgagaatctaacggaagagaaccgtcggctacaaaaagaagtaacggaattgagagcacttaagctctctcctcagttctacatgcacatgagcccacccactactttgaccatgtgcccttcatgtgaacacgtgtcggtcccgccaccacaacctcaggctgctacgtcagcgcaccaccggtcgttgccggtcaatgcgtgggctcctgcgacgaggatatctcacggcttgacttttgacgctcttcgtcctaggtcctaagtctttttacttgcaaccaaagggcattttggtcgttttttaagtttcatggaccagatatgcatgtagttgttaacatgtatgtattttcttagaaagaaagaaaaacagattaatatttttctagcttaaacc

SEQ ID NO: 37759 - protein, 284 aa, Arabidopsis thaliana
  peptide (1)..(284): Ceres Seq. ID no. 12661400
MMFEKDDLGLSLGLNFPKKQINLKSNPSVSVTPSSSSFGLFRRSSWNESFTSSVPNSDSSQKETRTFIRGIDVNRPPSTAEYGDEDAGVSSPNSTVSSSTGKRSEREEDTDPQGSRGISDDEDGDNSRKKLRLSKDQSAILEETFKDHSTLNPKQKQALAKQLGLRARQVEVWFQNRRARTKLKQTEVDCEFLRRCCENLTEENRRLQKEVTELRALKLSPQFYMHMSPPTTLTMCPSCEHVSVPPPQPQAATSAHHRSLPVNAWAPATRISHGLTFDALRPRS

SEQ ID NO: 37760 - protein, 283 aa, Arabidopsis thaliana
  peptide (1)..(283): Ceres Seq. ID no. 12661401
MFEKDDLGLSLGLNFPKKQINLKSNPSVSVTPSSSSFGLFRRSSWNESFTSSVPNSDSSQKETRTFIRGIDVNRPPSTAEYGDEDAGVSSPNSTVSSSTGKRSEREEDTDPQGSRGISDDEDGDNSRKKLRLSKDQSAILEETFKDHSTLNPKQKQALAKQLGLRARQVEVWFQNRRARTKLKQTEVDCEFLRRCCENLTEENRRLQKEVTELRALKLSPQFYMHMSPPTTLTMCPSCEHVSVPPPQPQAATSAHHRSLPVNAWAPATRISHGLTFDALRPRS

SEQ ID NO: 37761 - DNA, 465 bp, Arabidopsis thaliana; identical to SEQ ID NO: 30079
  misc_feature (1)..(465): Ceres Seq. ID no. 12558719
  misc_feature (1)..(465): Ortholog of  Ceres SEQ ID NO 13656408 as cited in SEQ ID NO 65810

SEQ ID NO: 37762 - protein, 92 aa, Arabidopsis thaliana [sequence omitted]

SEQ ID NO: 37763 - protein, 65 aa, Arabidopsis thaliana; identical to SEQ ID NO: 30081
  peptide (1)..(65): Ceres Seq. ID no. 12558721

SEQ ID NO: 37764 - protein, 64 aa, Arabidopsis thaliana; identical to SEQ ID NO: 30082
  peptide (1)..(64): Ceres Seq. ID no. 12558722

SEQ ID NO: 37765 - DNA, 1205 bp, Arabidopsis thaliana
  misc_feature (1)..(1205): Ceres Seq. ID no. 12324679
  misc_feature (1)..(1205): Ortholog of  Ceres SEQ ID NO 13596519 as cited in SEQ ID NO 62572
  misc_feature (1)..(1205): Ortholog of  Ceres SEQ ID NO 12625108 as cited in SEQ ID NO 68102
acaacaacattgaaacccatttcttcgcctttaaccttacttgaatttttgtgtgggtcctttttttttctttctccaagccattgaataaaaaggcagagaaaatggagttttttggtaaaatgataatttcattgagtcttattatgatgataatgtggaagagcgtggatggttacagtagtggttgggtcaatgctcgagccacattctatggaggagctgatgcttctggcaccatgggcggcgcgtgtggttacggaaacttatacagtcaaggatacggcactaacacggcggctctaagcacggctctattcaacggcggccaaagctgtggtgcttgttttcagataaaatgcgtaaacgacccaaaatggtgtatcggtggaacaatcaccgtcaccggaacaaacttttgtccacccaactttgctcaagccaacaacgccggaggttggtgtaatcctcctcaacaccacttcgatttagctcagcccatcttcctccgtattgctcaatacaaagccggcgtcgtccctgtccaataccggagagtggcttgccggagaaaaggaggaataagattcacgatcaacggtcattcatacttcaacctcgtacttataaccaacgtcgccggcgccggagatgttatctccgtctccattaaaggaaccaatacacgttggcaaagcatgtcaagaaactggggacaaaactggcaaagcaatgcaaaacttgatggtcaagctttgtcctttaaagtaacaactagtgatggccgtacagttatatctaacaatgctacaccacgtaactggagctttggacagacttataccggaaaacagttccgggctcagaggtgatgatgacgtggactgtctggagggaaaaaaaaaagttttacttattactgattttggagttttctagagtttgcatagtttgaaaaaagttttcaggaattaaccctaatcaaaataaccaatttctaaatggcggaaatcgaggttttttctcactggcagcttttgtaattcgccggtgagactgaggtgttttcacccgccgcctgagtgattgagttttttttttttttttttttgtactttgtttggcttttaagatgttcaatggtctgtttctttaagacattgtctactgaaataataataaaatcaagttaatttataattttt

SEQ ID NO: 37766 - protein, 255 aa, Arabidopsis thaliana
  peptide (1)..(255): Ceres Seq. ID no. 12324680
MEFFGKMIISLSLIMMIMWKSVDGYSSGWVNARATFYGGADASGTMGGACGYGNLYSQGYGTNTAALSTALFNGGQSCGACFQIKCVNDPKWCIGGTITVTGTNFCPPNFAQANNAGGWCNPPQHHFDLAQPIFLRIAQYKAGVVPVQYRRVACRRKGGIRFTINGHSYFNLVLITNVAGAGDVISVSIKGTNTRWQSMSRNWGQNWQSNAKLDGQALSFKVTTSDGRTVISNNATPRNWSFGQTYTGKQFRAQR

SEQ ID NO: 37767 - protein, 249 aa, Arabidopsis thaliana
  peptide (1)..(249): Ceres Seq. ID no. 12324681
MIISLSLIMMIMWKSVDGYSSGWVNARATFYGGADASGTMGGACGYGNLYSQGYGTNTAALSTALFNGGQSCGACFQIKCVNDPKWCIGGTITVTGTNFCPPNFAQANNAGGWCNPPQHHFDLAQPIFLRIAQYKAGVVPVQYRRVACRRKGGIRFTINGHSYFNLVLITNVAGAGDVISVSIKGTNTRWQSMSRNWGQNWQSNAKLDGQALSFKVTTSDGRTVISNNATPRNWSFGQTYTGKQFRAQR

SEQ ID NO: 37768 - protein, 241 aa, Arabidopsis thaliana
  peptide (1)..(241): Ceres Seq. ID no. 12324682
MMIMWKSVDGYSSGWVNARATFYGGADASGTMGGACGYGNLYSQGYGTNTAALSTALFNGGQSCGACFQIKCVNDPKWCIGGTITVTGTNFCPPNFAQANNAGGWCNPPQHHFDLAQPIFLRIAQYKAGVVPVQYRRVACRRKGGIRFTINGHSYFNLVLITNVAGAGDVISVSIKGTNTRWQSMSRNWGQNWQSNAKLDGQALSFKVTTSDGRTVISNNATPRNWSFGQTYTGKQFRAQR

SEQ ID NO: 37769 - DNA, 1032 bp, Arabidopsis thaliana; identical to SEQ ID NO: 24829
  misc_feature (1)..(1032): Ceres Seq. ID no. 12385678
  misc_feature (1)..(1032): Ortholog of  Ceres SEQ ID NO 15178299 as cited in SEQ ID NO 0
  misc_feature (1)..(1032): Ortholog of  Ceres SEQ ID NO 15226331 as cited in SEQ ID NO 0

SEQ ID NO: 37770 - protein, 217 aa, Arabidopsis thaliana; identical to SEQ ID NO: 22246
  peptide (1)..(217): Ceres Seq. ID no. 12385679

SEQ ID NO: 37771 - protein, 133 aa, Arabidopsis thaliana; identical to SEQ ID NO: 22247
  peptide (1)..(133): Ceres Seq. ID no. 12385680

SEQ ID NO: 37772 - DNA, 1714 bp, Arabidopsis thaliana
  misc_feature (1)..(1714): Ceres Seq. ID no. 12369888
  misc_feature (1)..(1714): Ortholog of  Ceres SEQ ID NO 13599900 as cited in SEQ ID NO 531
  misc_feature (1)..(1714): Ortholog of  Ceres SEQ ID NO 14310498 as cited in SEQ ID NO 55066
  misc_feature (1)..(1714): Ortholog of  Ceres SEQ ID NO 13659971 as cited in SEQ ID NO 67565
  misc_feature (1)..(1714): Ortholog of  Ceres SEQ ID NO 13500385 as cited in SEQ ID NO 67583
aaagtcctttgcttcatttcttataaaactaaaccaccttcttcatcatcattcatcaccaatctatctcatattcaatatactgaatatggactcattctacttctgtatatacacatgggatccaaacttaaactttaccctctcttaaatcactcatccgtttttcacccagacagtcgttaccaatcggcccctacaatggaggaagagcaacaacaacttcgtgttctcttcgcgaaatacgagatgggaaggttactaggcaaaggaacattcggaaaagtttattacggcaaagagataacaaccggagaaagcgttgcaatcaaaatcatcaacaaagatcaagtcaaacgtgaaggtatgatggaacaaatcaaacgagagatctcaatcatgagacttgttcgtcatccaaacatcgttgagttaaaagaagtcatggctacaaaaacaaagatcttctttatcatggaatacgttaaaggcggtgaacttttctccaagatcgttaatggaaagcttaaagaagactctgctcgtaagtatttccaacaattaatctcagccgttgatttttgtcatagtagaggcgtttctcaccgagatctaaaaccggagaatctcttagttgacgagaacggagatcttaaggtttcagattttggtctctctgctttaccggaacagattttacaagacggtttgcttcatactcagtgtggaactccggcgtatgttgcaccggaggttttgaggaagaaaggttacgacggagctaaagctgatatttggtcgtgtggtttatcttgtacgtgcttctcgctggattcttaccgtttcaagatgagaacctaatgaaaatgtatcggaagatcttcaaatcggagtttgagtatccgccgtggttttcaccggagtccaagaggttgatttcaaagcttttagttgttgatcctaacaaacggatctcgataccggcgattatgcgaacaccgtggtttcgtaaaaacatcaactctccgatcgagttcaagatcgatgagctcgagatccaaaacgtagaagacgaaacaccaacaacaacagcaacaacagcaacaacagcaacaacaacaacaacaccggtctcgccgaagttctttaacgcgtttgaattcatctcttctatgtcatcaggatttgatctatcaagtttgttcgagagtaagaggaagctgagatctatgtttacgtcacggtggtcggcgtcggagataatggggaagcttgaagggatagggaaagagatgaatatgaaggtgaagaggactaaagactttaaggtgaagttgtttgggaaaacggaagggaggaaaggacagattgcggtgacggctgaggttttcgaggttgcgccggaggttgccgtcgttgagttgtgtaagtcggcgggagatactttggagtataataggttgtatgaagaacatgtccggccagcgttggaggagatagtgtggtcgtggcacggtgataatcataataataatattgttaagagtaatggtaattatgttagtgatgaaaattctggtagtgactgctaagagaatgtaatgatagttatgtaaattaaactgtgtatttttgttaatcagttggtagattcaaggaagtttttgtaaattgtgtatatagaagttgaggtttattattattctctttgagc

SEQ ID NO: 37773 - protein, 286 aa, Arabidopsis thaliana
  peptide (1)..(286): Ceres Seq. ID no. 12369889
KVLCFISYKTKPPSSSSFITNLSHIQYTEYGLILLLYIHMGSKLKLYPLLNHSSVFHPDSRYQSAPTMEEEQQQLRVLFAKYEMGRLLGKGTFGKVYYGKEITTGESVAIKIINKDQVKREGMMEQIKREISIMRLVRHPNIVELKEVMATKTKIFFIMEYVKGGELFSKIVNGKLKEDSARKYFQQLISAVDFCHSRGVSHRDLKPENLLVDENGDLKVSDFGLSALPEQILQDGLLHTQCGTPAYVAPEVLRKKGYDGAKADIWSCGLSCTCFSLDSYRFKMRT

SEQ ID NO: 37774 - protein, 247 aa, Arabidopsis thaliana
  peptide (1)..(247): Ceres Seq. ID no. 12369890
MGSKLKLYPLLNHSSVFHPDSRYQSAPTMEEEQQQLRVLFAKYEMGRLLGKGTFGKVYYGKEITTGESVAIKIINKDQVKREGMMEQIKREISIMRLVRHPNIVELKEVMATKTKIFFIMEYVKGGELFSKIVNGKLKEDSARKYFQQLISAVDFCHSRGVSHRDLKPENLLVDENGDLKVSDFGLSALPEQILQDGLLHTQCGTPAYVAPEVLRKKGYDGAKADIWSCGLSCTCFSLDSYRFKMRT

SEQ ID NO: 37775 - protein, 243 aa, Arabidopsis thaliana
  peptide (1)..(243): Ceres Seq. ID no. 12369891
MKMYRKIFKSEFEYPPWFSPESKRLISKLLVVDPNKRISIPAIMRTPWFRKNINSPIEFKIDELEIQNVEDETPTTTATTATTATTTTTPVSPKFFNAFEFISSMSSGFDLSSLFESKRKLRSMFTSRWSASEIMGKLEGIGKEMNMKVKRTKDFKVKLFGKTEGRKGQIAVTAEVFEVAPEVAVVELCKSAGDTLEYNRLYEEHVRPALEEIVWSWHGDNHNNNIVKSNGNYVSDENSGSDC

SEQ ID NO: 37776 - DNA, 1060 bp, Arabidopsis thaliana
  misc_feature (1)..(1060): Ceres Seq. ID no. 12389046
  misc_feature (1)..(1060): Ortholog of  Ceres SEQ ID NO 14309653 as cited in SEQ ID NO 0
gcataaagagaaactaacattttcaattcaatgacaaagccacatagctaataaatcgaaacctcaaaaaacaaacaagagcttatgacattgtcagattgtctctcactgttgtttagcttcgaccttcttcttctgccagagcctgtccacgccactgtctgcgtctccctgagcacggacaaatccgcagagagcaaaagtggtgaattggccagtgtagagaccattagcatcaagatgaccaatgttaagctgaactgaagcatgatcctttgatgtgatcattctgtttgttgccgagcatttccttggaatgtagagctctgtgacctgacctgcgtcgttctccatttttgagatttagcttcaaaaaaaaatcgatctgcgaggaagaagaagaatctgagagaggtttggcggcgacaaagatagcagattctcagctttcgataacaataatggatcttgttcaacaagctactaactacaagcagcttaagaagggagctaatgaagctaccaaaacattgaaccgtggaatctctgagttcgttgttatggctgctgatgctgaaccacttgagattcttcttcatcttcctttgcttgccgaagataagaatgtgccatatgtgtttgtaccttcgaaacaagcattgggaagagcatgtggagtaacaagacctgttattgcttgttcagtgacatcgaatgaggcaagccagttgaaatcgcagattcagcatctcaaggatgcgattgagaagctcctgatctaaggatttctgctcagtatgaagagtctctgcaatgtggaatggctctgactgaagttagtttgtgtgatttacctatttgaagaatgtattgtgactggtgttaatgcttagtatgtggatcatcatcgctcatttgtgcaattgagtttcttagatttttattttggtgcttgccaagcactgcttggtttgtgttgagacataacaggtaaagagccgtcatggttctttaactgtctgtttattacactaacgatctatccttaagtcccattacg

SEQ ID NO: 37777 - protein, 106 aa, Arabidopsis thaliana; identical to SEQ ID NO: 26406
  peptide (1)..(106): Ceres Seq. ID no. 12389047

SEQ ID NO: 37778 - protein, 73 aa, Arabidopsis thaliana; identical to SEQ ID NO: 21543
  peptide (1)..(73): Ceres Seq. ID no. 12389048

SEQ ID NO: 37779 - protein, 59 aa, Arabidopsis thaliana
  peptide (1)..(59): Ceres Seq. ID no. 12389049
MTLSDCLSLLFSFDLLLLPEPVHATVCVSLSTDKSAESKSGELASVETISIKMTNVKLN

SEQ ID NO: 37780 - DNA, 1028 bp, Arabidopsis thaliana
  misc_feature (1)..(1028): Ceres Seq. ID no. 12331321
  misc_feature (1)..(1028): Ortholog of  Ceres SEQ ID NO 12484482 as cited in SEQ ID NO 53324
atgacaaaatgtttgttttttgggtttggtctgaaacaggatggggtaccaacgagaagctgatcatatcaatactagctcacaggaacgcagcacaacgcagcttgatccgcagcgtttatgcagctacctacaatgaggatcttctcaaagcattagacaaagagctttctagcgactttgagagagctgtgatgttgtggactcttgatccaccagagagagatgcttatttggctaaagaatccaccaagatgttcaccaagaacaattgggttcttgttgaaatcgcttgcacaaggcctgctcttgagcttatcaaggtcaagcaagcttaccaagctcgatacaagaaatcaatcgaggaagatgtcgcgcaacacacatctggtgaccttcgtaagctcttggcttcctcttgtgagcactttcaggtatgaaggagatgatgtgaacatgatgcttgcaagatctgaagctaagatacttcacgagaaggtctcagagaaatcctacagtgacgatgacttcatcagaatcttgacaacaagaagcaaagcacactcggtgcaacactcaaccactacaacaacgagtatggaaacgccattaacaagaacttgaaggaagagtcggacgacaatgactacatgaaactactaagagctgtaatcacatgtttgacataccctgagaagcattttgagaaggttcttcgtctatcaatcaacaaaatgggaacagacgaatggggactaacccgagtcgtgactacacgaactgaagttgacatggaacgcatcaaagaggaatatcagcgaagaaacagcattcctttggaccgtgctatcgccaaagacacttctggtgactatgaggacatgcttgttgctcttctcggacatggcgatgcttgaaactgtttcaactttcgagttcctcctttctcttactgcatggtttgttttaaataaaagagttgtgaaactggttctgcaactatttatcaatgatcgtttgagtttgtc

SEQ ID NO: 37781 - protein, 145 aa, Arabidopsis thaliana
  peptide (1)..(145): Ceres Seq. ID no. 12331322
DKMFVFWVWSETGWGTNEKLIISILAHRNAAQRSLIRSVYAATYNEDLLKALDKELSSDFERAVMLWTLDPPERDAYLAKESTKMFTKNNWVLVEIACTRPALELIKVKQAYQARYKKSIEEDVAQHTSGDLRKLLASSCEHFQV

SEQ ID NO: 37782 - protein, 143 aa, Arabidopsis thaliana
  peptide (1)..(143): Ceres Seq. ID no. 12331323
MFVFWVWSETGWGTNEKLIISILAHRNAAQRSLIRSVYAATYNEDLLKALDKELSSDFERAVMLWTLDPPERDAYLAKESTKMFTKNNWVLVEIACTRPALELIKVKQAYQARYKKSIEEDVAQHTSGDLRKLLASSCEHFQV

SEQ ID NO: 37783 - protein, 132 aa, Arabidopsis thaliana
  peptide (1)..(132): Ceres Seq. ID no. 12331324
MLIWLKNPPRCSPRTIGFLLKSLAQGLLLSLSRSSKLTKLDTRNQSRKMSRNTHLVTFVSSWLPLVSTFRYEGDDVNMMLARSEAKILHEKVSEKSYSDDDFIRILTTRSKAHSVQHSTTTTTSMETPLTRT

SEQ ID NO: 37784 - DNA, 1249 bp, Arabidopsis thaliana
  misc_feature (1)..(1249): Ceres Seq. ID no. 12369904
  misc_feature (1)..(1249): Ortholog of  Ceres SEQ ID NO 15169005 as cited in SEQ ID NO 55180
attctaaagatttttctctccggagacgttaagagaagaaacagccaacggattagggatcttaccgttctgcgattcgccgagtttgaagctttttttagagacttcaatggtgagccaaggaatggtatctcttacaaagtctctatgcactatgactccaagagtccgtctcaagaatccgaatatgttgcagaaactaaagactggatcttgtaatttccgtttcagaaatctccgtgtcttatgcacaacaaagctgtctcagtgggaaccgtcacctttcattcatgcttctgcagaagaagctgctgatatagtattggacaaaaccgcgaatgtgttcgaatctattgtctccgagagtgcagaggaagagaaagtagatatgtcagcgcaacaacgaactaattctcaagttcaggtacttaaatggccaatatggcttttgggtccatctgttctcctcacaagcggtatggcgcctactttatggcttccgttgtcatcggtttttctcggttccaacgtggttagtctactttctttgatcggtctagattgcattttcaatcttggagcaacccttttcctcttaatggctgattcttgcgcacgtcctaaagacccatcacagtcctgcaacagcaaaccaccatttagctataagttctggaacatgttttcactcataatcgggtttctagtcccaatgttacttctcttcggatcccaatctggccttctcgcttctctccagccccagattcctttcctctcgtccgctgttatcctcttcccgtacttcattctccttgctgttcagacattaacagagatcctcacatggcactggcaatcaccggtctggctagtcacaccagttgtctacgaggcttacagaatcttgcaactgatgagagggttgacacttagtgcagaggtcaacgcaccggtttgggtggttcatatgcttcgtgggcttgtctcttggtgggtattgatcttgggaatgcaactcatgagagttgcttggtttgctggttttgcatctagaacaacaacaggtcagcaaccacaatctgttgcttctaagtaaagacagataaatgtttcttcgtttagtttttaaagtcatgtcaaagatttgtaactctttcttcactgtatagcttttattattcgtgggttggtgataaggattaaaaaaaaacacatattctttatgatcatattcgctcttttagtg

SEQ ID NO: 37785 - protein, 329 aa, Arabidopsis thaliana
  peptide (1)..(329): Ceres Seq. ID no. 12369905
MVSQGMVSLTKSLCTMTPRVRLKNPNMLQKLKTGSCNFRFRNLRVLCTTKLSQWEPSPFIHASAEEAADIVLDKTANVFESIVSESAEEEKVDMSAQQRTNSQVQVLKWPIWLLGPSVLLTSGMAPTLWLPLSSVFLGSNVVSLLSLIGLDCIFNLGATLFLLMADSCARPKDPSQSCNSKPPFSYKFWNMFSLIIGFLVPMLLLFGSQSGLLASLQPQIPFLSSAVILFPYFILLAVQTLTEILTWHWQSPVWLVTPVVYEAYRILQLMRGLTLSAEVNAPVWVVHMLRGLVSWWVLILGMQLMRVAWFAGFASRTTTGQQPQSVASK

SEQ ID NO: 37786 - protein, 324 aa, Arabidopsis thaliana
  peptide (1)..(324): Ceres Seq. ID no. 12369906
MVSLTKSLCTMTPRVRLKNPNMLQKLKTGSCNFRFRNLRVLCTTKLSQWEPSPFIHASAEEAADIVLDKTANVFESIVSESAEEEKVDMSAQQRTNSQVQVLKWPIWLLGPSVLLTSGMAPTLWLPLSSVFLGSNVVSLLSLIGLDCIFNLGATLFLLMADSCARPKDPSQSCNSKPPFSYKFWNMFSLIIGFLVPMLLLFGSQSGLLASLQPQIPFLSSAVILFPYFILLAVQTLTEILTWHWQSPVWLVTPVVYEAYRILQLMRGLTLSAEVNAPVWVVHMLRGLVSWWVLILGMQLMRVAWFAGFASRTTTGQQPQSVASK

SEQ ID NO: 37787 - protein, 314 aa, Arabidopsis thaliana
  peptide (1)..(314): Ceres Seq. ID no. 12369907
MTPRVRLKNPNMLQKLKTGSCNFRFRNLRVLCTTKLSQWEPSPFIHASAEEAADIVLDKTANVFESIVSESAEEEKVDMSAQQRTNSQVQVLKWPIWLLGPSVLLTSGMAPTLWLPLSSVFLGSNVVSLLSLIGLDCIFNLGATLFLLMADSCARPKDPSQSCNSKPPFSYKFWNMFSLIIGFLVPMLLLFGSQSGLLASLQPQIPFLSSAVILFPYFILLAVQTLTEILTWHWQSPVWLVTPVVYEAYRILQLMRGLTLSAEVNAPVWVVHMLRGLVSWWVLILGMQLMRVAWFAGFASRTTTGQQPQSVASK

SEQ ID NO: 37788 - DNA, 1502 bp, Arabidopsis thaliana
  misc_feature (1)..(1502): Ceres Seq. ID no. 12576395
  misc_feature (1)..(1502): Ortholog of  Ceres SEQ ID NO 13654928 as cited in SEQ ID NO 62546
aaggtatctatttgcctagccagagttatatataggattgattgtctagtcttttcttatatgatttttgttctcatttactaatcaaagttctgcaaacttgtagttgttgtaggatttgttgctctggctctggtggtaggtctatgaaatcaacccatatcgtgaatggactgcaacatggtatcttcgtcccagtgggattgggagcatttgatcatgtccaatccgtcaaggactgaagatgacagcaaacagctacctactgagtgggaaattgaaaaaggtgaaggaattgaatctatagttccacatttctcaggccttgagagagtcagtagtggctctgccaccagcttctggcacactgctgtatcgaaaagctcacagtcgacctctatcaactcatcatctcccgaagccaaacgatgcaagcttgcatcagaaagttcccctggagattcttgcagcaacatagactttgtccaggtgaaggctcccacagctctcgaggtatccgttgcctcagctgaatcagatctttgtttaaaactaggaaagcggacatactctgaagaatactggggtagaaacaataatgaaatttcagcggtttctatgaagttgttaactccatctgttgtcgctgggaaatccaaattgtgtggtcagagcatgccagtcccgcgttgccaaattgatggctgtgaactggatctctcatctgctaagggttatcatcgtaagcacaaagtctgcgaaaagcattcaaagtgcccaaaagttagcgtgagtggcctggaacgtcggttctgccaacagtgtagcaggttccatgctgtctctgaatttgatgagaagaaacgaagctgccgaaaacgtctttctcatcataatgcgaggcgtcgtaagccacaaggagtattttcaatgaatcccgagagggtgtatgatcgaagacagcatacaaatatgttgtggaatggggtgtcccttaacgcgagatctgaagaaatgtatgaatggggtaataacacttatgatacaaagcctagacaaacggaaaaaagctttactctgagcttccagagaggtaatggctctgaggaccagctggttgctagtagcagccgtatgttctctacatctcaaacctcaggtgggttcccagcaggaaagtccaagtttcaacttcatggcgaagatgtgggagaatactcaggagtcctccatgaatctcaagatatccaccgtgctctctctcttctgtcaacctcttcggatcccctggcccaaccacatgtgcagccattttctctactctgttcatatgatgttgtaccaaaatagatgagtaagtaatgtgtaatttgtaaacctgttactcagttggtggatacttttccaaacctatgataaaaacctcgtcctagatcccgttaaatgccaaactttcggctactataactatgttatcgttatcattatcattgtttaacacc

SEQ ID NO: 37789 - protein, 393 aa, Arabidopsis thaliana; identical to SEQ ID NO: 24209
  peptide (1)..(393): Ceres Seq. ID no. 12576396

SEQ ID NO: 37790 - protein, 389 aa, Arabidopsis thaliana; identical to SEQ ID NO: 24210
  peptide (1)..(389): Ceres Seq. ID no. 12576397

SEQ ID NO: 37791 - protein, 376 aa, Arabidopsis thaliana; identical to SEQ ID NO: 24211
  peptide (1)..(376): Ceres Seq. ID no. 12576398

SEQ ID NO: 37792 - DNA, 787 bp, Arabidopsis thaliana
  misc_feature (1)..(787): Ceres Seq. ID no. 12327422
  misc_feature (1)..(787): Ortholog of  Ceres SEQ ID NO 13596131 as cited in SEQ ID NO 67838
acatttttcaaaaatctcttttgcccagagagagaagaagagacagatcggaaggagttgagtaagaatggcgaagctggtgctcttcaccgccgtaattatcgctattttctcccatggatcctccgtcgatgacaaatgcgccgcttgcaacgccgtcgctgaggaattagagttacagcttttaaaggaaaagccacgaaaccatcttgatatgagaaaccggctcaattctaaaggccagcgtgaaggaaaggtcattgattacagaataagcgacctgagggtggttgatttgttggacggtctgtgtgatagaatgcaggactatactctacaaaaggtggaacctaagaatagacaatgggtgaaagtaggaaattttgacaatctaacaaataaacaggaagcgaaagcgcatgcaaatgacatttcaacttattgtggaagattgctggaggaaactgaagatgagctaggtgaggtgataaagaatggctccctaaaagcaggagaagtccgaaaggttctgtgtcaaactttgagtaaccactgccgacaatcaagtgaaacagactcagaggatgaggaggacgacgatgcagatgaattataactcaatccagtgaaaagttcacgtcaaattaagatcccatcttagtagctatgttatagatacatccatccacaactcatatgtaacttaagacacctttcactttttaagttatgtcgaaactcgggtctagattcttatttatattgtggcaattgttcgttttccccc

SEQ ID NO: 37793 - protein, 182 aa, Arabidopsis thaliana
  peptide (1)..(182): Ceres Seq. ID no. 12327423
MAKLVLFTAVIIAIFSHGSSVDDKCAACNAVAEELELQLLKEKPRNHLDMRNRLNSKGQREGKVIDYRISDLRVVDLLDGLCDRMQDYTLQKVEPKNRQWVKVGNFDNLTNKQEAKAHANDISTYCGRLLEETEDELGEVIKNGSLKAGEVRKVLCQTLSNHCRQSSETDSEDEEDDDADEL

SEQ ID NO: 37794 - protein, 133 aa, Arabidopsis thaliana
  peptide (1)..(133): Ceres Seq. ID no. 12327424
MRNRLNSKGQREGKVIDYRISDLRVVDLLDGLCDRMQDYTLQKVEPKNRQWVKVGNFDNLTNKQEAKAHANDISTYCGRLLEETEDELGEVIKNGSLKAGEVRKVLCQTLSNHCRQSSETDSEDEEDDDADEL

SEQ ID NO: 37795 - protein, 98 aa, Arabidopsis thaliana
  peptide (1)..(98): Ceres Seq. ID no. 12327425
MQDYTLQKVEPKNRQWVKVGNFDNLTNKQEAKAHANDISTYCGRLLEETEDELGEVIKNGSLKAGEVRKVLCQTLSNHCRQSSETDSEDEEDDDADEL

SEQ ID NO: 37796 - DNA, 936 bp, Arabidopsis thaliana; identical to SEQ ID NO: 20986
  misc_feature (1)..(936): Ceres Seq. ID no. 13493724
  misc_feature (1)..(936): Ortholog of  Ceres SEQ ID NO 13595569 as cited in SEQ ID NO 56778
  misc_feature (1)..(936): Ortholog of  Ceres SEQ ID NO 12611159 as cited in SEQ ID NO 59821

SEQ ID NO: 37797 - protein, 236 aa, Arabidopsis thaliana; identical to SEQ ID NO: 20987
  peptide (1)..(236): Ceres Seq. ID no. 13493725

SEQ ID NO: 37798 - DNA, 1110 bp, Arabidopsis thaliana
  misc_feature (1)..(1110): Ceres Seq. ID no. 13487022
  misc_feature (1)..(1110): Ortholog of  Ceres SEQ ID NO 13639514 as cited in SEQ ID NO 55736
  misc_feature (1)..(1110): Ortholog of  Ceres SEQ ID NO 14312254 as cited in SEQ ID NO 59148
  misc_feature (1)..(1110): Ortholog of  Ceres SEQ ID NO 13662804 as cited in SEQ ID NO 65394
  misc_feature (1)..(1110): Ortholog of  Ceres SEQ ID NO 13656519 as cited in SEQ ID NO 69226
tacattgtcgacattggtaggataagtaggactctttctcattgcttttcgcttcgtcttcttctctctaaaactctttctctgcaagaaaaccaatctctctctctttcactttcttaaaccctttatctctctaaaaccctcctttttaggtaaaaaagttttggtgctgactcaaaaaaggttcggtcttttactgcattttgaaatggcgattgaagattacgagaacccaaatcgagaaatcaaacctaagaacagaagattcatggaaggagagaatcagtggcctatatggctcaaacctttactaaaccaacacttttttgctcaatgcaagtttcatggacacttacctagaaccgaatgcaaaatgtattgcttagactgtaccaatgactcgttttgttctctctgtctttctgaacacgagaatcatcgtaccattcagataaggatatcatcttatcataatgtgacaaaggtcgatgagatacagaaatacttagacatatcaagcattcagacatatgtgatcaatagctcaaaggttttgttcttgaatgagaggcctcagtctaagcctggtaaaggttttactaatgcctgcatggtctgttatcgtggccttgccgaaaactgcttccgcttctgctctattggctgcaaggttgcaggaacatctggagtcttccagaagagagtgaagcatacaacgaatgactcagataattcaaacaacagttctggagtggagaataacagttctggagcagagaatggtaattcaaatctgcagagtctcagtccgcctacacctcaatttcctcctcgttctctgcgaaagcgactaaggaagggaattcctcaccgagctccatttagttgagattgtgatcaagaaaaagaagaagaagcttgtgttacgtagtgctatggattagtcaaacaactagtaagtgtatatatatatatacaatatcttcttgtaaagttttggtgtgatgcaatgagactagacagtgagtggtttatggtgtttttatgactatttccttgttctaaattttgtttttgattagattatatgacaaaaatagataattagtc

SEQ ID NO: 37799 - protein, 226 aa, Arabidopsis thaliana
  peptide (1)..(226): Ceres Seq. ID no. 15218717
MAIEDYENPNREIKPKNRRFMEGENQWPIWLKPLLNQHFFAQCKFHGHLPRTECKMYCLDCTNDSFCSLCLSEHENHRTIQIRISSYHNVTKVDEIQKYLDISSIQTYVINSSKVLFLNERPQSKPGKGFTNACMVCYRGLAENCFRFCSIGCKVAGTSGVFQKRVKHTTNDSDNSNNSSGVENNSSGAENGNSNLQSLSPPTPQFPPRSLRKRLRKGIPHRAPFS

SEQ ID NO: 37800 - protein, 206 aa, Arabidopsis thaliana
  peptide (1)..(206): Ceres Seq. ID no. 15218718
MEGENQWPIWLKPLLNQHFFAQCKFHGHLPRTECKMYCLDCTNDSFCSLCLSEHENHRTIQIRISSYHNVTKVDEIQKYLDISSIQTYVINSSKVLFLNERPQSKPGKGFTNACMVCYRGLAENCFRFCSIGCKVAGTSGVFQKRVKHTTNDSDNSNNSSGVENNSSGAENGNSNLQSLSPPTPQFPPRSLRKRLRKGIPHRAPFS

SEQ ID NO: 37801 - protein, 171 aa, Arabidopsis thaliana
  peptide (1)..(171): Ceres Seq. ID no. 15218719
MYCLDCTNDSFCSLCLSEHENHRTIQIRISSYHNVTKVDEIQKYLDISSIQTYVINSSKVLFLNERPQSKPGKGFTNACMVCYRGLAENCFRFCSIGCKVAGTSGVFQKRVKHTTNDSDNSNNSSGVENNSSGAENGNSNLQSLSPPTPQFPPRSLRKRLRKGIPHRAPFS

SEQ ID NO: 37802 - DNA, 1433 bp, Arabidopsis thaliana
  misc_feature (1)..(1433): Ceres Seq. ID no. 12324669
  misc_feature (1)..(1433): Ortholog of  Ceres SEQ ID NO 13654989 as cited in SEQ ID NO 63117
  misc_feature (1)..(1433): Ortholog of  Ceres SEQ ID NO 13584744 as cited in SEQ ID NO 69137
atgtgttatgtcccttactacacaagaatctccttctcctcaaccttctgctttcactcccgccttatctcctgattatcaacagagagagaaggaattgcataaacaagagagtaacaacatgagactggttatttcactagcagctacattttccttagttggtataatcttactttgctctctgctttattggttttgccataggagaagaaacctcaagagctcaggttgtgggtgtagtggaatcacattcttgaatcggtttagtcgctcaaaaacattagacaagagaactacaaagcagggaacagtgtcattgatcgattacaatatactagaagaaggaactagtggtttcaaggagagtaacattttgggtcaaggtggatttggatgtgtatattctgccacattagagaacaacatttcagctgcggttaagaagctagactgtgccaatgaagatgcagcaaaggaatttaagagtgaggttgagatattgagtaagctccagcacccgaacataatatcccttttgggttatagcacgaatgataaggcgagattcattgtctatgagctgatgccaaacgtttctctggaatctcatttgcacggatcttctcggggttcggcgatcacatggcctatgaggatgaagattgctcttgatgtaacaaggggattagaatatttgcatgaacattgtcatccagcaatcattcacagggacttgaaatcatccaacatcttattagatagcaatttcaatgctaagatttcagattttggtctagctgttgttgatgggccaaagaacaagaaccataaactttccgggacagttggctacgttgcaccagagtatcttctcaacggccaattgacagaaaagagcgacgtgtatgcttttggagtagtgttattagagcttttactcgggaaaaaacctgtgtagaaactagctcccggtgaatgccaatccatcatcacttgggcaatgccttatctcactgatagaaccaagttaccaagcgtcatagatcctgcgattaaagatacgatggacttgaaacacctttaccaggtagcggcagtggcgattttgtgcgtgcagccagaaccgagttatagaccgttgattacagacgtcttgcattctcttatacctttggttccaatggaacttggtggaaccttaaaaaccatcaaatgtgcttcaatggatcactgttaaacaccatagaaaaccggtgtttttttttatagaaattcggtttaatattgaccggtaggtggttttgatgtgtatattgggttagaagttgtaaccggaacattacagtatccttttgaaatgcttacttgcgcactgttgatgaactcttttctcatgtgatttctatttacgaaaaaaaatgaaaattatt

SEQ ID NO: 37803 - protein, 319 aa, Arabidopsis thaliana
  peptide (1)..(319): Ceres Seq. ID no. 12324670
CVMSLTTQESPSPQPSAFTPALSPDYQQREKELHKQESNNMRLVISLAATFSLVGIILLCSLLYWFCHRRRNLKSSGCGCSGITFLNRFSRSKTLDKRTTKQGTVSLIDYNILEEGTSGFKESNILGQGGFGCVYSATLENNISAAVKKLDCANEDAAKEFKSEVEILSKLQHPNIISLLGYSTNDKARFIVYELMPNVSLESHLHGSSRGSAITWPMRMKIALDVTRGLEYLHEHCHPAIIHRDLKSSNILLDSNFNAKISDFGLAVVDGPKNKNHKLSGTVGYVAPEYLLNGQLTEKSDVYAFGVVLLELLLGKKPV

SEQ ID NO: 37804 - protein, 317 aa, Arabidopsis thaliana
  peptide (1)..(317): Ceres Seq. ID no. 12324671
MSLTTQESPSPQPSAFTPALSPDYQQREKELHKQESNNMRLVISLAATFSLVGIILLCSLLYWFCHRRRNLKSSGCGCSGITFLNRFSRSKTLDKRTTKQGTVSLIDYNILEEGTSGFKESNILGQGGFGCVYSATLENNISAAVKKLDCANEDAAKEFKSEVEILSKLQHPNIISLLGYSTNDKARFIVYELMPNVSLESHLHGSSRGSAITWPMRMKIALDVTRGLEYLHEHCHPAIIHRDLKSSNILLDSNFNAKISDFGLAVVDGPKNKNHKLSGTVGYVAPEYLLNGQLTEKSDVYAFGVVLLELLLGKKPV

SEQ ID NO: 37805 - protein, 279 aa, Arabidopsis thaliana
  peptide (1)..(279): Ceres Seq. ID no. 12324672
MRLVISLAATFSLVGIILLCSLLYWFCHRRRNLKSSGCGCSGITFLNRFSRSKTLDKRTTKQGTVSLIDYNILEEGTSGFKESNILGQGGFGCVYSATLENNISAAVKKLDCANEDAAKEFKSEVEILSKLQHPNIISLLGYSTNDKARFIVYELMPNVSLESHLHGSSRGSAITWPMRMKIALDVTRGLEYLHEHCHPAIIHRDLKSSNILLDSNFNAKISDFGLAVVDGPKNKNHKLSGTVGYVAPEYLLNGQLTEKSDVYAFGVVLLELLLGKKPV

SEQ ID NO: 37806 - DNA, 663 bp, Arabidopsis thaliana; identical to SEQ ID NO: 26994
  misc_feature (1)..(663): Ceres Seq. ID no. 12323564
  misc_feature (1)..(663): Ortholog of  Ceres SEQ ID NO 15173986 as cited in SEQ ID NO 1074
  misc_feature (1)..(663): Ortholog of  Ceres SEQ ID NO 13586102 as cited in SEQ ID NO 0

SEQ ID NO: 37807 - protein, 115 aa, Arabidopsis thaliana; identical to SEQ ID NO: 26995
  peptide (1)..(115): Ceres Seq. ID no. 12323565

SEQ ID NO: 37808 - protein, 70 aa, Arabidopsis thaliana; identical to SEQ ID NO: 26996
  peptide (1)..(70): Ceres Seq. ID no. 12323566

SEQ ID NO: 37809 - DNA, 1227 bp, Arabidopsis thaliana
  misc_feature (1)..(1227): Ceres Seq. ID no. 12340140
  misc_feature (1)..(1227): Ortholog of  Ceres SEQ ID NO 15170811 as cited in SEQ ID NO 52649
  misc_feature (1)..(1227): Ortholog of  Ceres SEQ ID NO 13638331 as cited in SEQ ID NO 58047
aagggttatattctcaaggaacccattggcgtagttggcatgattactccatggaactatccgttattgatggctgtctggaaagtcgctccttcacttgctgctgggtgcacggctatactgaaaccttcagagttggcctccctgacatgtttggagctcgctgatatttgccgcgaggtgggtctaccacctggtgttcttaatattctgactggtttaggaactgaagcaggtgctccactggcatcgcatccacatgttgacaagattgtattcactggaagcacaacaactggaagcagcattatgacttccgctgccaaattggtgaaaccagtttccttggagcttgggggtaaaagccctatcattgtctttgatgatgtcgatattgataaagctatggaatggactatgtttggttgtttctggacgaatgggcagatttgtagtgccacatctcgacttcttgtgcatgaaaggattgctgacgagtttttggacaagctggtaaagtggaccaagaacattaagatttcagatccttttgaagaaggctgtaggcttggtcctgttgtcagtaaaggacagtacgagagagttctaaagtttgtctcaaacgctaggaatgaaggtgcaactgttctttgtggaggagttcgtcctgagcatttaaagaagggatactttgttgaacctgcgattgtttcaaatgtgactacttcaatggaaatctggagagaggaagtctttggtcctgctctgtgtgtgaaaacattctccaccgaggatgaggcaattcagcttgcaaatgactctcaatatggattagcaggcgcagtattatcaaatgatctggagcggtgtgatcgtgttagtaaggctttccaggcgggaatagtgtgggtcaactgctctcagccatgcttctgccaagctccatggggtggaaccaaacgcagtggatttggccgtgaattgggagaatggggacttgagaactacttgagtgtgaagcaggtgactcagtatatctctgatgaaccatggggatggtacaaacctccttccaagctctgagacaaacactagttcctgatatttccttaaaacatgtactcatgagaatataccaataaagcaagagacccttctgtaagagaaatggtattgctactttaaattcttgaaaaaaatgaaaaataagatgagatgatatttctt

SEQ ID NO: 37810 - protein, 360 aa, Arabidopsis thaliana
  peptide (1)..(360): Ceres Seq. ID no. 12340141
KGYILKEPIGVVGMITPWNYPLLMAVWKVAPSLAAGCTAILKPSELASLTCLELADICREVGLPPGVLNILTGLGTEAGAPLASHPHVDKIVFTGSTTTGSSIMTSAAKLVKPVSLELGGKSPIIVFDDVDIDKAMEWTMFGCFWTNGQICSATSRLLVHERIADEFLDKLVKWTKNIKISDPFEEGCRLGPVVSKGQYERVLKFVSNARNEGATVLCGGVRPEHLKKGYFVEPAIVSNVTTSMEIWREEVFGPALCVKTFSTEDEAIQLANDSQYGLAGAVLSNDLERCDRVSKAFQAGIVWVNCSQPCFCQAPWGGTKRSGFGRELGEWGLENYLSVKQVTQYISDEPWGWYKPPSKL

SEQ ID NO: 37811 - protein, 347 aa, Arabidopsis thaliana
  peptide (1)..(347): Ceres Seq. ID no. 12340142
MITPWNYPLLMAVWKVAPSLAAGCTAILKPSELASLTCLELADICREVGLPPGVLNILTGLGTEAGAPLASHPHVDKIVFTGSTTTGSSIMTSAAKLVKPVSLELGGKSPIIVFDDVDIDKAMEWTMFGCFWTNGQICSATSRLLVHERIADEFLDKLVKWTKNIKISDPFEEGCRLGPVVSKGQYERVLKFVSNARNEGATVLCGGVRPEHLKKGYFVEPAIVSNVTTSMEIWREEVFGPALCVKTFSTEDEAIQLANDSQYGLAGAVLSNDLERCDRVSKAFQAGIVWVNCSQPCFCQAPWGGTKRSGFGRELGEWGLENYLSVKQVTQYISDEPWGWYKPPSKL

SEQ ID NO: 37812 - protein, 337 aa, Arabidopsis thaliana
  peptide (1)..(337): Ceres Seq. ID no. 12340143
MAVWKVAPSLAAGCTAILKPSELASLTCLELADICREVGLPPGVLNILTGLGTEAGAPLASHPHVDKIVFTGSTTTGSSIMTSAAKLVKPVSLELGGKSPIIVFDDVDIDKAMEWTMFGCFWTNGQICSATSRLLVHERIADEFLDKLVKWTKNIKISDPFEEGCRLGPVVSKGQYERVLKFVSNARNEGATVLCGGVRPEHLKKGYFVEPAIVSNVTTSMEIWREEVFGPALCVKTFSTEDEAIQLANDSQYGLAGAVLSNDLERCDRVSKAFQAGIVWVNCSQPCFCQAPWGGTKRSGFGRELGEWGLENYLSVKQVTQYISDEPWGWYKPPSKL

SEQ ID NO: 37813 - DNA, 1063 bp, Arabidopsis thaliana
  misc_feature (1)..(1063): Ceres Seq. ID no. 12327180
  misc_feature (1)..(1063): Ortholog of  Ceres SEQ ID NO 15169191 as cited in SEQ ID NO 58440
  misc_feature (1)..(1063): Ortholog of  Ceres SEQ ID NO 13597523 as cited in SEQ ID NO 64778
aaaaattcaatctttctccgtcattcagatttcgaggagacagagacagagaaaaggattcgtgtaaggaaaagcttttaaacttctctttctatttatccctcctttcttctatctctctctctctcgatatcgatacaagagagatggagaaagaagaaggagaaacaacaacaacgatcggcgttgttccggcggcgccggcgaaattaccgactccgatatattctctgagcttttgggaggtcacggcagcttccggcgtcgttttagggtttattttgggtcttgtttgcgtttatctcacaatgcctcaatctgattacagctttctcaagctacctcgtaatctcgaagatcttcagattcttagagataatcttgagatatacacaagtgattacacagttcaagttcttgttgggtattgtctggtgtacgtttttatgcagacgtttatgattcctggaactgtgtttatgtctttgcttgctggtgctctctttggagttgtcaaaggaatggctcttgttgtctccactgcaacagctggtgcttcctcttgttatttcctctctaagctcattggtagacctttactcttatcgctttggcctgacaagctcgtattcttccaagatcaggttgcgagaagaaaagatcggttgctgaattatatgctgttcttgaggctaacaccaacattgcctaacactttcattaatgttgcttctccaattgttgatgttccttaccatatcttcttcctagctacattcatcggtctgattcctgctgcatttgtcactgtccgggctgggcttgctcttggagagctaaaatcattgggagatctctatgacttcagctccatggcgactctttgtctcattggtgtgctctctgtgactccaaccctaattggcaagaaacaagcatagaagatgaagatcaatacgatgatgatgatgatgaaaacagagcatttcaacagcctctttgtgtatatatcatgtagaatgttaagaacttaagatcaatcaatcataaaactctgttctct

SEQ ID NO: 37814 - protein, 312 aa, Arabidopsis thaliana
  peptide (1)..(312): Ceres Seq. ID no. 12327181
KFNLSPSFRFRGDRDREKDSCKEKLLNFSFYLSLLSSISLSLDIDTREMEKEEGETTTTIGVVPAAPAKLPTPIYSLSFWEVTAASGVVLGFILGLVCVYLTMPQSDYSFLKLPRNLEDLQILRDNLEIYTSDYTVQVLVGYCLVYVFMQTFMIPGTVFMSLLAGALFGVVKGMALVVSTATAGASSCYFLSKLIGRPLLLSLWPDKLVFFQDQVARRKDRLLNYMLFLRLTPTLPNTFINVASPIVDVPYHIFFLATFIGLIPAAFVTVRAGLALGELKSLGDLYDFSSMATLCLIGVLSVTPTLIGKKQA

SEQ ID NO: 37815 - protein, 264 aa, Arabidopsis thaliana
  peptide (1)..(264): Ceres Seq. ID no. 12327182
MEKEEGETTTTIGVVPAAPAKLPTPIYSLSFWEVTAASGVVLGFILGLVCVYLTMPQSDYSFLKLPRNLEDLQILRDNLEIYTSDYTVQVLVGYCLVYVFMQTFMIPGTVFMSLLAGALFGVVKGMALVVSTATAGASSCYFLSKLIGRPLLLSLWPDKLVFFQDQVARRKDRLLNYMLFLRLTPTLPNTFINVASPIVDVPYHIFFLATFIGLIPAAFVTVRAGLALGELKSLGDLYDFSSMATLCLIGVLSVTPTLIGKKQA

SEQ ID NO: 37816 - protein, 210 aa, Arabidopsis thaliana
  peptide (1)..(210): Ceres Seq. ID no. 12327183
MPQSDYSFLKLPRNLEDLQILRDNLEIYTSDYTVQVLVGYCLVYVFMQTFMIPGTVFMSLLAGALFGVVKGMALVVSTATAGASSCYFLSKLIGRPLLLSLWPDKLVFFQDQVARRKDRLLNYMLFLRLTPTLPNTFINVASPIVDVPYHIFFLATFIGLIPAAFVTVRAGLALGELKSLGDLYDFSSMATLCLIGVLSVTPTLIGKKQA

SEQ ID NO: 37817 - DNA, 1100 bp, Arabidopsis thaliana
  misc_feature (1)..(1100): Ceres Seq. ID no. 12327326
  misc_feature (1)..(1100): Ortholog of  Ceres SEQ ID NO 15169537 as cited in SEQ ID NO 64197
atttcattgtccatcaccaatcgccaaaaccgcagaaaggtctgacctttggattagcgtgagagtttcacaatgaaagatagagaaaacgatggaaatcttgagagcagaatcttcgtgggagggttatcgtgggatgtcacagagagacagcttgagagtacctttgaccgctacgggaaaatcactgagtgtcagattatggtggggagagatactgggcgtccacgtggttttgggtttattacattcactgatcgcagaggagctgatgatgcaattaagcacatgcatggaagggagttgggcaataaggtcatctccgtgaacaaagctgagcccaaagttggtggagaagatgtagaccaattaaagaaaggtggaggctattcatctcgagggaagggaaccgaggatgagtgctttaaatgcagacgccctggtcattgggctcgagattgcccatcaactggtgacgatcgagaacggttcagagttccccttgcgatgcgctctcgtattggagacatagatggacaccgagatcgctatggagatcgtgatctggagagggagcgggagcgggagcgtgagtttgaccgctacatggatggacgccgtgaccgagatgggggacgatatagctacagggaccgcttcgacagtggagacaagtatgagcctcgtgatcactatccatttgagagatacgcaccaccaggagaccgttttgtgagtgataggtatgggatgcctgaacatcatcttgagaatgaatatcgcgggagagagagaagctatgacagggacagatacgcaagggatacaagtgacagatatggagatatgggaccgatacgcgatgagggaagaccctacagaagcagaccaggtccttatgaccgtcctagccgtcctggaggcagaccttcatcatatgaacgttggtagtttgttttggttaaccagatgtcaatgcttatgctttgggatttaggtctatatcagagatagaactcgaactcgagatctctgttatgcttttttgtcgaatattatgattcttcatcgcagtaaaaaagttatgttcttatgatcct

SEQ ID NO: 37818 - protein, 292 aa, Arabidopsis thaliana
  peptide (1)..(292): Ceres Seq. ID no. 12327327
MKDRENDGNLESRIFVGGLSWDVTERQLESTFDRYGKITECQIMVGRDTGRPRGFGFITFTDRRGADDAIKHMHGRELGNKVISVNKAEPKVGGEDVDQLKKGGGYSSRGKGTEDECFKCRRPGHWARDCPSTGDDRERFRVPLAMRSRIGDIDGHRDRYGDRDLEREREREREFDRYMDGRRDRDGGRYSYRDRFDSGDKYEPRDHYPFERYAPPGDRFVSDRYGMPEHHLENEYRGRERSYDRDRYARDTSDRYGDMGPIRDEGRPYRSRPGPYDRPSRPGGRPSSYERW

SEQ ID NO: 37819 - protein, 249 aa, Arabidopsis thaliana
  peptide (1)..(249): Ceres Seq. ID no. 12327328
MVGRDTGRPRGFGFITFTDRRGADDAIKHMHGRELGNKVISVNKAEPKVGGEDVDQLKKGGGYSSRGKGTEDECFKCRRPGHWARDCPSTGDDRERFRVPLAMRSRIGDIDGHRDRYGDRDLEREREREREFDRYMDGRRDRDGGRYSYRDRFDSGDKYEPRDHYPFERYAPPGDRFVSDRYGMPEHHLENEYRGRERSYDRDRYARDTSDRYGDMGPIRDEGRPYRSRPGPYDRPSRPGGRPSSYERW

SEQ ID NO: 37820 - protein, 220 aa, Arabidopsis thaliana
  peptide (1)..(220): Ceres Seq. ID no. 12327329
MHGRELGNKVISVNKAEPKVGGEDVDQLKKGGGYSSRGKGTEDECFKCRRPGHWARDCPSTGDDRERFRVPLAMRSRIGDIDGHRDRYGDRDLEREREREREFDRYMDGRRDRDGGRYSYRDRFDSGDKYEPRDHYPFERYAPPGDRFVSDRYGMPEHHLENEYRGRERSYDRDRYARDTSDRYGDMGPIRDEGRPYRSRPGPYDRPSRPGGRPSSYERW

SEQ ID NO: 37821 - DNA, 1369 bp, Arabidopsis thaliana
  misc_feature (1)..(1369): Ceres Seq. ID no. 12338575
  misc_feature (1)..(1369): Ortholog of  Ceres SEQ ID NO 12364737 as cited in SEQ ID NO 51089
  misc_feature (1)..(1369): Ortholog of  Ceres SEQ ID NO 13582301 as cited in SEQ ID NO 56509
  misc_feature (1)..(1369): Ortholog of  Ceres SEQ ID NO 14315035 as cited in SEQ ID NO 56880
  misc_feature (1)..(1369): Ortholog of  Ceres SEQ ID NO 13594276 as cited in SEQ ID NO 57728
  misc_feature (1)..(1369): Ortholog of  Ceres SEQ ID NO 13594147 as cited in SEQ ID NO 58975
  misc_feature (1)..(1369): Ortholog of  Ceres SEQ ID NO 13597380 as cited in SEQ ID NO 64054
  misc_feature (1)..(1369): Ortholog of  Ceres SEQ ID NO 12625474 as cited in SEQ ID NO 64169
  misc_feature (1)..(1369): Ortholog of  Ceres SEQ ID NO 13597502 as cited in SEQ ID NO 64681
atatacatccatttacattcttcacgttatcagaccaatctctctcttcttcttcttcacgttctctctctttccggataagggtagagatggctagagtttgtgtaatgatgatggctatggctatagctatggctatgaacatagctatgggtgatccaatagcaccatgttacttcatattcggtgactctttggttgatagtggaaacaacaatcggcttacctctctagcaagagctaattacttcccttacggtatcgacttccagtacggtccaaccggtcgcttctccaacggaaaaaccaccgtcgatgtcatcactgagcttcttggtttcgatgactacattacaccgtattccgaagcaaggggagaagatatcctaagaggagtaaactacgcttctgcagctgccggaatccgagaagaaactggtcgacaattgggagctagaataacatttgcagggcaagtagctaatcatgtaaacactgtgtcacaagttgtgaacatactcggagacgagaatgaagctgctaattacctaagtaaatgcatctactcaatcgggttaggcagtaacgactatctcaataactattttatgcctgtttattactccaccgggagccagtactccccggatgcctacgccaacgacctcataaaccgctacaccgagcaactccggataatgtataacaacggagcgaggaagtttgcgctagttggtataggtgcaataggatgcagtccaaatgagctggctcaaaacagcagagacggggtgacttgtgacgaaaggatcaattccgctaacagaatcttcaacagtaagcttgtgtctctggttgatcacttcaaccaaaacacaccaggggccaagttcacttacattaatgcttatggtatcttccaagacatggtagctaatccttctcgctatgggtttagggtgacaaacgcgggatgttgtggagttgggaggaacaatggacagataacttgtcttccgggtcaagctccatgtcttaacagggacgagtatgtgttctgggacgcgtttcatccaggagaagctgcgaatgttgtcatcggtagtcgatcttttcagagagaatctgcttctgatgctcatccttatgatatccagcagcttgctcggctctagttcatgaaatttcctccaagcaaacacagagtgaaaaagagagggagacagatttaatctttttcttatttaagtgtttgatgattgtttctttttgctgcagaagaattgtttgttttgttgagtttatgtatcatggttctatataatgacatgaaatttctgctttcttatagatgactaaattcatttgg

SEQ ID NO: 37822 - protein, 390 aa, Arabidopsis thaliana
  peptide (1)..(390): Ceres Seq. ID no. 12338577
IHPFTFFTLSDQSLSSSSSRSLSFRIRVEMARVCVMMMAMAIAMAMNIAMGDPIAPCYFIFGDSLVDSGNNNRLTSLARANYFPYGIDFQYGPTGRFSNGKTTVDVITELLGFDDYITPYSEARGEDILRGVNYASAAAGIREETGRQLGARITFAGQVANHVNTVSQVVNILGDENEAANYLSKCIYSIGLGSNDYLNNYFMPVYYSTGSQYSPDAYANDLINRYTEQLRIMYNNGARKFALVGIGAIGCSPNELAQNSRDGVTCDERINSANRIFNSKLVSLVDHFNQNTPGAKFTYINAYGIFQDMVANPSRYGFRVTNAGCCGVGRNNGQITCLPGQAPCLNRDEYVFWDAFHPGEAANVVIGSRSFQRESASDAHPYDIQQLARL

SEQ ID NO: 37823 - protein, 361 aa, Arabidopsis thaliana
  peptide (1)..(361): Ceres Seq. ID no. 12338578
MARVCVMMMAMAIAMAMNIAMGDPIAPCYFIFGDSLVDSGNNNRLTSLARANYFPYGIDFQYGPTGRFSNGKTTVDVITELLGFDDYITPYSEARGEDILRGVNYASAAAGIREETGRQLGARITFAGQVANHVNTVSQVVNILGDENEAANYLSKCIYSIGLGSNDYLNNYFMPVYYSTGSQYSPDAYANDLINRYTEQLRIMYNNGARKFALVGIGAIGCSPNELAQNSRDGVTCDERINSANRIFNSKLVSLVDHFNQNTPGAKFTYINAYGIFQDMVANPSRYGFRVTNAGCCGVGRNNGQITCLPGQAPCLNRDEYVFWDAFHPGEAANVVIGSRSFQRESASDAHPYDIQQLARL

SEQ ID NO: 37824 - protein, 355 aa, Arabidopsis thaliana
  peptide (1)..(355): Ceres Seq. ID no. 12338579
MMMAMAIAMAMNIAMGDPIAPCYFIFGDSLVDSGNNNRLTSLARANYFPYGIDFQYGPTGRFSNGKTTVDVITELLGFDDYITPYSEARGEDILRGVNYASAAAGIREETGRQLGARITFAGQVANHVNTVSQVVNILGDENEAANYLSKCIYSIGLGSNDYLNNYFMPVYYSTGSQYSPDAYANDLINRYTEQLRIMYNNGARKFALVGIGAIGCSPNELAQNSRDGVTCDERINSANRIFNSKLVSLVDHFNQNTPGAKFTYINAYGIFQDMVANPSRYGFRVTNAGCCGVGRNNGQITCLPGQAPCLNRDEYVFWDAFHPGEAANVVIGSRSFQRESASDAHPYDIQQLARL

SEQ ID NO: 37825 - DNA, 1804 bp, Arabidopsis thaliana
  misc_feature (1)..(1804): Ceres Seq. ID no. 12328091
  misc_feature (1)..(1804): Ortholog of  Ceres SEQ ID NO 13589042 as cited in SEQ ID NO 60626
  misc_feature (1)..(1804): Ortholog of  Ceres SEQ ID NO 14302887 as cited in SEQ ID NO 66146
aggtaaagacgagaggtctcgcgcttatccttaaaggactgtggtgaatggtgagtgtgacttggagggaccccatcaccgcaacaatacagcttcttagatctcgataaccacaacttacctgtcacagtttcgattagatcttctcaaaaacttcacctttttttgtttttccagtttctcagaggagatcttccttcaaagctcaaatccttttgtctgaattgtgatactgctgtccccatttttctgcaagttgggaaatttctgtcaaagttttgtgggtctgttaaaaagatctgagctttgaacatggggagctcaatggaggagaaagtggtggctgtgatcatggtcggtggtccaaccaaaggcactcgatttcggccattgtcgctgaatattccaaagcctctgtttcctattgcgggacaaccaatggtgcatcatccaatttcagcttgtaaaagtattccaaatttagctcaaatatatcttgttggcttctatgaggaaagggaatttgcactttatgtttcagccatctctaatgaacttaaagttcctgttagatatctgcgagaagacaaaccacatggttcagctggtgggctgtatcactttagaaatcttattatggaagatagtccgtctcatatcttcctgcttaactgtgatgtttgctgcagtttccccttgcccaaaatgctcgaggctcacaggggatatggtggaattggaactcttcttgtgatcaaggtctctcctgaatcagccagccaatttggagaattggttgcagatccagttactaatgagctgcttcattacaccgagaaacccgaaacttttgtcagtgatcgaattaactgtggtgtttatgtatttacacctgaaatttttaatgccataggagatgtttctactcagaggaaagatagagcaactctaaaacgtgtttccagcttcgaagctcttcaaccggcaacaaggatcccgacagattttgtaagactggatcaagacatcctttcacctctagctgggaagaaacagctatatacttatgagactatggatttctgggagcaaatcaaatctcctggaatgtcgttgaggtgttcaggactctatctttcccaattccgcttgacatctccccaactgttggctagtggtgatggaacaaggagtgccattgtgattggtgatgtttacatacatccttctgcaaaagttcacccaactgcaaagattggtcccaacgtctcaatctctgcaaatgctcgtgttggaccgggcgtcaggcttatgagctgcatcatccttgacgatgttgagatcatggaaaatgcagtggtgactaacgcaattgttgggtggaaatcttctatcgggagatggtcccgtgtccaggctgagggagtctacaattcgaaactcggagttacaattctcggagactcggttgcagttgaagacgaggttgtggtgaccagcagtattgttcttccaaacaagacactgaacgtcagtgttcaagacgagatcattttgtaactgaaaaacggaagttgaaaaatggaaccaacccagtggggagcagccacactatctccctctgattcaatatctactggagaaccacataagcaaatatttgggaactgattcacatgtatcatttatttacaccaagaattttccaacattgtatcaattcattttctatactcacaacacagctactgtaaaaggcactgaatttttgcccagaataataaagcacttgtgtagttttggc

SEQ ID NO: 37826 - protein, 415 aa, Arabidopsis thaliana
  peptide (1)..(415): Ceres Seq. ID no. 12328092
MGSSMEEKVVAVIMVGGPTKGTRFRPLSLNIPKPLFPIAGQPMVHHPISACKSIPNLAQIYLVGFYEEREFALYVSAISNELKVPVRYLREDKPHGSAGGLYHFRNLIMEDSPSHIFLLNCDVCCSFPLPKMLEAHRGYGGIGTLLVIKVSPESASQFGELVADPVTNELLHYTEKPETFVSDRINCGVYVFTPEIFNAIGDVSTQRKDRATLKRVSSFEALQPATRIPTDFVRLDQDILSPLAGKKQLYTYETMDFWEQIKSPGMSLRCSGLYLSQFRLTSPQLLASGDGTRSAIVIGDVYIHPSAKVHPTAKIGPNVSISANARVGPGVRLMSCIILDDVEIMENAVVTNAIVGWKSSIGRWSRVQAEGVYNSKLGVTILGDSVAVEDEVVVTSSIVLPNKTLNVSVQDEIIL

SEQ ID NO: 37827 - protein, 411 aa, Arabidopsis thaliana
  peptide (1)..(411): Ceres Seq. ID no. 12328093
MEEKVVAVIMVGGPTKGTRFRPLSLNIPKPLFPIAGQPMVHHPISACKSIPNLAQIYLVGFYEEREFALYVSAISNELKVPVRYLREDKPHGSAGGLYHFRNLIMEDSPSHIFLLNCDVCCSFPLPKMLEAHRGYGGIGTLLVIKVSPESASQFGELVADPVTNELLHYTEKPETFVSDRINCGVYVFTPEIFNAIGDVSTQRKDRATLKRVSSFEALQPATRIPTDFVRLDQDILSPLAGKKQLYTYETMDFWEQIKSPGMSLRCSGLYLSQFRLTSPQLLASGDGTRSAIVIGDVYIHPSAKVHPTAKIGPNVSISANARVGPGVRLMSCIILDDVEIMENAVVTNAIVGWKSSIGRWSRVQAEGVYNSKLGVTILGDSVAVEDEVVVTSSIVLPNKTLNVSVQDEIIL

SEQ ID NO: 37828 - protein, 402 aa, Arabidopsis thaliana
  peptide (1)..(402): Ceres Seq. ID no. 12328094
MVGGPTKGTRFRPLSLNIPKPLFPIAGQPMVHHPISACKSIPNLAQIYLVGFYEEREFALYVSAISNELKVPVRYLREDKPHGSAGGLYHFRNLIMEDSPSHIFLLNCDVCCSFPLPKMLEAHRGYGGIGTLLVIKVSPESASQFGELVADPVTNELLHYTEKPETFVSDRINCGVYVFTPEIFNAIGDVSTQRKDRATLKRVSSFEALQPATRIPTDFVRLDQDILSPLAGKKQLYTYETMDFWEQIKSPGMSLRCSGLYLSQFRLTSPQLLASGDGTRSAIVIGDVYIHPSAKVHPTAKIGPNVSISANARVGPGVRLMSCIILDDVEIMENAVVTNAIVGWKSSIGRWSRVQAEGVYNSKLGVTILGDSVAVEDEVVVTSSIVLPNKTLNVSVQDEIIL

SEQ ID NO: 37829 - DNA, 851 bp, Arabidopsis thaliana
  misc_feature (1)..(851): Ceres Seq. ID no. 12488340
  misc_feature (1)..(851): Ortholog of  Ceres SEQ ID NO 13594962 as cited in SEQ ID NO 56140
  misc_feature (1)..(851): Ortholog of  Ceres SEQ ID NO 13598378 as cited in SEQ ID NO 62631
aaaacttttattacacgaacacaacaaacaacacaagtgagagaaccctagattcttcttctattcccttcttccttcaagtcctttttatttctctaccaacctcgaaaacgaatcaagagattagcatcttatcgagatttaaaccatcaattaatcggctgccatggctgggagactacttgcaaatttgattgtgatgggttctgggatcattggtcgtgctgtctttcaagcctatcgtcaagcacttgctaatgcgtctaaatctggtgttgcgcaggaagcaatgcaaaatggagtacgtcaagcagggaaagccatcactgagcaagaggctaggcagattcttggtgtaaccgagaagacctcttgggaagagatattacagaaatatgacaaactgtttgagaataatgcgaaagcagggagcttttaccttcaatctaaagttcatcgagccaaagaatgtctagaagttgtgtacagaagccaaggcaacggtacacctagttaagaccttactctttttgttttccagactcaaaattcttgctcttaatgtaaaatcaagacgagttcatggtttctttgagatgatgtggaacttacaaaacggccatagttttcttcacacattaaattagtaataactaagacaggtttgctctgatcagttgatcagtgtcaaagaacctctgaaaactagaaaggattgttctgtttgtgtatgttttatccttctctcctgagagaagactcttttaaagctatccttcctgtttttgattcagattccaaactgatcatctacactctgtaatgtataatgtataataaaaaaacttcgc

SEQ ID NO: 37830 - protein, 116 aa, Arabidopsis thaliana
  peptide (1)..(116): Ceres Seq. ID no. 12488341
MAGRLLANLIVMGSGIIGRAVFQAYRQALANASKSGVAQEAMQNGVRQAGKAITEQEARQILGVTEKTSWEEILQKYDKLFENNAKAGSFYLQSKVHRAKECLEVVYRSQGNGTPS

SEQ ID NO: 37831 - protein, 105 aa, Arabidopsis thaliana
  peptide (1)..(105): Ceres Seq. ID no. 12488342
MGSGIIGRAVFQAYRQALANASKSGVAQEAMQNGVRQAGKAITEQEARQILGVTEKTSWEEILQKYDKLFENNAKAGSFYLQSKVHRAKECLEVVYRSQGNGTPS

SEQ ID NO: 37832 - protein, 75 aa, Arabidopsis thaliana
  peptide (1)..(75): Ceres Seq. ID no. 12488343
MQNGVRQAGKAITEQEARQILGVTEKTSWEEILQKYDKLFENNAKAGSFYLQSKVHRAKECLEVVYRSQGNGTPS

SEQ ID NO: 37833 - DNA, 540 bp, Arabidopsis thaliana
  misc_feature (1)..(540): Ceres Seq. ID no. 12322554
  misc_feature (1)..(540): Ortholog of  Ceres SEQ ID NO 14304132 as cited in SEQ ID NO 56475
  misc_feature (1)..(540): Ortholog of  Ceres SEQ ID NO 13664228 as cited in SEQ ID NO 61166
  misc_feature (1)..(540): Ortholog of  Ceres SEQ ID NO 15179439 as cited in SEQ ID NO 0
gtatgtactacagatctcaagctgcaatctgaactaatgggattgatgatgggagctgatccggggatatctgcgtttccagaggaagacaacatattttgctggaaaggaacaattacaggaagcaaagatactgtgttcgaaggaactgagtacagactctcactcactttctctaacgattatccttttaagtctcccaaagttaagtttgagacatgctgcttccaccccaatgtggatctctatggcaatatttgcttggacattcttcaggataaatggtcatctgcttatgatgtgaggacgatattactctcaattcaaagccttctcggagaaccgaacatcagctcaccattgaacaatcaagcggctcagctttggagcaatcaagaagagtacaggaagatggttgagaagctctacaagcctttaaacgcatgattctcaaaaatcactgtaactgattttaaaatctcaactgtattggatcatatctcttttacttttataatctcaatttgagccaatattagc

SEQ ID NO: 37834 - protein, 148 aa, Arabidopsis thaliana
  peptide (1)..(148): Ceres Seq. ID no. 12322555
VCTTDLKLQSELMGLMMGADPGISAFPEEDNIFCWKGTITGSKDTVFEGTEYRLSLTFSNDYPFKSPKVKFETCCFHPNVDLYGNICLDILQDKWSSAYDVRTILLSIQSLLGEPNISSPLNNQAAQLWSNQEEYRKMVEKLYKPLNA

SEQ ID NO: 37835 - protein, 136 aa, Arabidopsis thaliana
  peptide (1)..(136): Ceres Seq. ID no. 12322556
MGLMMGADPGISAFPEEDNIFCWKGTITGSKDTVFEGTEYRLSLTFSNDYPFKSPKVKFETCCFHPNVDLYGNICLDILQDKWSSAYDVRTILLSIQSLLGEPNISSPLNNQAAQLWSNQEEYRKMVEKLYKPLNA

SEQ ID NO: 37836 - protein, 133 aa, Arabidopsis thaliana
  peptide (1)..(133): Ceres Seq. ID no. 12322557
MMGADPGISAFPEEDNIFCWKGTITGSKDTVFEGTEYRLSLTFSNDYPFKSPKVKFETCCFHPNVDLYGNICLDILQDKWSSAYDVRTILLSIQSLLGEPNISSPLNNQAAQLWSNQEEYRKMVEKLYKPLNA

SEQ ID NO: 37837 - DNA, 1024 bp, Arabidopsis thaliana
  misc_feature (1)..(1024): Ceres Seq. ID no. 13487023
  misc_feature (1)..(1024): Ortholog of  Ceres SEQ ID NO 13596163 as cited in SEQ ID NO 60864
  misc_feature (1)..(1024): Ortholog of  Ceres SEQ ID NO 15226347 as cited in SEQ ID NO 61639
agatcattcatagacgtacgcatcatcaaatcaattcatcgtcgtcttccacaattgtcatcaccgatcgattttccgactccgacgtacctcctcttccccgttaccttctcagagtttttagtagtcttcctttggaacaatgagtgacgtgtttgatggatatgagcgacaatactgtgagctctcggcgagtctttcaaagaagtgttcctctgctatttcgcttgatggagaacaaaagaagcagaagttgtctgaaataaaatccgggctggaaaatgcagaagtattgattaggaaaatggatctcgaggcaaggacccttccacctaatcttaagtccagcctccttgtcaaattaagagaattcaagtctgatctgaacaatttcaaaactgaagtgaagagaatcacatctggacagttgaacgctgctgctcgtgatgagttgctagaagctggtatggctgacacaaagacggcttcagctgatcagagagcaagattgatgatgtcaactgagcgtctgggccgaaccactgacagagtcaaggacagtcgtagaacaatgatggagactgaagaaatcggtgtttcaatcctccaagacttgcacggtcagagacagtctctcttacgtgcccacgaaacgcttcatggagtagacgataacattggaaagagcaagaagatcttgacagacatgacgaggaggatgaacaagaacaaatggaccattggagccatcatcatcgcattgattgccgccattttcatcatcttgtacttcaaactcaccaagtaagcctctgtaactaaatccgaccaaatcaaagaacaacggttgttttcgttttgtgagtctttgatttatcctgtttcttctttttgtgtgaaaagttgttttgccacctttgtattctaaatttgaccatacatactttaagcaagtaaagcttcggcctaagtgtcacgtatattgtttatattgttcatatcaaatccagaactatacatggtt

SEQ ID NO: 37838 - protein, 221 aa, Arabidopsis thaliana
  peptide (1)..(221): Ceres Seq. ID no. 13487024
MSDVFDGYERQYCELSASLSKKCSSAISLDGEQKKQKLSEIKSGLENAEVLIRKMDLEARTLPPNLKSSLLVKLREFKSDLNNFKTEVKRITSGQLNAAARDELLEAGMADTKTASADQRARLMMSTERLGRTTDRVKDSRRTMMETEEIGVSILQDLHGQRQSLLRAHETLHGVDDNIGKSKKILTDMTRRMNKNKWTIGAIIIALIAAIFIILYFKLTK

SEQ ID NO: 37839 - protein, 167 aa, Arabidopsis thaliana
  peptide (1)..(167): Ceres Seq. ID no. 13487025
MDLEARTLPPNLKSSLLVKLREFKSDLNNFKTEVKRITSGQLNAAARDELLEAGMADTKTASADQRARLMMSTERLGRTTDRVKDSRRTMMETEEIGVSILQDLHGQRQSLLRAHETLHGVDDNIGKSKKILTDMTRRMNKNKWTIGAIIIALIAAIFIILYFKLTK

SEQ ID NO: 37840 - protein, 113 aa, Arabidopsis thaliana
  peptide (1)..(113): Ceres Seq. ID no. 13487026
MADTKTASADQRARLMMSTERLGRTTDRVKDSRRTMMETEEIGVSILQDLHGQRQSLLRAHETLHGVDDNIGKSKKILTDMTRRMNKNKWTIGAIIIALIAAIFIILYFKLTK

SEQ ID NO: 37841 - DNA, 1894 bp, Arabidopsis thaliana; identical to SEQ ID NO: 22903
  misc_feature (1)..(1894): Ceres Seq. ID no. 12327192
  misc_feature (1)..(1894): Ortholog of  Ceres SEQ ID NO 15176035 as cited in SEQ ID NO 0

SEQ ID NO: 37842 - protein, 542 aa, Arabidopsis thaliana; identical to SEQ ID NO: 22904
  peptide (1)..(542): Ceres Seq. ID no. 12327193

SEQ ID NO: 37843 - protein, 430 aa, Arabidopsis thaliana; identical to SEQ ID NO: 22905
  peptide (1)..(430): Ceres Seq. ID no. 12327194

SEQ ID NO: 37844 - protein, 426 aa, Arabidopsis thaliana; identical to SEQ ID NO: 22906
  peptide (1)..(426): Ceres Seq. ID no. 12327195

SEQ ID NO: 37845 - DNA, 1244 bp, Arabidopsis thaliana
  misc_feature (1)..(1244): Ceres Seq. ID no. 12322558
  misc_feature (1)..(1244): Ortholog of  Ceres SEQ ID NO 14302776 as cited in SEQ ID NO 66919
actcctaaaaactataatcattgagaaacccattttaagattacatcaatcatcatcgctcttagagagaaactggagcaacttctcaaattttagccttttttttgtttttgcattttgcctaatcggtgcttctccagatttcgcttatcttgttcctatagcataacaatggcggatttcaaaccaaggatcgagatttcgttccttgaaaccttcatttgcagcgctttcgctgcttgttttgctgagttatgtactataccgttggacacagccaaagttagacttcagcttcaaagaaagattcccactggagatggtgagaatttgcccaagtatagaggatcaattggtactctagctaccatagctagagaagaaggtatttcaggtctttggaaaggtgttattgcaggacttcatcgccaatgtatctatggtggcttaaggattgggttatatgagcctgtgaagacacttttggttggaagtgactttattggcgatattcctttatatcaaaagattcttgcagctttgttaactggagctatagctattattgtagctaatccaactgatcttgttaaagttcggcttcaatcagaaggaaagttaccggctggggttcctaggcgttatgcaggagctgtagacgcttatttcaccattgtgaagctggaaggagttagtgcgctatggactggacttggtcccaatattgcccggaatgctattgtaaatgctgcagagttagctagttatgatcaaataaaggagacaattatgaaaattccgttcttcagagacagtgttttaactcatctactagctggtttagctgcaggcttcttcgctgtctgcatcggttctccaattgatgtggtgaaatctagaatgatgggagactctacttaccgaaacacagtcgattgcttcatcaaaacgatgaagaccgaggggattatggcattctacaaaggatttctcccgaattttacacggctaggaacctggaatgccattatgttcctcacattagaacaagtgaaaaaagtgtttctaagagaagtcttgtacgattgattctcagatccctagtcgaaaaccataccttattacataatcccttctataaaactttgaattgttagaattaaaacatatatactttctatgttatgtgagctttgttatttagattagtatagaaacattttatccaaaaaaaaattctttgc

SEQ ID NO: 37846 - protein, 305 aa, Arabidopsis thaliana
  peptide (1)..(305): Ceres Seq. ID no. 12322559
MADFKPRIEISFLETFICSAFAACFAELCTIPLDTAKVRLQLQRKIPTGDGENLPKYRGSIGTLATIAREEGISGLWKGVIAGLHRQCIYGGLRIGLYEPVKTLLVGSDFIGDIPLYQKILAALLTGAIAIIVANPTDLVKVRLQSEGKLPAGVPRRYAGAVDAYFTIVKLEGVSALWTGLGPNIARNAIVNAAELASYDQIKETIMKIPFFRDSVLTHLLAGLAAGFFAVCIGSPIDVVKSRMMGDSTYRNTVDCFIKTMKTEGIMAFYKGFLPNFTRLGTWNAIMFLTLEQVKKVFLREVLYD

SEQ ID NO: 37847 - DNA, 895 bp, Arabidopsis thaliana
  misc_feature (1)..(895): Ceres Seq. ID no. 13491520
  misc_feature (1)..(895): Ortholog of  Ceres SEQ ID NO 15173936 as cited in SEQ ID NO 61736
  misc_feature (1)..(895): Ortholog of  Ceres SEQ ID NO 13596373 as cited in SEQ ID NO 67991
gatcgagaaatggagaataatccaagaagctcatcgtctctccctctagccgggcgtgtagctatagtgaccggagccaccagaggcatgggccgtgaaatcgcgattcacctccactctcttggtgcaagagtcaccatcaattatgtctcgagctcatcaaaagctgaactcttggtttcagaactaaacgactcatctcaattaaagtcagcgatcgcagttaaagcagatgtgtcagacccggaccagatcaacaacttgtttgatcaaacagaacaagagttcggatctaaagttcacatcgtcgtgaattgtgcaggtgttttggatccaaagtatccatctttatccgagacgacactagaagatttcgataacacattcacaataaacacaagagggtctttcttgtgttgcaaggaagcagctaaaagggttatgagaggaggtggtggaagaatcattatgatgtctacatcaatggttggtggtctcgccccgggttatggagtttacgcagcatcaaaggccgccgttgagacaatggtgaaagtgttggcgaaggagcttaagggaagccggataaccgcgaattgcgtggcgccagggccggttgcgacggagatgttttatgctggaaagagtgatgaaacggtgaaaatgcttgcaggggcttgtcctatggggaggatcggtgagtcaaaggatataaccgagattgtagggtttttggccggtgatggtggtgaatggattaacggtcaagttattagagccaatggaggctttgttgtctaataaatgaagaactaacattggaatttgatgttgtcttcttcttttcgtgtgttgatctacttttatgtcaatgatgatgagttgtttattgggc

SEQ ID NO: 37848 - protein, 266 aa, Arabidopsis thaliana
  peptide (1)..(266): Ceres Seq. ID no. 13491521
DREMENNPRSSSSLPLAGRVAIVTGATRGMGREIAIHLHSLGARVTINYVSSSSKAELLVSELNDSSQLKSAIAVKADVSDPDQINNLFDQTEQEFGSKVHIVVNCAGVLDPKYPSLSETTLEDFDNTFTINTRGSFLCCKEAAKRVMRGGGGRIIMMSTSMVGGLAPGYGVYAASKAAVETMVKVLAKELKGSRITANCVAPGPVATEMFYAGKSDETVKMLAGACPMGRIGESKDITEIVGFLAGDGGEWINGQVIRANGGFVV

SEQ ID NO: 37849 - protein, 263 aa, Arabidopsis thaliana; identical to SEQ ID NO: 25825
  peptide (1)..(263): Ceres Seq. ID no. 13491522

SEQ ID NO: 37850 - protein, 237 aa, Arabidopsis thaliana; identical to SEQ ID NO: 25826
  peptide (1)..(237): Ceres Seq. ID no. 13491523

SEQ ID NO: 37851 - DNA, 1521 bp, Arabidopsis thaliana; identical to SEQ ID NO: 22510
  misc_feature (1)..(1521): Ceres Seq. ID no. 12394809
  misc_feature (1)..(1521): Ortholog of  Ceres SEQ ID NO 14310864 as cited in SEQ ID NO 53602
  misc_feature (1)..(1521): Ortholog of  Ceres SEQ ID NO 12597180 as cited in SEQ ID NO 59415

SEQ ID NO: 37852 - protein, 392 aa, Arabidopsis thaliana; identical to SEQ ID NO: 22511
  peptide (1)..(392): Ceres Seq. ID no. 12394810

SEQ ID NO: 37853 - protein, 378 aa, Arabidopsis thaliana; identical to SEQ ID NO: 22512
  peptide (1)..(378): Ceres Seq. ID no. 12394811

SEQ ID NO: 37854 - protein, 205 aa, Arabidopsis thaliana; identical to SEQ ID NO: 22513
  peptide (1)..(205): Ceres Seq. ID no. 12394812

SEQ ID NO: 37855 - DNA, 1617 bp, Arabidopsis thaliana
  misc_feature (1)..(1617): Ceres Seq. ID no. 12327188
  misc_feature (1)..(1617): Ortholog of  Ceres SEQ ID NO 13590691 as cited in SEQ ID NO 66290
cccgacagtagcaagcaaaaattcttcatcgactcaaattcaaaaactcatctctctctatctctatttctctggttccatagctcaccgtcgcatcgcagatctactccttccgcaataaattttaccggcggaggtatcagatctcgccgatctgttgtagcagctactgtattttgggcttctcatttgatattggggaaacgaggagtagaggacgatggaaaatctgatctctctggttaacaagatacagagagcttgcacggctttaggagaccatggagactccagcgctttacctactctttgggattccttgcctgcgatcgccgtcgttggtggtcagagctcagggaagtcttcagtcctggagagcatcgtgggaaaggactttttaccccgtggatctggcattgttactcgaaggccccttgtcttacagttgcaaaagatcgatgatggaacccgggagtatgcagagtttcttcacctcccgaggaaaaagtttactgattttgctgctgtgaggaaggagattcaagatgagactgacagagagactggacgcagcaaggctatttctagtgttcccattcaccttagcatatactctcccaatgttgtcaacttgacactgatagatcttccagggcttacaaaagttgctgttgatggacaatctgatagtatagtgaaggacattgaaaacatggttcggtcctacattgaaaagcccaactgcatcattttggcaatctcacctgcaaaccaagatcttgctacctcagatgcaattaaaatttcccgtgaggttgatccatcgggggacagaacatttggtgtcttgacaaagattgatcttatggacaaggggacggatgcagtggaaattctggaagggagatcttttaaacttaaatatccgtgggttggtgtcgtcaaccgttcccaagcagatattaacaagaatgtcgacatgattgcggctcggaaaagagagagggagtacttttccaatactactgagtataggcaccttgctaataaaatgggttccgagcatttggcaaagatgctctccaagcatctagaacgtgtgatcaagtcgagaattcctggcattcagtcacttattaacaaaacagtattagagctggaaactgaactaagtcgccttggaaagcctattgcagctgatgcaggggggaagttgtactcaataatggagatatgtcggctttttgatcaaatattcaaagagcatcttgatggagtgcgtgctggtggtgaaaaagtgtacaacgtgtttgataaccaccttcctgcggctctgaagagactccaatttgacaagcagctagcgatggacaacatccggaagctggtcactgaggctgatggttaccagcctcacttgattgctcctgagcaaggttaccgtcgtctcattgagtcttctattgtctccatcagaggccctgctgaagcatctgttgacaccgtatgaactctttactttcatctctaaaaagatgtatcaaaaacctaacacaaaacaataagcttctctctccgttttttttttttttctatggttaaatattaggttcatgc

SEQ ID NO: 37856 - protein, 429 aa, Arabidopsis thaliana
  peptide (1)..(429): Ceres Seq. ID no. 12327189
MENLISLVNKIQRACTALGDHGDSSALPTLWDSLPAIAVVGGQSSGKSSVLESIVGKDFLPRGSGIVTRRPLVLQLQKIDDGTREYAEFLHLPRKKFTDFAAVRKEIQDETDRETGRSKAISSVPIHLSIYSPNVVNLTLIDLPGLTKVAVDGQSDSIVKDIENMVRSYIEKPNCIILAISPANQDLATSDAIKISREVDPSGDRTFGVLTKIDLMDKGTDAVEILEGRSFKLKYPWVGVVNRSQADINKNVDMIAARKREREYFSNTTEYRHLANKMGSEHLAKMLSKHLERVIKSRIPGIQSLINKTVLELETELSRLGKPIAADAGGKLYSIMEICRLFDQIFKEHLDGVRAGGEKVYNVFDNHLPAALKRLQFDKQLAMDNIRKLVTEADGYQPHLIAPEQGYRRLIESSIVSIRGPAEASVDTV

SEQ ID NO: 37857 - protein, 265 aa, Arabidopsis thaliana
  peptide (1)..(265): Ceres Seq. ID no. 12327190
MVRSYIEKPNCIILAISPANQDLATSDAIKISREVDPSGDRTFGVLTKIDLMDKGTDAVEILEGRSFKLKYPWVGVVNRSQADINKNVDMIAARKREREYFSNTTEYRHLANKMGSEHLAKMLSKHLERVIKSRIPGIQSLINKTVLELETELSRLGKPIAADAGGKLYSIMEICRLFDQIFKEHLDGVRAGGEKVYNVFDNHLPAALKRLQFDKQLAMDNIRKLVTEADGYQPHLIAPEQGYRRLIESSIVSIRGPAEASVDTV

SEQ ID NO: 37858 - protein, 214 aa, Arabidopsis thaliana
  peptide (1)..(214): Ceres Seq. ID no. 12327191
MDKGTDAVEILEGRSFKLKYPWVGVVNRSQADINKNVDMIAARKREREYFSNTTEYRHLANKMGSEHLAKMLSKHLERVIKSRIPGIQSLINKTVLELETELSRLGKPIAADAGGKLYSIMEICRLFDQIFKEHLDGVRAGGEKVYNVFDNHLPAALKRLQFDKQLAMDNIRKLVTEADGYQPHLIAPEQGYRRLIESSIVSIRGPAEASVDTV

SEQ ID NO: 37859 - DNA, 1642 bp, Arabidopsis thaliana
  misc_feature (1)..(1642): Ceres Seq. ID no. 12580332
  misc_feature (1)..(1642): Ortholog of  Ceres SEQ ID NO 13597446 as cited in SEQ ID NO 64098
  misc_feature (1)..(1642): Ortholog of  Ceres SEQ ID NO 15226246 as cited in SEQ ID NO 68314
attattatcccttcttcttcttcttcttcgtcttcgtctttgattctcctgattcatgtcgcttaaatttttagcgatcttcgaatcccattttccttcgggaatctgacattttttctcgggaaattttttacccaaatcggagtaaagtatcgaatctagagaatccgctatggatgagacctattttgatctattgaatttctttaagaatccctcttttacagagacatttgtcgacatcttactatgcgcagttccgatttggctcgccgttatgatcgggttattaatcggatggtcttggcgtccaagatggaccggtttgatctatttagggtttcgttctaagcttcggtttttatggaccgcaccgcctgggtttggtgctcgtcggctttggcttgctttcaccgctctctctgctttctccgtttgccgaaccatctggtcaaggaatgacaccagagctaataaatcggcgaccggttcagcttcgtcgcagacgcctgttgaggataatgatgaatcaggattggcctcaagaggtagcgataacgggacggtgacagaggatattgtgacagagaatgatttagagcatctgcttcagctgcttgaagttggaaatgcagctttggaatggcaatctatgatggataagactactccaaatatgagctaccaggcttggcgtcatgagcctgagacaggtcctgttatttatcgcagccggactgtgtttgaggatgcaactccagatattgttagggatttcttctgggatgatgagtttcgacctaaatgggatttcatgcttgccaacttcaaaacgttggaggaggacactcagacaggaacaatgattgttcagtggagaaaaaagtttccttttttctgtagtgaccgagagtatatcattggccggagaatatgggagtctgggaagaagtattattgtgtcacaaagggagttccttatccagctctaccaaagcgtgataagccaaggcgtgttgagctttatttctcaagttgggttatcatagcggttgaatcccgaaaaggagatggacagcaaacggcttgtgaagtttcccttgtccactacgaagacatgggcatcccaaaagacgtagcaaagttaggtgtccgtcatggcatgtggggagctgtcaagaagctaaactccggtttacgagcgtaccaatccgccagaaaatcagactcatctctatctcggatcgcccaaatggcaagaatctctacaaaactgaacatggattctgcagaatcttcttcaagagatgaagacagaagcagagcaatggaatatgcgagacaacgggaccatttgagaatggactggaaatgggttgttgtaggaggtgtcgcattggcttgtggccttcactctgggatcattggcaaggctttactggctggagctggccagagactggctcgtaggtgagaaaccttgtcgtattcttattatatcttcccttgacagaaaagagaaacatatgcatataactaagggaaatgtattatttttgcaactcctctgagaagggcatgtggttttggtggtgaaccatgtagagtagtagctttaaactatggagtcataagttatttg

SEQ ID NO: 37860 - protein, 433 aa, Arabidopsis thaliana
  peptide (1)..(433): Ceres Seq. ID no. 12580333
MDETYFDLLNFFKNPSFTETFVDILLCAVPIWLAVMIGLLIGWSWRPRWTGLIYLGFRSKLRFLWTAPPGFGARRLWLAFTALSAFSVCRTIWSRNDTRANKSATGSASSQTPVEDNDESGLASRGSDNGTVTEDIVTENDLEHLLQLLEVGNAALEWQSMMDKTTPNMSYQAWRHEPETGPVIYRSRTVFEDATPDIVRDFFWDDEFRPKWDFMLANFKTLEEDTQTGTMIVQWRKKFPFFCSDREYIIGRRIWESGKKYYCVTKGVPYPALPKRDKPRRVELYFSSWVIIAVESRKGDGQQTACEVSLVHYEDMGIPKDVAKLGVRHGMWGAVKKLNSGLRAYQSARKSDSSLSRIAQMARISTKLNMDSAESSSRDEDRSRAMEYARQRDHLRMDWKWVVVGGVALACGLHSGIIGKALLAGAGQRLARR

SEQ ID NO: 37861 - protein, 398 aa, Arabidopsis thaliana
  peptide (1)..(398): Ceres Seq. ID no. 12580334
MIGLLIGWSWRPRWTGLIYLGFRSKLRFLWTAPPGFGARRLWLAFTALSAFSVCRTIWSRNDTRANKSATGSASSQTPVEDNDESGLASRGSDNGTVTEDIVTENDLEHLLQLLEVGNAALEWQSMMDKTTPNMSYQAWRHEPETGPVIYRSRTVFEDATPDIVRDFFWDDEFRPKWDFMLANFKTLEEDTQTGTMIVQWRKKFPFFCSDREYIIGRRIWESGKKYYCVTKGVPYPALPKRDKPRRVELYFSSWVIIAVESRKGDGQQTACEVSLVHYEDMGIPKDVAKLGVRHGMWGAVKKLNSGLRAYQSARKSDSSLSRIAQMARISTKLNMDSAESSSRDEDRSRAMEYARQRDHLRMDWKWVVVGGVALACGLHSGIIGKALLAGAGQRLARR

SEQ ID NO: 37862 - protein, 273 aa, Arabidopsis thaliana
  peptide (1)..(273): Ceres Seq. ID no. 12580335
MMDKTTPNMSYQAWRHEPETGPVIYRSRTVFEDATPDIVRDFFWDDEFRPKWDFMLANFKTLEEDTQTGTMIVQWRKKFPFFCSDREYIIGRRIWESGKKYYCVTKGVPYPALPKRDKPRRVELYFSSWVIIAVESRKGDGQQTACEVSLVHYEDMGIPKDVAKLGVRHGMWGAVKKLNSGLRAYQSARKSDSSLSRIAQMARISTKLNMDSAESSSRDEDRSRAMEYARQRDHLRMDWKWVVVGGVALACGLHSGIIGKALLAGAGQRLARR

SEQ ID NO: 37863 - DNA, 1390 bp, Arabidopsis thaliana; identical to SEQ ID NO: 24583
  misc_feature (1)..(1390): Ceres Seq. ID no. 12338463
  misc_feature (1)..(1390): Ortholog of  Ceres SEQ ID NO 14303542 as cited in SEQ ID NO 63539
  misc_feature (1)..(1390): Ortholog of  Ceres SEQ ID NO 12407937 as cited in SEQ ID NO 0

SEQ ID NO: 37864 - protein, 413 aa, Arabidopsis thaliana; identical to SEQ ID NO: 24584
  peptide (1)..(413): Ceres Seq. ID no. 12338464

SEQ ID NO: 37865 - protein, 387 aa, Arabidopsis thaliana; identical to SEQ ID NO: 24585
  peptide (1)..(387): Ceres Seq. ID no. 12338466

SEQ ID NO: 37866 - protein, 348 aa, Arabidopsis thaliana; identical to SEQ ID NO: 24586
  peptide (1)..(348): Ceres Seq. ID no. 12338467

SEQ ID NO: 37867 - DNA, 975 bp, Arabidopsis thaliana
  misc_feature (1)..(975): Ceres Seq. ID no. 13504902
  misc_feature (1)..(975): Ortholog of  Ceres SEQ ID NO 13595166 as cited in SEQ ID NO 56250
  misc_feature (1)..(975): Ortholog of  Ceres SEQ ID NO 13599417 as cited in SEQ ID NO 0
gagatcccatttcttttgttggcttacttctctcgaatttacgcaggaagatcattagcagagaattctcatctgattcagtccatggctgccacggctcttttccgatcgattcgccgacgcgacgtcgtctccgcgcctctttccgtttacaaatcccttgctggtaatgctcaaccttcctggggtagttcatacattggtcagaactatgcaagtttctccagagctttcgggtcaaaacctgttgtgaatgacattcttggtactggtttgggcactaacaatgccattagagaggagagagagaagtcaaaatctactgaagctgcaattgttggtgctcaattgactcgatctttccgtgctcttgatgtgggaacatcgaaacgattgttttctacaatctcaggggatataaagacaacacaggaggaaccaaaaatcaaaagctttcgccctttatctcctcacctttctgtttaccagcctcagatgaactccatgctatcgattttcaacagaatctcaggggtttacttgaccggtgtcactttcgctggctaccttctctacctgaagatgggtatgatctgcctcacctacccgagtttctaccaagtcctttaccatacacaacagcaacttccagtcatcacctcggttactgcattagccgctatttatcatactatcaagagtactcactcactcttgacccattaaaaacctttaccaaagctctttcgatgaagccgccaaagtctccagtaagagtttctttgagatgattaataaggagacaagaaaacatttgttaaactctgtcttgaaaaggtaaagatttagcacctgtttctttggattcgaggcttttttgggggtatgtttgttgcttttctttgttctcagaccttttttgaatgatgtaataaatgtttaccaaagttctgttgctacgttactctttttgtt

SEQ ID NO: 37868 - protein, 241 aa, Arabidopsis thaliana
  peptide (1)..(241): Ceres Seq. ID no. 13504903
EIPFLLLAYFSRIYAGRSLAENSHLIQSMAATALFRSIRRRDVVSAPLSVYKSLAGNAQPSWGSSYIGQNYASFSRAFGSKPVVNDILGTGLGTNNAIREEREKSKSTEAAIVGAQLTRSFRALDVGTSKRLFSTISGDIKTTQEEPKIKSFRPLSPHLSVYQPQMNSMLSIFNRISGVYLTGVTFAGYLLYLKMGMICLTYPSFYQVLYHTQQQLPVITSVTALAAIYHTIKSTHSLLTH

SEQ ID NO: 37869 - protein, 213 aa, Arabidopsis thaliana
  peptide (1)..(213): Ceres Seq. ID no. 13504904
MAATALFRSIRRRDVVSAPLSVYKSLAGNAQPSWGSSYIGQNYASFSRAFGSKPVVNDILGTGLGTNNAIREEREKSKSTEAAIVGAQLTRSFRALDVGTSKRLFSTISGDIKTTQEEPKIKSFRPLSPHLSVYQPQMNSMLSIFNRISGVYLTGVTFAGYLLYLKMGMICLTYPSFYQVLYHTQQQLPVITSVTALAAIYHTIKSTHSLLTH

SEQ ID NO: 37870 - DNA, 1195 bp, Arabidopsis thaliana
  misc_feature (1)..(1195): Ceres Seq. ID no. 13487011
  misc_feature (1)..(1195): Ortholog of  Ceres SEQ ID NO 13655404 as cited in SEQ ID NO 63283
aaaaactttcgtcttctcaacgaaatctgcagttccttgctcctttctcagtccaaattctctgatttttgattttttcgattcaatgggtttcaccaaagatcagttgcttgatcgacttcaggaacttgagattgattattccaagtatgaacatccgcctgtactaaccgtcgaagaacaggccaagtatgttagcagtagtaagggtgcactgagtaagaatctcttcttgaaggacaagaaacatcggtattatattgtttcagcgatggtggatacgaaagttgacatgaaagttttatctcagagacttggtcttggaaaaggagggattagaatggctccagaagaagcacttggtgagcttttgcaggtatccctcggatgtgttaccccgtttgcagttgtaaatgaatcagcaagagacgtgtctctcttgttagaccaaaaattcaagaaccaaacgcgttgcatcttccacccattgtctaacgatgtctcagtctctctgaacacattgggtctggacaagtttctgaagtcgattgggagagatcccgtatacgttgaccttgaggctaacccggtagttggtaaagaccaggctccagatctagctgtttgtgttccgtctaattcagttattgttcccgagattcctaatcaaacatcttctacacaaattcctcttccaaaaagtgtgtcagcagaggtcaagcctgtggcttcagccaaaacgagcaagccagcttgtaaggtgaagagcgtcgctgaaaattcagctccatcagcttacaagaacccggagaaatttgtgcaggagattttggacaaaacttcggctctattattgtccgaggctaagggagagtgcgtggaggctttggcagaaacactaagaaaacgacttacctcagagttgacccacctctctattatgtacaagaactcagcgtacgcagaaggtttttatgctggtacacgccaccagccgaagcgattgtaagaggtttggtttacatgttgaaccggagatatttgggagagaaacattaccggttcagcaatatattttccttcgttggacagcaaattttagataagactgaaaatgattacatttacatgaaagctcgaaccatttattcacttattgttgctttgtttgttcaatcaaagataaaccttttct

SEQ ID NO: 37871 - protein, 335 aa, Arabidopsis thaliana
  peptide (1)..(335): Ceres Seq. ID no. 13487012
KTFVFSTKSAVPCSFLSPNSLIFDFFDSMGFTKDQLLDRLQELEIDYSKYEHPPVLTVEEQAKYVSSSKGALSKNLFLKDKKHRYYIVSAMVDTKVDMKVLSQRLGLGKGGIRMAPEEALGELLQVSLGCVTPFAVVNESARDVSLLLDQKFKNQTRCIFHPLSNDVSVSLNTLGLDKFLKSIGRDPVYVDLEANPVVGKDQAPDLAVCVPSNSVIVPEIPNQTSSTQIPLPKSVSAEVKPVASAKTSKPACKVKSVAENSAPSAYKNPEKFVQEILDKTSALLLSEAKGECVEALAETLRKRLTSELTHLSIMYKNSAYAEGFYAGTRHQPKRL

SEQ ID NO: 37872 - protein, 307 aa, Arabidopsis thaliana
  peptide (1)..(307): Ceres Seq. ID no. 13487013
MGFTKDQLLDRLQELEIDYSKYEHPPVLTVEEQAKYVSSSKGALSKNLFLKDKKHRYYIVSAMVDTKVDMKVLSQRLGLGKGGIRMAPEEALGELLQVSLGCVTPFAVVNESARDVSLLLDQKFKNQTRCIFHPLSNDVSVSLNTLGLDKFLKSIGRDPVYVDLEANPVVGKDQAPDLAVCVPSNSVIVPEIPNQTSSTQIPLPKSVSAEVKPVASAKTSKPACKVKSVAENSAPSAYKNPEKFVQEILDKTSALLLSEAKGECVEALAETLRKRLTSELTHLSIMYKNSAYAEGFYAGTRHQPKRL

SEQ ID NO: 37873 - protein, 245 aa, Arabidopsis thaliana
  peptide (1)..(245): Ceres Seq. ID no. 13487014
MVDTKVDMKVLSQRLGLGKGGIRMAPEEALGELLQVSLGCVTPFAVVNESARDVSLLLDQKFKNQTRCIFHPLSNDVSVSLNTLGLDKFLKSIGRDPVYVDLEANPVVGKDQAPDLAVCVPSNSVIVPEIPNQTSSTQIPLPKSVSAEVKPVASAKTSKPACKVKSVAENSAPSAYKNPEKFVQEILDKTSALLLSEAKGECVEALAETLRKRLTSELTHLSIMYKNSAYAEGFYAGTRHQPKRL

SEQ ID NO: 37874 - DNA, 1257 bp, Arabidopsis thaliana
  misc_feature (1)..(1257): Ceres Seq. ID no. 12439537
  misc_feature (1)..(1257): Ortholog of  Ceres SEQ ID NO 12636774 as cited in SEQ ID NO 372
  misc_feature (1)..(1257): Ortholog of  Ceres SEQ ID NO 13582350 as cited in SEQ ID NO 56734
  misc_feature (1)..(1257): Ortholog of  Ceres SEQ ID NO 12476493 as cited in SEQ ID NO 58163
  misc_feature (1)..(1257): Ortholog of  Ceres SEQ ID NO 14310807 as cited in SEQ ID NO 58696
  misc_feature (1)..(1257): Ortholog of  Ceres SEQ ID NO 12615466 as cited in SEQ ID NO 62761
  misc_feature (1)..(1257): Ortholog of  Ceres SEQ ID NO 13597295 as cited in SEQ ID NO 63743
  misc_feature (1)..(1257): Ortholog of  Ceres SEQ ID NO 12617090 as cited in SEQ ID NO 64005
  misc_feature (1)..(1257): Ortholog of  Ceres SEQ ID NO 13597439 as cited in SEQ ID NO 64081
  misc_feature (1)..(1257): Ortholog of  Ceres SEQ ID NO 13597233 as cited in SEQ ID NO 64370
  misc_feature (1)..(1257): Ortholog of  Ceres SEQ ID NO 13598327 as cited in SEQ ID NO 68040
  misc_feature (1)..(1257): Ortholog of  Ceres SEQ ID NO 13599438 as cited in SEQ ID NO 0
acttgcaaccaattacaaaaaagagtctttaaacagaagactaaagaagatggttgcggttgaaagagttgagagtctagcaaaaagcggaatcatatcgattccaaaagaatatattcgtccaaaagaagagctcgagagcatcaacgatgttttcctagaagagaagaaagaagacggtcctcaagttcccacaatcgatctaaagaacatcgagtcagacgatgaaaagatccgtgagaattgtattgaggagctgaaaaaggcatctttggattggggagtgatgcatttgatcaaccatggaataccagctgatctaatggagcgtgtcaagaaagccggagaagagtttttcagtttgtctgtggaagagaaggagaagtatgcaaacgatcaagccactggaaagattcaaggctatggaagtaaattggctaacaacgcgagtggacaattggaatgggaagattacttctttcatcttgcgtatcctgaagagaagagagatctatcaatttggcctaagacaccaagtgattacatagaagcaacgagtgagtacgcgaagtgtcttcgtttgctagcgactaaagtcttcaaggctctctctgtcggtctaggtttagagcctgaccgtctagagaaagaagttggtggtttagaagagcttcttctacaaatgaagataaattactatccaaaatgtcctcagcctgagctagcactcggtgtggaagctcacaccgatgtaagcgctttaactttcattctacacaacatggttccgggtttgcagcttttctacgagggcaaatgggtcactgcaaaatgtgttcctgattcgattgtgatgcacattggggatactttggagattcttagtaatgggaagtataagagtatacttcatcgtgggttggtgaataaggagaaggttaggatttcttgggctgtgttttgtgaacccccaaaggataagattgttcttaagccgttgccggagatggtgagtgttgagtctccggctaagtttcctccacggacttttgctcaacatattgagcataagttgtttgggaaggaacaagaggaattggtatccgagaaaaatgattaagtttctgtgtttactcttatttttgaaactctatgtgcgagtttcttttataatgtgtttgtgtctttctcatgaatttgatgtgtttgtgccttttatagtgaatattgcggagcttaacaagcaaactttaattt

SEQ ID NO: 37875 - protein, 372 aa, Arabidopsis thaliana
  peptide (1)..(372): Ceres Seq. ID no. 12439538
LATNYKKESLNRRLKKMVAVERVESLAKSGIISIPKEYIRPKEELESINDVFLEEKKEDGPQVPTIDLKNIESDDEKIRENCIEELKKASLDWGVMHLINHGIPADLMERVKKAGEEFFSLSVEEKEKYANDQATGKIQGYGSKLANNASGQLEWEDYFFHLAYPEEKRDLSIWPKTPSDYIEATSEYAKCLRLLATKVFKALSVGLGLEPDRLEKEVGGLEELLLQMKINYYPKCPQPELALGVEAHTDVSALTFILHNMVPGLQLFYEGKWVTAKCVPDSIVMHIGDTLEILSNGKYKSILHRGLVNKEKVRISWAVFCEPPKDKIVLKPLPEMVSVESPAKFPPRTFAQHIEHKLFGKEQEELVSEKND

SEQ ID NO: 37876 - protein, 356 aa, Arabidopsis thaliana
  peptide (1)..(356): Ceres Seq. ID no. 12439539
MVAVERVESLAKSGIISIPKEYIRPKEELESINDVFLEEKKEDGPQVPTIDLKNIESDDEKIRENCIEELKKASLDWGVMHLINHGIPADLMERVKKAGEEFFSLSVEEKEKYANDQATGKIQGYGSKLANNASGQLEWEDYFFHLAYPEEKRDLSIWPKTPSDYIEATSEYAKCLRLLATKVFKALSVGLGLEPDRLEKEVGGLEELLLQMKINYYPKCPQPELALGVEAHTDVSALTFILHNMVPGLQLFYEGKWVTAKCVPDSIVMHIGDTLEILSNGKYKSILHRGLVNKEKVRISWAVFCEPPKDKIVLKPLPEMVSVESPAKFPPRTFAQHIEHKLFGKEQEELVSEKND

SEQ ID NO: 37877 - protein, 277 aa, Arabidopsis thaliana
  peptide (1)..(277): Ceres Seq. ID no. 12439540
MHLINHGIPADLMERVKKAGEEFFSLSVEEKEKYANDQATGKIQGYGSKLANNASGQLEWEDYFFHLAYPEEKRDLSIWPKTPSDYIEATSEYAKCLRLLATKVFKALSVGLGLEPDRLEKEVGGLEELLLQMKINYYPKCPQPELALGVEAHTDVSALTFILHNMVPGLQLFYEGKWVTAKCVPDSIVMHIGDTLEILSNGKYKSILHRGLVNKEKVRISWAVFCEPPKDKIVLKPLPEMVSVESPAKFPPRTFAQHIEHKLFGKEQEELVSEKND

SEQ ID NO: 37878 - DNA, 1567 bp, Arabidopsis thaliana
  misc_feature (1)..(1567): Ceres Seq. ID no. 13492944
  misc_feature (1)..(1567): Ortholog of  Ceres SEQ ID NO 12625120 as cited in SEQ ID NO 67706
  misc_feature (1)..(1567): Ortholog of  Ceres SEQ ID NO 13595999 as cited in SEQ ID NO 68173
taaaacaacaaagcaaagcgttgaagagagaagaagaagcaaagatataacccccaaaagtatcaattagtttccattttcgccgctaagattctgttttcgaacatttacaccctcaagaatcgccgccatgtgtggaggagctataatatccgatttcattccaccgccgaggtctcgccgtgttactagcgagtttatttggccggatctgaagaagaatttgaaaggatcgaagaaaagctcgaagaatcgttcgaatttcttcgattttgacgctgagttcgaagctgatttccaaggtttcaaagatgattcgtctatcgattgcgatgatgatttcgacgtcggtgatgttttcgccgatgtgaaaccattcgttttcacttcgactccaaaacccgccgtctccgccgctgcggaaggttcagtttttggtaagaaagttactggcttggatggggacgctgagaaatctgcaaataggaagaggaagaatcagtaccgagggattaggcaacgtccttggggaaaatgggctgctgagatacgtgatccaagggaaggtgctagaatctggcttggaacgttcaagacagctgaggaagctgctagagcttacgatgctgcagcgcggagaatccgtggatctaaagctaaggtgaatttccctgaagaaaacatgaaggctaattctcagaaacgctctgtgaaggctaatcttcagaaaccagtggctaaacctaaccctaacccaagtccagctttggttcagaactcgaacatctcctttgaaaatatgtgtttcatggaggagaaacaccaagtgagcaacaacaacaacaaccagtttgggatgacaaactccgttgatgctggatgtaatgggtatcagtatttcagctctgaccagggtagtaattctttcgattgttcggagtttggttggagcgatcaagctccgataactcccgacatctcttctgcggttatcaacaacaacaactcagctctgttctttgaggaagccaatccagctaagaagctcaagtctatggatttcgagacaccttacaacaacactgaatgggacgcttcactggatttcctcaacgaagatgctgtaacgactcaggacaatggtgcaaaccctatggacctatggagtattgatgaaattcattccatgattggaggagtcttctgaagagatccagtttcatgtaaataaggctgcatgtttgtgagtttcccgcatcgttcgtttatcaacctccaaaactttctaatgtctgttacttgcatcttcttctgctgtctctgtctgtctctctcaggagttcctgtttgcattgcgagaagccatgagcctctatcttgagggtagttgtgatgaagttaagtagaggcttatttttaggggttgtggtagtttttgttttagtgaatcttttgaattcgtttgtgttttgtttttgttactttatgccccaaaactcctttaacatttgtcataatgtgtttgaacctctcatctgtttaatcaaataaatcttctttgtatgtt

SEQ ID NO: 37879 - protein, 358 aa, Arabidopsis thaliana
  peptide (1)..(358): Ceres Seq. ID no. 13492945
MCGGAIISDFIPPPRSRRVTSEFIWPDLKKNLKGSKKSSKNRSNFFDFDAEFEADFQGFKDDSSIDCDDDFDVGDVFADVKPFVFTSTPKPAVSAAAEGSVFGKKVTGLDGDAEKSANRKRKNQYRGIRQRPWGKWAAEIRDPREGARIWLGTFKTAEEAARAYDAAARRIRGSKAKVNFPEENMKANSQKRSVKANLQKPVAKPNPNPSPALVQNSNISFENMCFMEEKHQVSNNNNNQFGMTNSVDAGCNGYQYFSSDQGSNSFDCSEFGWSDQAPITPDISSAVINNNNSALFFEEANPAKKLKSMDFETPYNNTEWDASLDFLNEDAVTTQDNGANPMDLWSIDEIHSMIGGVF

SEQ ID NO: 37880 - DNA, 1256 bp, Arabidopsis thaliana
  misc_feature (1)..(1256): Ceres Seq. ID no. 12348366
  misc_feature (1)..(1256): Ortholog of  Ceres SEQ ID NO 12609394 as cited in SEQ ID NO 52095
aaacaaaacacaggtttggtcggagaaggctttattaatccacttgtcctcctctcagactctacaaagtcaaagttgttcactttacctataaaaacgctttcttttcaatggcttcttcttcttgtttccttcgctcgattctcttctcttctcctactaaccttcgttcaaatcaccatctccccactttcttccccaagaatcatctcatttgctctcattccacttcttctcgcttcgaatcgctctcggtttcatcgatcggaactggatctaccaagaaatcatccgatactcggagaaaggtaaagagcatggctacgacaaatataggaaaggaggagaagaaaagagtcgagatttatgatctcgaagagaatttagcgattgatttggctaaattcacagcagatctctccgataagttttgtaaagagagaggcgctttcaccgtcgttgtctccggtggctctctcatcaaatcactccggaaattagtagaatctccttacgttgattctatagattgggcaaggtggcattttttctgggttgacgagagagttgttcccaagaatcacgatgatagcaactataaactcgcttatgatagttttctatccaaggtaccaattccgcctggaaatgtatatgcaatcaacgaagccctctccgctgaggctgcagcggatgattacgagacctgcctcaaacatttggtcaacaccaacattctccgtgtatctgaatcaactggctttcccaaatttgatctcatgcttctaggtatgggacctgatggtcatgtggcatcattattccctgggcatggtctctgcaacgagagcaagaaatgggtagtttcaatctctgactctccaaaaccaccgtctgagagaatcaccttcacgttcccggtcatcaactcatctgcacatgtagctctagttgtttgcggttctgggaaagctgaagctgtggaggcagctttaaagaagactgggaatgtaccacctgctggttctgtttctgctgaagacgagttggtttggttcctggacaaaccagcatcttccaagctctaaaaacaggtggtatgcttcccattccagtgaacttaccaatgtgactagtccggtttagtttttggattttgactctttggttctctccatttatgttgtgggaagagactgttgtgataaaagcgtgtactttacatggaaataatgaactaatcaatggtttctctg

SEQ ID NO: 37881 - protein, 325 aa, Arabidopsis thaliana
  peptide (1)..(325): Ceres Seq. ID no. 12348367
MASSSCFLRSILFSSPTNLRSNHHLPTFFPKNHLICSHSTSSRFESLSVSSIGTGSTKKSSDTRRKVKSMATTNIGKEEKKRVEIYDLEENLAIDLAKFTADLSDKFCKERGAFTVVVSGGSLIKSLRKLVESPYVDSIDWARWHFFWVDERVVPKNHDDSNYKLAYDSFLSKVPIPPGNVYAINEALSAEAAADDYETCLKHLVNTNILRVSESTGFPKFDLMLLGMGPDGHVASLFPGHGLCNESKKWVVSISDSPKPPSERITFTFPVINSSAHVALVVCGSGKAEAVEAALKKTGNVPPAGSVSAEDELVWFLDKPASSKL

SEQ ID NO: 37882 - protein, 256 aa, Arabidopsis thaliana
  peptide (1)..(256): Ceres Seq. ID no. 12348368
MATTNIGKEEKKRVEIYDLEENLAIDLAKFTADLSDKFCKERGAFTVVVSGGSLIKSLRKLVESPYVDSIDWARWHFFWVDERVVPKNHDDSNYKLAYDSFLSKVPIPPGNVYAINEALSAEAAADDYETCLKHLVNTNILRVSESTGFPKFDLMLLGMGPDGHVASLFPGHGLCNESKKWVVSISDSPKPPSERITFTFPVINSSAHVALVVCGSGKAEAVEAALKKTGNVPPAGSVSAEDELVWFLDKPASSKL

SEQ ID NO: 37883 - DNA, 1138 bp, Arabidopsis thaliana
  misc_feature (1)..(1138): Ceres Seq. ID no. 12337896
  misc_feature (1)..(1138): Ortholog of  Ceres SEQ ID NO 14312711 as cited in SEQ ID NO 1401
  misc_feature (1)..(1138): Ortholog of  Ceres SEQ ID NO 13586635 as cited in SEQ ID NO 14217
  misc_feature (1)..(1138): Ortholog of  Ceres SEQ ID NO 12616285 as cited in SEQ ID NO 63483
aaaaaacacattcatctatccaacaaaaaaaaaaaaaaaaaaggagaaatggaaggaatctatcatagaatggtgagtgtcaatggcataactatgcacattgccgagaaaggtcccaaagaaggacctgtggtgcttctcctccatggattccctgatctctggtacacgtggcgtcaccagattagtgggttatcatctctaggttaccgcgctgtagctccagacctccgaggctacggagactctgattcgccagagtctttctccgagtacacgtgtcttaacgtcgttggggacctcgtagctcttctggacagtgttgctggaaatcaagagaaggtgtttctggtcggtcatgattggggagccattatcggatggtttctctgtttgtttcgacctgaaaagattaacggctttgtgtgtttgagtgtgccgtatagatcaagaaaccctaaagtcaagcccgttcaagggttcaaggctgtatttggagatgattactacatttgtagatttcaggaaccggggaagattgaaggagagattgcaagtgcagatccaagaatatttctgaggaacctcttcacagggaggacactcggtccgccgattttacctaaggataatccctttggggaaaaacctaaccctaatagcgaaaacattgaattgcctgaatggttttctaagaaagatctcgatttctatgtctccaaattcgagaaggcaggatttaccggtggattgaactactacagagccatggatctgaattgggagctcactgcaccatggaccggagctaagattcaagttccagtgaagttcatgacaggtgacttcgacatggtttacaccacaccagggatgaaagagtacattcacggtggtggatttgctgcagatgttccaactcttcaagagatagtggtgattgaagatgctggtcacttcgttaaccaagagaaacctcaagaggtcactgctcacatcaatgacttcttcaccaagcttcgggacaacaacaaaagcttttagagttctcgtttggttctattatgttggctctcaaaacaagttggttcttgcatgtgttgtttcgacaagattttgaataagacttggcattatg

SEQ ID NO: 37884 - protein, 347 aa, Arabidopsis thaliana
  peptide (1)..(347): Ceres Seq. ID no. 12337897
KKHIHLSNKKKKKKGEMEGIYHRMVSVNGITMHIAEKGPKEGPVVLLLHGFPDLWYTWRHQISGLSSLGYRAVAPDLRGYGDSDSPESFSEYTCLNVVGDLVALLDSVAGNQEKVFLVGHDWGAIIGWFLCLFRPEKINGFVCLSVPYRSRNPKVKPVQGFKAVFGDDYYICRFQEPGKIEGEIASADPRIFLRNLFTGRTLGPPILPKDNPFGEKPNPNSENIELPEWFSKKDLDFYVSKFEKAGFTGGLNYYRAMDLNWELTAPWTGAKIQVPVKFMTGDFDMVYTTPGMKEYIHGGGFAADVPTLQEIVVIEDAGHFVNQEKPQEVTAHINDFFTKLRDNNKSF

SEQ ID NO: 37885 - protein, 331 aa, Arabidopsis thaliana
  peptide (1)..(331): Ceres Seq. ID no. 12337898
MEGIYHRMVSVNGITMHIAEKGPKEGPVVLLLHGFPDLWYTWRHQISGLSSLGYRAVAPDLRGYGDSDSPESFSEYTCLNVVGDLVALLDSVAGNQEKVFLVGHDWGAIIGWFLCLFRPEKINGFVCLSVPYRSRNPKVKPVQGFKAVFGDDYYICRFQEPGKIEGEIASADPRIFLRNLFTGRTLGPPILPKDNPFGEKPNPNSENIELPEWFSKKDLDFYVSKFEKAGFTGGLNYYRAMDLNWELTAPWTGAKIQVPVKFMTGDFDMVYTTPGMKEYIHGGGFAADVPTLQEIVVIEDAGHFVNQEKPQEVTAHINDFFTKLRDNNKSF

SEQ ID NO: 37886 - protein, 324 aa, Arabidopsis thaliana; identical to SEQ ID NO: 21477
  peptide (1)..(324): Ceres Seq. ID no. 12337899

SEQ ID NO: 37887 - DNA, 1146 bp, Arabidopsis thaliana; identical to SEQ ID NO: 25459
  misc_feature (1)..(1146): Ceres Seq. ID no. 12336445
  misc_feature (1)..(1146): Ortholog of  Ceres SEQ ID NO 13599585 as cited in SEQ ID NO 988
  misc_feature (1)..(1146): Ortholog of  Ceres SEQ ID NO 13594624 as cited in SEQ ID NO 55765
  misc_feature (1)..(1146): Ortholog of  Ceres SEQ ID NO 15177682 as cited in SEQ ID NO 0

SEQ ID NO: 37888 - protein, 115 aa, Arabidopsis thaliana; identical to SEQ ID NO: 25460
  peptide (1)..(115): Ceres Seq. ID no. 12336446

SEQ ID NO: 37889 - protein, 97 aa, Arabidopsis thaliana; identical to SEQ ID NO: 25461
  peptide (1)..(97): Ceres Seq. ID no. 12336447

SEQ ID NO: 37890 - protein, 80 aa, Arabidopsis thaliana; identical to SEQ ID NO: 25462
  peptide (1)..(80): Ceres Seq. ID no. 12336448

SEQ ID NO: 37891 - protein, 69 aa, Arabidopsis thaliana; identical to SEQ ID NO: 25463
  peptide (1)..(69): Ceres Seq. ID no. 12336449

SEQ ID NO: 37892 - DNA, 1476 bp, Arabidopsis thaliana
  misc_feature (1)..(1476): Ceres Seq. ID no. 13487711
  misc_feature (1)..(1476): Ortholog of  Ceres SEQ ID NO 13597581 as cited in SEQ ID NO 65344
aaaaagttgcgaagctctctcattgagtaaactaacggctatattctctctgatattcaaaatttgctcgaagaaacgacgatggcagccgaaacgaaggttcaggtttcagatccagaggcagagtttcttaattcgaagcaggagactggatacgagtgggagcttttcaaggagaacgtccggccattgaagagaggtcgcaatgttggtattctcaaccacgctctcaaatctcactctgaccaccaattgagaaagaatctcatcgagaaacgcaggaatttgattgaagccattgatgagtatgaaggagatgaccctttatctccatggatagagtgtataaaatgggtacaagaggcttttccaccaggaggagaatgttcaggactgttagtgatatatgagcaatgtgttcgtaaattttggcactctgaacgttacaaggatgatcttcgttatcttaaagtctggttggaatatgcggagcattgcgctgatgcggaagtgatttacaagtttttggaggtcaatgagattggaaagacacatgctgtctactatatagcttatgctttgcacattgagtttaagaataaggtcaaaactgctaatgagatcttcaatcttggaatctctagggatgcaaagccagtggaaaagttgaatgacgcgtacaagaagtttatggtgagaacgatgagaaggtccaacacagctgatgaagaaccaaaggagaataatgacttaccgtcaagaagctttggcactttattgtccaggggagataataatgcaagaaggcaggcgttaggaagttctaacccacaagccaaaaagctaaagccaaatcaatcatccaagacaccttttgctatctacgcagatgcagtttcagacaccacatcagggaatcaaccagagtcagacaagtcaagaccagagtttggtagttggctcatgcttggaggcagagcagagaggaacaaagaaaacaattctttacctagaaaatgggcatcattcaaggttcctcagaaacccattgtgagaactgttgcagcagcatctgctttcacctttgaggtttttgtcgatgaagaagaatgtacagaagaggaagaagaaaagaagaagaatgatgaaactatctcatcatcatcaaacgttctgccccttaatggcggccgtgagataaaaaaagaaacagagctgctacgacagaaccctttaagacatttcccacccaacagcttcctacgatgatgatattggactttcttctctacacgatcttatggtttgagatttgagcttttgtctataaagctccttgtgtgtttttgcctatttggatttgtttttgtgatgtactgggatatactatcctactatgtaccatgatgtgcctttcatgttttgaaattaatgtgacttgtcttgtttcaatccttatatgatttgtttctcctg

SEQ ID NO: 37893 - protein, 395 aa, Arabidopsis thaliana
  peptide (1)..(395): Ceres Seq. ID no. 13487712
MAAETKVQVSDPEAEFLNSKQETGYEWELFKENVRPLKRGRNVGILNHALKSHSDHQLRKNLIEKRRNLIEAIDEYEGDDPLSPWIECIKWVQEAFPPGGECSGLLVIYEQCVRKFWHSERYKDDLRYLKVWLEYAEHCADAEVIYKFLEVNEIGKTHAVYYIAYALHIEFKNKVKTANEIFNLGISRDAKPVEKLNDAYKKFMVRTMRRSNTADEEPKENNDLPSRSFGTLLSRGDNNARRQALGSSNPQAKKLKPNQSSKTPFAIYADAVSDTTSGNQPESDKSRPEFGSWLMLGGRAERNKENNSLPRKWASFKVPQKPIVRTVAAASAFTFEVFVDEEECTEEEEEKKKNDETISSSSNVLPLNGGREIKKETELLRQNPLRHFPPNSFLR

SEQ ID NO: 37894 - DNA, 889 bp, Arabidopsis thaliana
  misc_feature (1)..(889): Ceres Seq. ID no. 12357485
  misc_feature (1)..(889): Ortholog of  Ceres SEQ ID NO 12624943 as cited in SEQ ID NO 67802
aatcaaatctctgagctttcagatatactctgatagaggagaagaagaagaagagatcagctgagcaacaatggccaccgcgatacctctcttcgcctctttcaagtacgccgatagtctcaccgtcgtcggaatctctttctgcacggcgttggtctgcgaagcaatctcgtggatcttaatctatcgcacaagctcgtacaaatcgttgaaatcttccattgacaaagcctctaagaagctcgagacgatgaagacagataatcctacctcgaagctaacaaacaagaaatcaaagacgaagaagatagatcgcgttgaatccagcttaaaggaatcgagcagagatctatcactcttcaagtttaaatctggtgccgttgtggctttggttctctttgtcgtgtttggattgttgaattcgcttttcgaagggaaagttgtagcgaagcttccgtttcatccgattacgattgtgaggaagatgagtcatagaggattgaaaggcgatgattccactgattgttccatggcttttctttatctgctttgttctattagtataaggactaatctgcagaagttcttgggtttctctccacctagaggagctgctggtgctggtggtttgttcccaatgcctgatccaaagaccaattgatcaggtttgatctgatgatgaattggattctggattctgagctcgttgttactctgaaattttcatagataacttcaatgctctgatgtagtggtgttgttttcagttcgtttgatgagaaacactttcaaagtttcgagttttgagttttcttctagtatgaggtttggatttggatcccttaacatgatctactccttttcaaattcagtcttgattattgtgtgc

SEQ ID NO: 37895 - protein, 196 aa, Arabidopsis thaliana
  peptide (1)..(196): Ceres Seq. ID no. 12357486
MATAIPLFASFKYADSLTVVGISFCTALVCEAISWILIYRTSSYKSLKSSIDKASKKLETMKTDNPTSKLTNKKSKTKKIDRVESSLKESSRDLSLFKFKSGAVVALVLFVVFGLLNSLFEGKVVAKLPFHPITIVRKMSHRGLKGDDSTDCSMAFLYLLCSISIRTNLQKFLGFSPPRGAAGAGGLFPMPDPKTN

SEQ ID NO: 37896 - protein, 136 aa, Arabidopsis thaliana
  peptide (1)..(136): Ceres Seq. ID no. 12357487
MKTDNPTSKLTNKKSKTKKIDRVESSLKESSRDLSLFKFKSGAVVALVLFVVFGLLNSLFEGKVVAKLPFHPITIVRKMSHRGLKGDDSTDCSMAFLYLLCSISIRTNLQKFLGFSPPRGAAGAGGLFPMPDPKTN

SEQ ID NO: 37897 - DNA, 1428 bp, Arabidopsis thaliana
  misc_feature (1)..(1428): Ceres Seq. ID no. 12327207
  misc_feature (1)..(1428): Ortholog of  Ceres SEQ ID NO 13655244 as cited in SEQ ID NO 62716
taaaaagtttgaactttccgtcgaatcaaatgggaagcggaagatatctagacgaccctttaacatttactagaaacccaccttcctcgtcgtctccaatcaccgaatctagctttctcgcagaatcgatctctcgctctggtagcttcgagagtgggagcttacgaggaggcgatggtgattgctttagcgacgtcgatttcgcacttgataaactcgctgggactgtacagttctacgagaggcatgtcttcttgtgctacaaaaaaccatccgtttggcctgcgaggatcgaagcgtctgagtttgatcggttaccgaggcttctctcttccgttatattggcgaggaagagtagtatgaagaaagagactttactcacaatatgtgagggacatgatggttcagagacatcaaatggggatgttctgatatttccagatatgatcagatacagaaggttgactcattttgatgtggacacatttgttgaggaggtgcttgtgaagggtgttgagtggttgcctggaaatcctgaatctcttagtggttcatatgtctttgtatgttgtcatggatctcgagaccggcgatgtggggtttgtggaccttctctagttagtcgattcagagaagaaattgactcgtgtgctcttcgaggtgaagtttcagtcagcccttgttctcacattggtggtcacaaatacactggagatgttatcatctatggattaaatatcaaccagagagtcacaggacactggtatggatgtgtgactctagaggatgttcctcttttgttggagcaacacattaacaaaggcgaaattgtagaccggctttggaggggtgaaatgggtctgccagaagaagatcagaagaaaagtcaagaacaaaggttacaattaaacagcgaaaagatcagcaacagagaggtgactcaagaatcagttaataatagtatctgttgccagtctcgagctgtcccagctgaacggtagtggttgccaacaaaatgggaactcctcttactgtctggaggagattcacacagagaaaaatacctcggagagagtaacctctgtaaaaaatgcatctcttcggatcggtagcagcgagaatggatcttctggtggattcaaggtttgtgcggtgatgtcaatgtggttggagacttgggagagagaagatacatatgctgctttagctgttgcttgtgctgctgcatctgtggctattgcttataactgctataaacaattgaaatgaagctatgtgttttatatttagcttctatgcaatggtaattatctcagtctttagattagttgtttcctcttcgtctgtacagagttagaagagggttttaactcttaagtaagaactgcttgttgataacatatgattattatatatccatttgtaagt

SEQ ID NO: 37898 - protein, 332 aa, Arabidopsis thaliana
  peptide (1)..(332): Ceres Seq. ID no. 12327208
KSLNFPSNQMGSGRYLDDPLTFTRNPPSSSSPITESSFLAESISRSGSFESGSLRGGDGDCFSDVDFALDKLAGTVQFYERHVFLCYKKPSVWPARIEASEFDRLPRLLSSVILARKSSMKKETLLTICEGHDGSETSNGDVLIFPDMIRYRRLTHFDVDTFVEEVLVKGVEWLPGNPESLSGSYVFVCCHGSRDRRCGVCGPSLVSRFREEIDSCALRGEVSVSPCSHIGGHKYTGDVIIYGLNINQRVTGHWYGCVTLEDVPLLLEQHINKGEIVDRLWRGEMGLPEEDQKKSQEQRLQLNSEKISNREVTQESVNNSICCQSRAVPAER

SEQ ID NO: 37899 - protein, 323 aa, Arabidopsis thaliana
  peptide (1)..(323): Ceres Seq. ID no. 12327209
MGSGRYLDDPLTFTRNPPSSSSPITESSFLAESISRSGSFESGSLRGGDGDCFSDVDFALDKLAGTVQFYERHVFLCYKKPSVWPARIEASEFDRLPRLLSSVILARKSSMKKETLLTICEGHDGSETSNGDVLIFPDMIRYRRLTHFDVDTFVEEVLVKGVEWLPGNPESLSGSYVFVCCHGSRDRRCGVCGPSLVSRFREEIDSCALRGEVSVSPCSHIGGHKYTGDVIIYGLNINQRVTGHWYGCVTLEDVPLLLEQHINKGEIVDRLWRGEMGLPEEDQKKSQEQRLQLNSEKISNREVTQESVNNSICCQSRAVPAER

SEQ ID NO: 37900 - protein, 213 aa, Arabidopsis thaliana
  peptide (1)..(213): Ceres Seq. ID no. 12327210
MKKETLLTICEGHDGSETSNGDVLIFPDMIRYRRLTHFDVDTFVEEVLVKGVEWLPGNPESLSGSYVFVCCHGSRDRRCGVCGPSLVSRFREEIDSCALRGEVSVSPCSHIGGHKYTGDVIIYGLNINQRVTGHWYGCVTLEDVPLLLEQHINKGEIVDRLWRGEMGLPEEDQKKSQEQRLQLNSEKISNREVTQESVNNSICCQSRAVPAER

SEQ ID NO: 37901 - DNA, 1221 bp, Arabidopsis thaliana
  misc_feature (1)..(1221): Ceres Seq. ID no. 12580520
  misc_feature (1)..(1221): Ortholog of  Ceres SEQ ID NO 14309755 as cited in SEQ ID NO 20741
  misc_feature (1)..(1221): Ortholog of  Ceres SEQ ID NO 13639124 as cited in SEQ ID NO 56718
  misc_feature (1)..(1221): Ortholog of  Ceres SEQ ID NO 13596474 as cited in SEQ ID NO 62169
  misc_feature (1)..(1221): Ortholog of  Ceres SEQ ID NO 13598714 as cited in SEQ ID NO 62656
  misc_feature (1)..(1221): Ortholog of  Ceres SEQ ID NO 15225685 as cited in SEQ ID NO 63616
  misc_feature (1)..(1221): Ortholog of  Ceres SEQ ID NO 13597519 as cited in SEQ ID NO 64759
  misc_feature (1)..(1221): Ortholog of  Ceres SEQ ID NO 13587054 as cited in SEQ ID NO 0
acacactcacaactcaaatcatctttttgtctccctcctgaaaaaatggggttttcgtcttcattatcttgcagtgctatgggagccctaatagtgggttgccttctgcttcaagcatcaaactctaatgctcagttgagacctgacttctacttcaggacttgcccacctattttcaacatcattggggataccatcgtcaatgagctgcggactgatcctcgtattgccgcgagcctccttcggcttcacttccatgactgctttgttcgtggttgtgatgcatcgatcttgcttgacaattccacatcattccggaccgagaaagatgctgctccaaacaaaaattcggttcgagggttcgatgtcatagatagaatgaaagcagccattgagagagcttgcccaagaacagtttcttgcgcagatattatcaccatcgcctctcagatatcagttcttttgtctggcggtccatggtggccagttccgttggggagaagagacagcgtagaagctttcttcgctctggctaatacagctcttccctctccattttccactcttactcaacttaaaacagcttttgctgacgttggcctaaaccgcccttcggatttagtcgccctctccggtggtcacacatttggaaaagcacaatgccaattcgtgacacctcgtctttacaacttcaacggtaccaacagaccagacccaagtttgaacccaacttacctcgttgaactccgtcgattgtgtcctcaaaacggaaacggcaccgttctggttaacttcgattccgtgactccaactactttcgatagacaatattacaccaatcttcttaatgggaaaggtttgattcagagtgaccaagtgcttttctcaactccaggagctgatacgattccactagtaaaccaatacagcagcaacacgttcgtgttctttggagcattcgttgatgcaatgattaggatgggaaatcttaaacctttgactggaactcaaggagagataagacagaattgtagggttgtgaatccaagaattagggttgtggagaacgacgatggtgttgtgagttctatctgattatgcatgttggggatatatggatatgtaagaacgtataaaatgtgtgggattgtgggaacatttcgactaaataaagttctcacaagttgtgtgatttatgaaatttggtcttaattaacactt

SEQ ID NO: 37902 - protein, 364 aa, Arabidopsis thaliana
  peptide (1)..(364): Ceres Seq. ID no. 12580521
THSQLKSSFCLPPEKMGFSSSLSCSAMGALIVGCLLLQASNSNAQLRPDFYFRTCPPIFNIIGDTIVNELRTDPRIAASLLRLHFHDCFVRGCDASILLDNSTSFRTEKDAAPNKNSVRGFDVIDRMKAAIERACPRTVSCADIITIASQISVLLSGGPWWPVPLGRRDSVEAFFALANTALPSPFSTLTQLKTAFADVGLNRPSDLVALSGGHTFGKAQCQFVTPRLYNFNGTNRPDPSLNPTYLVELRRLCPQNGNGTVLVNFDSVTPTTFDRQYYTNLLNGKGLIQSDQVLFSTPGADTIPLVNQYSSNTFVFFGAFVDAMIRMGNLKPLTGTQGEIRQNCRVVNPRIRVVENDDGVVSSI

SEQ ID NO: 37903 - protein, 349 aa, Arabidopsis thaliana
  peptide (1)..(349): Ceres Seq. ID no. 12580522
MGFSSSLSCSAMGALIVGCLLLQASNSNAQLRPDFYFRTCPPIFNIIGDTIVNELRTDPRIAASLLRLHFHDCFVRGCDASILLDNSTSFRTEKDAAPNKNSVRGFDVIDRMKAAIERACPRTVSCADIITIASQISVLLSGGPWWPVPLGRRDSVEAFFALANTALPSPFSTLTQLKTAFADVGLNRPSDLVALSGGHTFGKAQCQFVTPRLYNFNGTNRPDPSLNPTYLVELRRLCPQNGNGTVLVNFDSVTPTTFDRQYYTNLLNGKGLIQSDQVLFSTPGADTIPLVNQYSSNTFVFFGAFVDAMIRMGNLKPLTGTQGEIRQNCRVVNPRIRVVENDDGVVSSI

SEQ ID NO: 37904 - protein, 338 aa, Arabidopsis thaliana
  peptide (1)..(338): Ceres Seq. ID no. 12580523
MGALIVGCLLLQASNSNAQLRPDFYFRTCPPIFNIIGDTIVNELRTDPRIAASLLRLHFHDCFVRGCDASILLDNSTSFRTEKDAAPNKNSVRGFDVIDRMKAAIERACPRTVSCADIITIASQISVLLSGGPWWPVPLGRRDSVEAFFALANTALPSPFSTLTQLKTAFADVGLNRPSDLVALSGGHTFGKAQCQFVTPRLYNFNGTNRPDPSLNPTYLVELRRLCPQNGNGTVLVNFDSVTPTTFDRQYYTNLLNGKGLIQSDQVLFSTPGADTIPLVNQYSSNTFVFFGAFVDAMIRMGNLKPLTGTQGEIRQNCRVVNPRIRVVENDDGVVSSI

SEQ ID NO: 37905 - DNA, 1387 bp, Arabidopsis thaliana; identical to SEQ ID NO: 23698
  misc_feature (1)..(1387): Ceres Seq. ID no. 13486745
  misc_feature (1)..(1387): Ortholog of  Ceres SEQ ID NO 14302154 as cited in SEQ ID NO 0

SEQ ID NO: 37906 - protein, 303 aa, Arabidopsis thaliana; identical to SEQ ID NO: 23699
  peptide (1)..(303): Ceres Seq. ID no. 13486746

SEQ ID NO: 37907 - DNA, 1539 bp, Arabidopsis thaliana
  misc_feature (1)..(1539): Ceres Seq. ID no. 13487911
  misc_feature (1)..(1539): Ortholog of  Ceres SEQ ID NO 14314636 as cited in SEQ ID NO 56924
  misc_feature (1)..(1539): Ortholog of  Ceres SEQ ID NO 13594345 as cited in SEQ ID NO 58043
  misc_feature (1)..(1539): Ortholog of  Ceres SEQ ID NO 15168421 as cited in SEQ ID NO 60131
  misc_feature (1)..(1539): Ortholog of  Ceres SEQ ID NO 13597574 as cited in SEQ ID NO 64677
  misc_feature (1)..(1539): Ortholog of  Ceres SEQ ID NO 13597843 as cited in SEQ ID NO 64850
  misc_feature (1)..(1539): Ortholog of  Ceres SEQ ID NO 13597678 as cited in SEQ ID NO 65375
  misc_feature (1)..(1539): Ortholog of  Ceres SEQ ID NO 15176787 as cited in SEQ ID NO 66468
  misc_feature (1)..(1539): Ortholog of  Ceres SEQ ID NO 13596180 as cited in SEQ ID NO 67941
  misc_feature (1)..(1539): Ortholog of  Ceres SEQ ID NO 13591190 as cited in SEQ ID NO 68044
  misc_feature (1)..(1539): Ortholog of  Ceres SEQ ID NO 13595961 as cited in SEQ ID NO 68223
aatcaaaccttaggaagagccatgggtgaagaagctatagttctgtatcctgcaccaccaataggtcacttagtgtccatggttgagttaggtaaaaccatcctctccaaaaacccatctctctccatccacattatcttagttccaccgccttatcagccggaatcaaccgccacttacatctcctccgtctcctcctccttcccttcaataaccttccaccatcttcccgccgtcacaccgtactcctcctcctccacctctcgccaccaccacgaatctctcctcctagagatcctctgttttagcaacccaagtgtccaccgaactcttttctcactctctcggaatttcaatgtccgagcaatgatcatcgatttcttctgcaccgccgttttagacatcaccgctgacttcacgttcccggtttacttcttctacacctctggagccgcatgtctcgccttttccttctatctcccgaccatcgacgaaacaacccccggaaaaaacctcaaagacattcctacagttcatatccccggcgttcctccgatgaagggctccgatatgcctaaggcggtgctcgaacgagacgatgaggtctacgatgtttttataatgttcggtaaacagctctcgaagtcgtcagggattattatcaatacgtttgatgctttagaaaacagagccatcaaggccataacagaggagctctgttttcgcaatatttatccaattggaccgctcattgtaaacggaagaatcgaagatagaaacgacaacaaggcagtttcttgtctcaattggctggattcgcagccggaaaagagtgttgtgtttctctgttttggaagcttaggtttgttctcaaaagaacaggtgatagagattgctgttggtttagagaaaagtgggcagagattcttgtgggtggtccgtaatccacccgagttagaaaagacagaactggatttgaaatcactcttaccagaaggattcttaagccgaaccgaagacaaagggatggtcgtgaaatcatgggctccgcaagttccggttctgaatcataaagcagtcgggggattcgtcactcattgcggttggaattcaattcttgaagctgtttgtgctggtgtgccgatggtggcttggccgttgtacgctgagcagaggtttaatagagtgatgattgtggatgagatcaagattgcgatttcgatgaatgaatcagagacgggtttcgtgagctctacagaggtggagaaacgagtccaagagataattggggagtgtccggttagggagcgaaccatggctatgaagaacgcagccgaattagccttgacagaaactggttcgtctcataccgcattaactactttactccagtcgtggagcccaaagtgatctttgaaattaagtcttgcatcaattaataactttgtagtctctcagaatcatgtctttgggggttattcgttttactagttcaaagttatgtctctgagaccgcagatggaaagaacaatttatacc

SEQ ID NO: 37908 - protein, 469 aa, Arabidopsis thaliana
  peptide (1)..(469): Ceres Seq. ID no. 13487912
NQTLGRAMGEEAIVLYPAPPIGHLVSMVELGKTILSKNPSLSIHIILVPPPYQPESTATYISSVSSSFPSITFHHLPAVTPYSSSSTSRHHHESLLLEILCFSNPSVHRTLFSLSRNFNVRAMIIDFFCTAVLDITADFTFPVYFFYTSGAACLAFSFYLPTIDETTPGKNLKDIPTVHIPGVPPMKGSDMPKAVLERDDEVYDVFIMFGKQLSKSSGIIINTFDALENRAIKAITEELCFRNIYPIGPLIVNGRIEDRNDNKAVSCLNWLDSQPEKSVVFLCFGSLGLFSKEQVIEIAVGLEKSGQRFLWVVRNPPELEKTELDLKSLLPEGFLSRTEDKGMVVKSWAPQVPVLNHKAVGGFVTHCGWNSILEAVCAGVPMVAWPLYAEQRFNRVMIVDEIKIAISMNESETGFVSSTEVEKRVQEIIGECPVRERTMAMKNAAELALTETGSSHTALTTLLQSWSPK

SEQ ID NO: 37909 - protein, 462 aa, Arabidopsis thaliana
  peptide (1)..(462): Ceres Seq. ID no. 13487913
MGEEAIVLYPAPPIGHLVSMVELGKTILSKNPSLSIHIILVPPPYQPESTATYISSVSSSFPSITFHHLPAVTPYSSSSTSRHHHESLLLEILCFSNPSVHRTLFSLSRNFNVRAMIIDFFCTAVLDITADFTFPVYFFYTSGAACLAFSFYLPTIDETTPGKNLKDIPTVHIPGVPPMKGSDMPKAVLERDDEVYDVFIMFGKQLSKSSGIIINTFDALENRAIKAITEELCFRNIYPIGPLIVNGRIEDRNDNKAVSCLNWLDSQPEKSVVFLCFGSLGLFSKEQVIEIAVGLEKSGQRFLWVVRNPPELEKTELDLKSLLPEGFLSRTEDKGMVVKSWAPQVPVLNHKAVGGFVTHCGWNSILEAVCAGVPMVAWPLYAEQRFNRVMIVDEIKIAISMNESETGFVSSTEVEKRVQEIIGECPVRERTMAMKNAAELALTETGSSHTALTTLLQSWSPK

SEQ ID NO: 37910 - protein, 443 aa, Arabidopsis thaliana
  peptide (1)..(443): Ceres Seq. ID no. 13487914
MVELGKTILSKNPSLSIHIILVPPPYQPESTATYISSVSSSFPSITFHHLPAVTPYSSSSTSRHHHESLLLEILCFSNPSVHRTLFSLSRNFNVRAMIIDFFCTAVLDITADFTFPVYFFYTSGAACLAFSFYLPTIDETTPGKNLKDIPTVHIPGVPPMKGSDMPKAVLERDDEVYDVFIMFGKQLSKSSGIIINTFDALENRAIKAITEELCFRNIYPIGPLIVNGRIEDRNDNKAVSCLNWLDSQPEKSVVFLCFGSLGLFSKEQVIEIAVGLEKSGQRFLWVVRNPPELEKTELDLKSLLPEGFLSRTEDKGMVVKSWAPQVPVLNHKAVGGFVTHCGWNSILEAVCAGVPMVAWPLYAEQRFNRVMIVDEIKIAISMNESETGFVSSTEVEKRVQEIIGECPVRERTMAMKNAAELALTETGSSHTALTTLLQSWSPK

SEQ ID NO: 37911 - DNA, 1856 bp, Arabidopsis thaliana
  misc_feature (1)..(1856): Ceres Seq. ID no. 12324698
  misc_feature (1)..(1856): Ortholog of  Ceres SEQ ID NO 15175923 as cited in SEQ ID NO 54037
  misc_feature (1)..(1856): Ortholog of  Ceres SEQ ID NO 14303366 as cited in SEQ ID NO 54418
  misc_feature (1)..(1856): Ortholog of  Ceres SEQ ID NO 13503610 as cited in SEQ ID NO 62416
  misc_feature (1)..(1856): Ortholog of  Ceres SEQ ID NO 13657610 as cited in SEQ ID NO 66165
  misc_feature (1)..(1856): Ortholog of  Ceres SEQ ID NO 13598312 as cited in SEQ ID NO 68448
  misc_feature (1)..(1856): Ortholog of  Ceres SEQ ID NO 13596100 as cited in SEQ ID NO 68573
aaatcataaaaacacaagttttcgacagatcaactgttttcttcattacgtgttcttcaatggcgtcacttcactgattctattcctatcaaagccacttacccatttccttttatatgcacaaattctcataaagttttcatttttattccatttttctcggaagccatggaagctgctaatgagcctgttaatggcggatccgtacagatccgaacagagaacaacgaaagacgaaagcttcctaatttcttacaaagcgtcaacatgaaatacgtcaagctaggttatcattacctcattactcatctcttcaagctctgtttggttccattaatggcggttttagtcacagagacctctcgattaacaacagacgatctttaccagatttggcttcatctccaatacaatctcgttgctttcatctttctctctgctttagctatctttggctccaccgtttacatcatgagtcgtcccagatctgtttatctcgttgattactcttgttatcttcctccggagagtcttcaggttaagtatcagaagtttatggatcattctaagttgattgaagatttcaatgagtcatctttagagtttcagaggaagattcttgaacgttctggtttaggagaagagacttatctccctgaagctttacattgtatccctccgaggcctacgatgatggcggctcgtgaggaatctgagcaggtaatgtttggtgctcttgataagcttttcgagaataccaagattaaccctagggatattggtgtgttggttgtgaattgtagcttgtttaatcctacaccttcgttgtcagctatgattgttaacaagtataagcttagagggaatgttaagagttttaaccttggtggaatggggtgtagtgctggtgttatctctatcgatttagctaaagatatgttgcaagttcataggaatacttatgctgttgtggttagtactgagaacattactcagaattggtattttgggaataagaaggctatgttgattccgaattgtttgtttcgtgttggtggttcggcgattttgttgtcgaacaaggggaaagatcgtagacggtctaagtataagcttgttcataccgttaggactcataaaggagctgttgagaaggctttcaactgtgtttaccaagagcaagatgataatgggaagaccggggtttcgttgtcgaaagatcttatggctatagctggggaagctcttaaggcgaatatcactactttaggtcctttggttcttcctataagtgagcagattctgtttttcatgactttggttacgaagaaactgtttaactcgaagctgaagccgtatattccgaatttcaagcttgcgtttgatcatttctgtatccatgctggtggtagagctgtgattgatgagcttgagaagaatctgcagctttcgcagactcatgtcgaggcatcgagaatgacactgcatagatttggaaacacttcttcgagctcgatttggtatgaactggcttacatagaggctaaaggtaggatgaagaaaggaaaccgggtttggcagattgcttttggaagtgggtttaagtgtaacagtgcagtttgggtggctctaaacaatgtcaagccttcggttagtagtccgtgggaacactgcatcgaccgatatccggttaagctcgacttctgatttaatcaaaaaccatttgtttggttagtcctagtctttactagactctgccttgtttatttttcttcttttcttgttaagctcttgtactcttaatgtgacgcttcttgattattactctcgcgttttattctatggcatctttatcc

SEQ ID NO: 37912 - protein, 512 aa, Arabidopsis thaliana
  peptide (1)..(512): Ceres Seq. ID no. 12324699
MEAANEPVNGGSVQIRTENNERRKLPNFLQSVNMKYVKLGYHYLITHLFKLCLVPLMAVLVTETSRLTTDDLYQIWLHLQYNLVAFIFLSALAIFGSTVYIMSRPRSVYLVDYSCYLPPESLQVKYQKFMDHSKLIEDFNESSLEFQRKILERSGLGEETYLPEALHCIPPRPTMMAAREESEQVMFGALDKLFENTKINPRDIGVLVVNCSLFNPTPSLSAMIVNKYKLRGNVKSFNLGGMGCSAGVISIDLAKDMLQVHRNTYAVVVSTENITQNWYFGNKKAMLIPNCLFRVGGSAILLSNKGKDRRRSKYKLVHTVRTHKGAVEKAFNCVYQEQDDNGKTGVSLSKDLMAIAGEALKANITTLGPLVLPISEQILFFMTLVTKKLFNSKLKPYIPNFKLAFDHFCIHAGGRAVIDELEKNLQLSQTHVEASRMTLHRFGNTSSSSIWYELAYIEAKGRMKKGNRVWQIAFGSGFKCNSAVWVALNNVKPSVSSPWEHCIDRYPVKLDF

SEQ ID NO: 37913 - protein, 479 aa, Arabidopsis thaliana
  peptide (1)..(479): Ceres Seq. ID no. 12324700
MKYVKLGYHYLITHLFKLCLVPLMAVLVTETSRLTTDDLYQIWLHLQYNLVAFIFLSALAIFGSTVYIMSRPRSVYLVDYSCYLPPESLQVKYQKFMDHSKLIEDFNESSLEFQRKILERSGLGEETYLPEALHCIPPRPTMMAAREESEQVMFGALDKLFENTKINPRDIGVLVVNCSLFNPTPSLSAMIVNKYKLRGNVKSFNLGGMGCSAGVISIDLAKDMLQVHRNTYAVVVSTENITQNWYFGNKKAMLIPNCLFRVGGSAILLSNKGKDRRRSKYKLVHTVRTHKGAVEKAFNCVYQEQDDNGKTGVSLSKDLMAIAGEALKANITTLGPLVLPISEQILFFMTLVTKKLFNSKLKPYIPNFKLAFDHFCIHAGGRAVIDELEKNLQLSQTHVEASRMTLHRFGNTSSSSIWYELAYIEAKGRMKKGNRVWQIAFGSGFKCNSAVWVALNNVKPSVSSPWEHCIDRYPVKLDF

SEQ ID NO: 37914 - protein, 456 aa, Arabidopsis thaliana
  peptide (1)..(456): Ceres Seq. ID no. 12324701
MAVLVTETSRLTTDDLYQIWLHLQYNLVAFIFLSALAIFGSTVYIMSRPRSVYLVDYSCYLPPESLQVKYQKFMDHSKLIEDFNESSLEFQRKILERSGLGEETYLPEALHCIPPRPTMMAAREESEQVMFGALDKLFENTKINPRDIGVLVVNCSLFNPTPSLSAMIVNKYKLRGNVKSFNLGGMGCSAGVISIDLAKDMLQVHRNTYAVVVSTENITQNWYFGNKKAMLIPNCLFRVGGSAILLSNKGKDRRRSKYKLVHTVRTHKGAVEKAFNCVYQEQDDNGKTGVSLSKDLMAIAGEALKANITTLGPLVLPISEQILFFMTLVTKKLFNSKLKPYIPNFKLAFDHFCIHAGGRAVIDELEKNLQLSQTHVEASRMTLHRFGNTSSSSIWYELAYIEAKGRMKKGNRVWQIAFGSGFKCNSAVWVALNNVKPSVSSPWEHCIDRYPVKLDF

SEQ ID NO: 37915 - DNA, 1553 bp, Arabidopsis thaliana
  misc_feature (1)..(1553): Ceres Seq. ID no. 13648203
  misc_feature (1)..(1553): Ortholog of  Ceres SEQ ID NO 14302734 as cited in SEQ ID NO 66748
gccacccagaaaaaaccctcaagtcttcttcttcttcctcaatctctccacctcttttcaaaccttcttcacactctctctcaatcaatcctttttcttctcaaatctttcagttttgatctctaaatttccagaaaatgagcaacgataaggacagtttcaatgtcagcgatctcacttctgctcttaaagatgaggatcgagctggtcttgtcaacgctcttaagaacaagctccagaatctagctggacaacattctgatgtgctcgagaatctgactcctaaaattagaaggcgtgttgaggttttgcgggagattcagggcaaacatgatgaaatagagacaaaattccgcgaggagagagctgctcttgaagccaagtatcaaaagttatatcagcctttgtataacaagcgttatgagattgtgaatggagctactgaagttgaaggggctccagaggatgctaagatggaccaaggagacgagaaaactgcagaagagaaaggagtccctagtttctggctgactgctctgaaaaataatgatgttatatctgaagagatcacagagcgtgatgaaggagcccttatatatcttaaagatatcaagtggtgcaagattgaagaaccaaagggattcaaacttgagtttttcttcgaccagaatccttacttcaaaaacaccctattaacaaaggcgtatcatatgattgatgaagatgagcctctgcttgagaaggctattgggacagagattgattggtatcctggaaaatgcttaactcagaagattcttaagaagaagcctaagaaaggtgcaaagaatgccaagccaattaccaaaactgaagattgtgaaagcttcttcaacttcttcaatcctccccaagttcctgatgatgatgaagacattgacgaagaaagagccgaggaacttcagaatctgatggaacaagattatgacattggttctacaatccgggagaagatcatacctcatgctgtctcatggtttactggtgaggctattgagggagaggagtttgaaatagacaatgacgatgaagatgatatcgatgaggatgaagatgaggatgaagaagatgaagacgaagatgaggaagaagacgacgaagatgaggaggaagaagtaagcaagaccaaaaagaagccatcagtcttacacaagaaaggagggagacctcaggttaccgatgatcaacaaggagagaggcctcctgaatgcaaacaacagtaaacaaaatcgaaaagtctaaacgaaaaccagtaaaagaaaaacaaatgttttgggttttgagtgaagtttcatggcctagttttttgcttccatgtaaggcaaaatgttttgaagactgctcataggaatgttgctgtaggcaaaagagtgagtttctccatgtggagatacttgataaattatttttggtgcatttgttttttttttctttaatcactaagttgaattttggtgtgttcgtcaaaattatatccttttaccacttgaattaaagtctcttttggtttcttt

SEQ ID NO: 37916 - protein, 374 aa, Arabidopsis thaliana
  peptide (1)..(374): Ceres Seq. ID no. 13648204
MSNDKDSFNVSDLTSALKDEDRAGLVNALKNKLQNLAGQHSDVLENLTPKIRRRVEVLREIQGKHDEIETKFREERAALEAKYQKLYQPLYNKRYEIVNGATEVEGAPEDAKMDQGDEKTAEEKGVPSFWLTALKNNDVISEEITERDEGALIYLKDIKWCKIEEPKGFKLEFFFDQNPYFKNTLLTKAYHMIDEDEPLLEKAIGTEIDWYPGKCLTQKILKKKPKKGAKNAKPITKTEDCESFFNFFNPPQVPDDDEDIDEERAEELQNLMEQDYDIGSTIREKIIPHAVSWFTGEAIEGEEFEIDNDDEDDIDEDEDEDEEDEDEDEEEDDEDEEEEVSKTKKKPSVLHKKGGRPQVTDDQQGERPPECKQQ

SEQ ID NO: 37917 - protein, 262 aa, Arabidopsis thaliana
  peptide (1)..(262): Ceres Seq. ID no. 13648205
MDQGDEKTAEEKGVPSFWLTALKNNDVISEEITERDEGALIYLKDIKWCKIEEPKGFKLEFFFDQNPYFKNTLLTKAYHMIDEDEPLLEKAIGTEIDWYPGKCLTQKILKKKPKKGAKNAKPITKTEDCESFFNFFNPPQVPDDDEDIDEERAEELQNLMEQDYDIGSTIREKIIPHAVSWFTGEAIEGEEFEIDNDDEDDIDEDEDEDEEDEDEDEEEDDEDEEEEVSKTKKKPSVLHKKGGRPQVTDDQQGERPPECKQQ

SEQ ID NO: 37918 - DNA, 768 bp, Arabidopsis thaliana
  misc_feature (1)..(768): Ceres Seq. ID no. 12394158
  misc_feature (1)..(768): Ortholog of  Ceres SEQ ID NO 12635789 as cited in SEQ ID NO 0
aaaaaaaccctagttttttgctctctcgaagttccgtgcgactctctgctcgagcaagatctcctaccgatacaatgattatctcagaggctaaccgcaaagaaatctgcaagtacctcttcaaagaaggagtttgctttgcgaagaaggatttcaatcttgctaagcatccgttgatcgatgtcccgaacctacaagtgattaagcttatgcagagtttcaaatccaaggagtatgttagagagacatttgcctggatgcattactattggtttttgaccaatgaagggatcgagttcttgagaacttatcttaatcttccatctgatgttgttcctgctactttgaagaagtcagctaagcctggtggtcgtccatttggtggcccacctggtgatcgctcaagaggacctcgccatgaaggaggagaccgtcccaggtttggtgaccgtgatgggtaccgtgcaggtcctcgagctggtggtgagtttggaggtgaaaagggtggagctcctgcagattaccagccatctttccaaggaagtgggcgtggttttggccgtggtgctggtggctacagcgcagctgcaccatctggttcaggtttgccttgaaaaagaaatgtctttaggtgacagtaagaccatggaggagttttcagctttaaattttgcttttgtaattcagattccggaatccttcataatctctatctgagtttagttttgttgttgaatcaaacatccgatttaaagttatgttcattcc

SEQ ID NO: 37919 - protein, 203 aa, Arabidopsis thaliana
  peptide (1)..(203): Ceres Seq. ID no. 12394159
KNPSFLLSRSSVRLSARARSPTDTMIISEANRKEICKYLFKEGVCFAKKDFNLAKHPLIDVPNLQVIKLMQSFKSKEYVRETFAWMHYYWFLTNEGIEFLRTYLNLPSDVVPATLKKSAKPGGRPFGGPPGDRSRGPRHEGGDRPRFGDRDGYRAGPRAGGEFGGEKGGAPADYQPSFQGSGRGFGRGAGGYSAAAPSGSGLP

SEQ ID NO: 37920 - protein, 179 aa, Arabidopsis thaliana
  peptide (1)..(179): Ceres Seq. ID no. 12394160
MIISEANRKEICKYLFKEGVCFAKKDFNLAKHPLIDVPNLQVIKLMQSFKSKEYVRETFAWMHYYWFLTNEGIEFLRTYLNLPSDVVPATLKKSAKPGGRPFGGPPGDRSRGPRHEGGDRPRFGDRDGYRAGPRAGGEFGGEKGGAPADYQPSFQGSGRGFGRGAGGYSAAAPSGSGLP

SEQ ID NO: 37921 - protein, 134 aa, Arabidopsis thaliana
  peptide (1)..(134): Ceres Seq. ID no. 12394161
MQSFKSKEYVRETFAWMHYYWFLTNEGIEFLRTYLNLPSDVVPATLKKSAKPGGRPFGGPPGDRSRGPRHEGGDRPRFGDRDGYRAGPRAGGEFGGEKGGAPADYQPSFQGSGRGFGRGAGGYSAAAPSGSGLP

SEQ ID NO: 37922 - DNA, 2393 bp, Arabidopsis thaliana
  misc_feature (1)..(2393): Ceres Seq. ID no. 13497068
  misc_feature (1)..(2393): Ortholog of  Ceres SEQ ID NO 13654989 as cited in SEQ ID NO 63117
  misc_feature (1)..(2393): Ortholog of  Ceres SEQ ID NO 13584744 as cited in SEQ ID NO 69137
catcgctgtctggaacagcgatgactcgagaaccggcagaagtatgaagaagactaagacttaccaagtcttctgtattgctgcactctctgtcctaactctgcagcttatcaatggttcatcagcagcaacacctccacctccaaatagtaattcttcaacttcttgtaacagagcctgtggaggagtctcaattccgttcccgttcggaatcgggaaggattgttatctcaatggctggtatgaggttatctgcaacacttccacttccgggtcgtctggcacaacggttccgttcctctcacggatcaatagcgaagtggtgaacatctctcttccagatggtaagaaactatatggagtagttcacatcaaaggtccagtgacatcgttgggttgctctagtagtagtagtagcagtcaagtatccgaaatgtcattgccgaatttgaacgtcacaggcaggggaagtccatatttcctcactgatgagaactgcctcgtgatggttggttgtggtacaaaggctttgatgaaggatatagaatcagagatcttgggttgtgaatcgagctgtgaagatagcaagagtagtgaagaagtaacaaactcgaaatgtgacggttacaaatgctgccaggcgagaataccgttggagcgtcctcaggttattggtatcaatatagaaaacactagtgccacaagagggaaagaagggtgtagtgttgcgttcttgactaacaaaaggtatgcgccgatgaatgttaccgagccagaacaattccatgctggtggctacgcagtggttgagctaggttggtactttgatacatcggattcacgctataggaaccccttaggttgtagaaacatgacgcggtacagttcttacagctcctttgataaatgtagttgtgagtatgattacttttctgggatgagttataggatttgctattgcaactatggctacacagggaacccataccttcgacatggctgcatagacatagacgaatgtgaaggacaccacaattgtggagaagggacttgtgtgaacatgcctggaacacatagctgcgagcccaagataacgaaaccggaaaaagcctctgtgcttcaaggtgttcttataagtctaggagtgctgcttttcgtccttggaatcttggggttgtacaaattcattaagaagcgaacgaggatcatccgcaacaaaaactttttcaaacgtaatggtggcttgctgttgaaacaacaactaattacaaagaacggaaatgttgatatgtcaaggatatttagctcaaaagagttgaagaaagctactgataacttcagcatgaacagggtgcttgggcaagggggtcaaggaactgtgtacaagggaatgttggcggaagggagaatcgttgcggttaaaagatcgaaagttgtgggtgaaggcaagatggaagagttcatcaatgaagtcgtacttctctcacaaattaaccataggaacattgtgaaactcttgggatgttgtctagagactgaagttcctgtcttggtttacgaatatattcctaatggagatctgttcaagcgtcttcatgaaaaatctgaatccaatgattacacgatgacttgggaagtacgtcttcgtatagctatagagatagcgggagctctttcatacatgcactcagctgcatcgattccaatataccacagagatatcaagactaccaatatactattagatgaaaaatatagagccaaagtatctgatttcggaacttcaagatccataaccattgctcaaactcatctaacaacgttagttgcaggcacttttgggtatatggatccggagtactttttatcaagccaatatactgacaagagcgatgtttacagtttcggggtggtcttggtggagctcataaccggagaaaaaccactgtcaaggaagaggattggcaactgatttccttgaggccatgaaagagaacagagtgattgacacaattgatattcggatcaaaggagaaagcaagctgtgccaagtgatggcagtcgcaaaactcgctcgaaagtgtcttagcaggaaagggagaaagcggccaaacatgagagaggtttcatttgagctggagaggatccgttcttcatcacctgaagatttagaggtccatgttagaaatgttgatgcagaggaacaaatcatggaaatcaacagagaacgattttgagggtatgtacatgagtgacaagatccattctttatgttaaactagaagttgcccacaaatatgcctttaattgctttcaaaatacgaattaaatacgatgataacttgtagttaaagtctcaacttgatatgtttatagataataaaattttagtg

SEQ ID NO: 37923 - protein, 656 aa, Arabidopsis thaliana
  peptide (1)..(656): Ceres Seq. ID no. 13497069
IAVWNSDDSRTGRSMKKTKTYQVFCIAALSVLTLQLINGSSAATPPPPNSNSSTSCNRACGGVSIPFPFGIGKDCYLNGWYEVICNTSTSGSSGTTVPFLSRINSEVVNISLPDGKKLYGVVHIKGPVTSLGCSSSSSSSQVSEMSLPNLNVTGRGSPYFLTDENCLVMVGCGTKALMKDIESEILGCESSCEDSKSSEEVTNSKCDGYKCCQARIPLERPQVIGINIENTSATRGKEGCSVAFLTNKRYAPMNVTEPEQFHAGGYAVVELGWYFDTSDSRYRNPLGCRNMTRYSSYSSFDKCSCEYDYFSGMSYRICYCNYGYTGNPYLRHGCIDIDECEGHHNCGEGTCVNMPGTHSCEPKITKPEKASVLQGVLISLGVLLFVLGILGLYKFIKKRTRIIRNKNFFKRNGGLLLKQQLITKNGNVDMSRIFSSKELKKATDNFSMNRVLGQGGQGTVYKGMLAEGRIVAVKRSKVVGEGKMEEFINEVVLLSQINHRNIVKLLGCCLETEVPVLVYEYIPNGDLFKRLHEKSESNDYTMTWEVRLRIAIEIAGALSYMHSAASIPIYHRDIKTTNILLDEKYRAKVSDFGTSRSITIAQTHLTTLVAGTFGYMDPEYFLSSQYTDKSDVYSFGVVLVELITGEKPLSRKRIGN

SEQ ID NO: 37924 - protein, 642 aa, Arabidopsis thaliana
  peptide (1)..(642): Ceres Seq. ID no. 13497070
MKKTKTYQVFCIAALSVLTLQLINGSSAATPPPPNSNSSTSCNRACGGVSIPFPFGIGKDCYLNGWYEVICNTSTSGSSGTTVPFLSRINSEVVNISLPDGKKLYGVVHIKGPVTSLGCSSSSSSSQVSEMSLPNLNVTGRGSPYFLTDENCLVMVGCGTKALMKDIESEILGCESSCEDSKSSEEVTNSKCDGYKCCQARIPLERPQVIGINIENTSATRGKEGCSVAFLTNKRYAPMNVTEPEQFHAGGYAVVELGWYFDTSDSRYRNPLGCRNMTRYSSYSSFDKCSCEYDYFSGMSYRICYCNYGYTGNPYLRHGCIDIDECEGHHNCGEGTCVNMPGTHSCEPKITKPEKASVLQGVLISLGVLLFVLGILGLYKFIKKRTRIIRNKNFFKRNGGLLLKQQLITKNGNVDMSRIFSSKELKKATDNFSMNRVLGQGGQGTVYKGMLAEGRIVAVKRSKVVGEGKMEEFINEVVLLSQINHRNIVKLLGCCLETEVPVLVYEYIPNGDLFKRLHEKSESNDYTMTWEVRLRIAIEIAGALSYMHSAASIPIYHRDIKTTNILLDEKYRAKVSDFGTSRSITIAQTHLTTLVAGTFGYMDPEYFLSSQYTDKSDVYSFGVVLVELITGEKPLSRKRIGN

SEQ ID NO: 37925 - protein, 512 aa, Arabidopsis thaliana
  peptide (1)..(512): Ceres Seq. ID no. 13497071
MSLPNLNVTGRGSPYFLTDENCLVMVGCGTKALMKDIESEILGCESSCEDSKSSEEVTNSKCDGYKCCQARIPLERPQVIGINIENTSATRGKEGCSVAFLTNKRYAPMNVTEPEQFHAGGYAVVELGWYFDTSDSRYRNPLGCRNMTRYSSYSSFDKCSCEYDYFSGMSYRICYCNYGYTGNPYLRHGCIDIDECEGHHNCGEGTCVNMPGTHSCEPKITKPEKASVLQGVLISLGVLLFVLGILGLYKFIKKRTRIIRNKNFFKRNGGLLLKQQLITKNGNVDMSRIFSSKELKKATDNFSMNRVLGQGGQGTVYKGMLAEGRIVAVKRSKVVGEGKMEEFINEVVLLSQINHRNIVKLLGCCLETEVPVLVYEYIPNGDLFKRLHEKSESNDYTMTWEVRLRIAIEIAGALSYMHSAASIPIYHRDIKTTNILLDEKYRAKVSDFGTSRSITIAQTHLTTLVAGTFGYMDPEYFLSSQYTDKSDVYSFGVVLVELITGEKPLSRKRIGN

SEQ ID NO: 37926 - DNA, 672 bp, Arabidopsis thaliana
  misc_feature (1)..(672): Ceres Seq. ID no. 12326318
  misc_feature (1)..(672): Ortholog of  Ceres SEQ ID NO 12614157 as cited in SEQ ID NO 67965
atcaaaataaaaggaaaaaaaaaaaaaatctttgagatgagacttgttctctctggtgcctcttctttcacctccaaccttttttgttcctcccaacaggtcaatggaagaggaaaagaactgaaaaacccaatttctctaaaccacaacaaagatttggactttctgttaaagaagttagctccgccactcacggcggttttacttgctgtttcacccatctgtttccctccagaatctcttgggcagactttggatatacagagaggagctacattgtttaatagagcttgtatcgggtgtcatgatacaggtggaaacattattcaaccgggtgcaacgcttttcacaaaagacctcgaaagaaatggagttgatactgaggaagaaatatatcgtgttacctactttggaaagggaagaatgccgggatttggtgagaaatgcacaccgagaggacaatgtacctttggaccgcggttgcaggacgaagaaatcaagcttctcgctgaatttgtaaagtttcaagctgaccaaggctggccaactgtatctaccgactagcaactaggcgttcgtcttgtgagcgtttttgtaatccaattaatccatagggttgtatctacttacacttataactattccttctgggaggtttcattgcaattgctc

SEQ ID NO: 37927 - protein, 187 aa, Arabidopsis thaliana
  peptide (1)..(187): Ceres Seq. ID no. 12326319
IKIKGKKKKIFEMRLVLSGASSFTSNLFCSSQQVNGRGKELKNPISLNHNKDLDFLLKKLAPPLTAVLLAVSPICFPPESLGQTLDIQRGATLFNRACIGCHDTGGNIIQPGATLFTKDLERNGVDTEEEIYRVTYFGKGRMPGFGEKCTPRGQCTFGPRLQDEEIKLLAEFVKFQADQGWPTVSTD

SEQ ID NO: 37928 - protein, 175 aa, Arabidopsis thaliana
  peptide (1)..(175): Ceres Seq. ID no. 12326320
MRLVLSGASSFTSNLFCSSQQVNGRGKELKNPISLNHNKDLDFLLKKLAPPLTAVLLAVSPICFPPESLGQTLDIQRGATLFNRACIGCHDTGGNIIQPGATLFTKDLERNGVDTEEEIYRVTYFGKGRMPGFGEKCTPRGQCTFGPRLQDEEIKLLAEFVKFQADQGWPTVSTD

SEQ ID NO: 37929 - DNA, 1704 bp, Arabidopsis thaliana; identical to SEQ ID NO: 21904
  misc_feature (1)..(1704): Ceres Seq. ID no. 12321264
  misc_feature (1)..(1704): Ortholog of  Ceres SEQ ID NO 13590739 as cited in SEQ ID NO 66960

SEQ ID NO: 37930 - protein, 438 aa, Arabidopsis thaliana; identical to SEQ ID NO: 21905
  peptide (1)..(438): Ceres Seq. ID no. 12321265

SEQ ID NO: 37931 - DNA, 766 bp, Arabidopsis thaliana
  misc_feature (1)..(766): Ceres Seq. ID no. 12370152
  misc_feature (1)..(766): Ortholog of  Ceres SEQ ID NO 15176803 as cited in SEQ ID NO 52778
atggccggtgaacaaaaaaaaaaaaaaaaaagccaaaggagcattggtatctcaaacaatatttgccctttctctatctctctctcatcactatttgccatctctttctctctccctctctttcaaatgtcaataaaccaatactcaagcgatttccactaccattctctcatgtggcaacaacagcagcaacaacaacaacaccaaaacgacgtcgtggaagaaaaagaagctcttttcgagaaacccttaaccccaagtgacgtcggaaaactcaaccgcctcgtcatcccaaaacagcacgccgagagatacttcccactagcggccgccgccgcagacgccgtggagaaaggacttctcctctgctttgaggacgaggaaggtaaaccatggagattcagatactcgtactggaacagtagccagagttatgtcttgaccaaaggctggagcagatacgtcaaggagaagcaccttgacgccggagacgtcgttctcttccatcgacaccgttcagacggcggaagattcttcattggctggagaagacgcggtgactcttcttcctcctccgactcttatcgccatgttcaatccaatgcctcgctccaatattatcctcatgcaggtaccctttttatttaattaaacttttttttgtgtcataaccaaaaaaatttgaacctaaattcagattaatcttgaacaaaaaatgtcgaatatctttgacatttaaaggtgtagtgaaacacaatagtttttc

SEQ ID NO: 37932 - protein, 215 aa, Arabidopsis thaliana
  peptide (1)..(215): Ceres Seq. ID no. 12370153
MAGEQKKKKKSQRSIGISNNICPFSISLSSLFAISFSLPLFQMSINQYSSDFHYHSLMWQQQQQQQQHQNDVVEEKEALFEKPLTPSDVGKLNRLVIPKQHAERYFPLAAAAADAVEKGLLLCFEDEEGKPWRFRYSYWNSSQSYVLTKGWSRYVKEKHLDAGDVVLFHRHRSDGGRFFIGWRRRGDSSSSSDSYRHVQSNASLQYYPHAGTLFI

SEQ ID NO: 37933 - protein, 173 aa, Arabidopsis thaliana
  peptide (1)..(173): Ceres Seq. ID no. 12370154
MSINQYSSDFHYHSLMWQQQQQQQQHQNDVVEEKEALFEKPLTPSDVGKLNRLVIPKQHAERYFPLAAAAADAVEKGLLLCFEDEEGKPWRFRYSYWNSSQSYVLTKGWSRYVKEKHLDAGDVVLFHRHRSDGGRFFIGWRRRGDSSSSSDSYRHVQSNASLQYYPHAGTLFI

SEQ ID NO: 37934 - protein, 158 aa, Arabidopsis thaliana
  peptide (1)..(158): Ceres Seq. ID no. 12370155
MWQQQQQQQQHQNDVVEEKEALFEKPLTPSDVGKLNRLVIPKQHAERYFPLAAAAADAVEKGLLLCFEDEEGKPWRFRYSYWNSSQSYVLTKGWSRYVKEKHLDAGDVVLFHRHRSDGGRFFIGWRRRGDSSSSSDSYRHVQSNASLQYYPHAGTLFI

SEQ ID NO: 37935 - DNA, 618 bp, Arabidopsis thaliana
  misc_feature (1)..(618): Ceres Seq. ID no. 13592989
  misc_feature (1)..(618): Ortholog of  Ceres SEQ ID NO 12557737 as cited in SEQ ID NO 81
cccactctgtgcattaggtttcattttagcggcagacgagagagctaaagcaaggagcaaccctaaccatggcgactcaaccagctactgaatctgtgcaatgcttcggaaggaagaagaccgcagtggccgtcactcactgcaagcgtggatctggtttgatcaagctcaacggttgcccaatcgagcttttccagcctgagatcctccgattcaagatcttcgagccggttcttctcctcggaaagcaccgtttcgctggtgtgaacatgaggatccgtgtcaacggtggtggtcacacatcccaggtttacgccatccgtcagagtatcgcgaaggctcttgttgcgtactaccagaagtatgtggatgagcagtcgaagaaggagattaaggatatcttggtgaggtatgataggactctgcttgtggcggatccgaggaggtgtgagactctttagattttataatttctgctttattatgcttgttggattatggtgattctccaagaaacttatgttttgttatgtctactattttcttatttttatttcattgtcttgttggtatttactctcaaaaaaaaaaaaaaaaaagcttatcgataccgtcgac

SEQ ID NO: 37936 - protein, 130 aa, Arabidopsis thaliana
  peptide (1)..(130): Ceres Seq. ID no. 13592990
MATQPATESVQCFGRKKTAVAVTHCKRGSGLIKLNGCPIELFQPEILRFKIFEPVLLLGKHRFAGVNMRIRVNGGGHTSQVYAIRQSIAKALVAYYQKYVDEQSKKEIKDILVRYDRTLLVADPRRCETL

SEQ ID NO: 37937 - DNA, 798 bp, Arabidopsis thaliana
  misc_feature (1)..(798): Ceres Seq. ID no. 12341925
  misc_feature (1)..(798): Ortholog of  Ceres SEQ ID NO 13658584 as cited in SEQ ID NO 66428
  misc_feature (1)..(798): Ortholog of  Ceres SEQ ID NO 13596269 as cited in SEQ ID NO 67972
attgcaaccatttctctgctgtttcttcgtcgtttagcttcagaggacgacaatacgctgtgtgtgtgggtgtgagtttcttaagagaagtcagaaacaatgattgggttgtttaaagtaaaggaaaagcaaagagaacaagctcaaaatgctactagaggaggagcttctgttaagaagcaatctgctggcgaacttcgtcttcacaaagatatatcagagttgaaccttcctagctcttgttcaatatcttttccaaatggcaaagatgatttgatgaactttgaagtatccattaaacctgatgatggatattaccacaatggtacgtttgttttcacattccaagtctctcctgtgtatccacatgaagctccaaaagttaaatgcaaaaccaaggtttatcatcccaatatcgatttggaaggaaacgtttgcctgaacatcttgcgtgaagattggaaacctgttcttaacattaacacagttatctacggactcttccatctgttcacggaacccaattctgaagatcccttgaaccatgatgctgcagcagttttgagggataacccaaagctctttgagaccaatgttcgcagggccatgaccggtggatatgtcggtcagacctttttcccgcgttgtatctaacaaagctctggtttgtcttcttcaaggaaaaagataagaaccaaaccctttgtccgccattgtatttcttctctttctcaaggaccctcgtttgtttgtttgatcttgtaaaattacattccgcgttaaagtaaccctttcctt

SEQ ID NO: 37938 - protein, 184 aa, Arabidopsis thaliana; identical to SEQ ID NO: 21522
  peptide (1)..(184): Ceres Seq. ID no. 12341926

SEQ ID NO: 37939 - protein, 125 aa, Arabidopsis thaliana; identical to SEQ ID NO: 21523
  peptide (1)..(125): Ceres Seq. ID no. 12341927

SEQ ID NO: 37940 - DNA, 734 bp, Arabidopsis thaliana
  misc_feature (1)..(734): Ceres Seq. ID no. 12326850
  misc_feature (1)..(734): Ortholog of  Ceres SEQ ID NO 13599287 as cited in SEQ ID NO 338
aggttggttcctcgtgagagaaagtctttccctctaatttctctagagagacagagagagagagatagctagagatgggtgcttctgcttcggttcccgagagatccgtccatcaattcactgtaaaggatagctccggcaaggacctgaatatgagcatttaccaagggaaagtcctcctcatcgtcaatgttgcttccaaatgcggtttcaccgaaacaaactatacacagctcaccgaactttaccggaaatacaaggaccaagattttgagatcttggcattcccttgcaaccagtttctataccaggagcccggcacaagtcaagaggctcatgaatttgcctgcgaacgctttaaggccgaataccctgttttccaaaaggtacgcgtaaacggtcaaaacgcagcaccaatctataaattccttaaggcaagtaaacccacctttctgggttccagaattaagtggaacttcaccaagttcttggtcggcaaagatggcttagtgattgatcgttatggcacgatggttacaccgctatcaatcgagaaagacatcaagaaagctcttgaagacgcttgaaaacaacagacgagattgccaattaacaatcacggttaattttgtaatgtaaattgcagcttttatgtcgaaatttctttttggacatgtttctctgtttagtgtataaaaaaagaattccttttggaagagtaggttgctgttttc

SEQ ID NO: 37941 - protein, 170 aa, Arabidopsis thaliana
  peptide (1)..(170): Ceres Seq. ID no. 12326851
MGASASVPERSVHQFTVKDSSGKDLNMSIYQGKVLLIVNVASKCGFTETNYTQLTELYRKYKDQDFEILAFPCNQFLYQEPGTSQEAHEFACERFKAEYPVFQKVRVNGQNAAPIYKFLKASKPTFLGSRIKWNFTKFLVGKDGLVIDRYGTMVTPLSIEKDIKKALEDA

SEQ ID NO: 37942 - protein, 144 aa, Arabidopsis thaliana
  peptide (1)..(144): Ceres Seq. ID no. 12326852
MSIYQGKVLLIVNVASKCGFTETNYTQLTELYRKYKDQDFEILAFPCNQFLYQEPGTSQEAHEFACERFKAEYPVFQKVRVNGQNAAPIYKFLKASKPTFLGSRIKWNFTKFLVGKDGLVIDRYGTMVTPLSIEKDIKKALEDA

SEQ ID NO: 37943 - DNA, 885 bp, Arabidopsis thaliana; identical to SEQ ID NO: 35877
  misc_feature (1)..(885): Ceres Seq. ID no. 13492248
  misc_feature (1)..(885): Ortholog of  Ceres SEQ ID NO 12557831 as cited in SEQ ID NO 58
  misc_feature (1)..(885): Ortholog of  Ceres SEQ ID NO 13638808 as cited in SEQ ID NO 51951
  misc_feature (1)..(885): Ortholog of  Ceres SEQ ID NO 12637454 as cited in SEQ ID NO 0

SEQ ID NO: 37944 - protein, 167 aa, Arabidopsis thaliana; identical to SEQ ID NO: 35878
  peptide (1)..(167): Ceres Seq. ID no. 13492249

SEQ ID NO: 37945 - protein, 125 aa, Arabidopsis thaliana; identical to SEQ ID NO: 35879
  peptide (1)..(125): Ceres Seq. ID no. 13492250

SEQ ID NO: 37946 - protein, 109 aa, Arabidopsis thaliana; identical to SEQ ID NO: 35880
  peptide (1)..(109): Ceres Seq. ID no. 13492251

SEQ ID NO: 37947 - DNA, 1572 bp, Arabidopsis thaliana
  misc_feature (1)..(1572): Ceres Seq. ID no. 12339826
  misc_feature (1)..(1572): Ortholog of  Ceres SEQ ID NO 14314280 as cited in SEQ ID NO 57429
  misc_feature (1)..(1572): Ortholog of  Ceres SEQ ID NO 13595870 as cited in SEQ ID NO 62101
  misc_feature (1)..(1572): Ortholog of  Ceres SEQ ID NO 13590241 as cited in SEQ ID NO 63878
  misc_feature (1)..(1572): Ortholog of  Ceres SEQ ID NO 13657939 as cited in SEQ ID NO 66349
acaagagtacaagagagaaagaaaggaacctcgaactcagagaaattgagagaagagagaagaatcatgggacaaggaccatcgggaggattgaatcggcaaggagatcggaaacctgatggtggagataagaaagagaagaagtttgagccggcggcaccaccggctcgtgtagggaggaagcaaaggaagcagaaagggccagaggcggcggcgagacttccgacggtgactccgtctactaagtgtaagctccggttactgaaattggaacggatcaaggattatttgttgatggaggaagagtttgtggcgaatcaagagaggttgaaacctcaggaagagaaagctgaggaagatagatctaaggttgatgatcttcgtggtacacctatgagtgttgggaatttggaagagttgattgatgagaatcacgctattgtttcttcttctgttggacctgagtactacgttgggattttgtccttcgttgataaagatcagcttgaacctggatgttcgattttgatgcataataaggttctctctgttgttgggattctacaagatgaagtggatccaatggtgtctgtgatgaaagttgagaaagctcctttggagtcatatgctgatattggaggtttagaagctcagattcaggagattaaggaagctgttgagcttcctttgactcatcctgagttgtatgaagatattggtattaaaccaccaaagggtgtaattttgtatggtgagcctggaactgggaagacattgcttgctaaggcggttgcgaattcaacatcagctactttcttgagagttgttggtagtgagctgattcagaagtatttgggagatggtcctaagcttgtgagagaacttttcagagttgctgatgacctttcaccatcaatcgtcttcatagatgagattgatgctgttggtaccaagcggtatgacgctcactcaggaggtgaacgtgagatccaaagaactatgttggaacttctgaaccagcttgatggatttgattcaagaggagatgttaaggtcatccttgcaacaaacagaatcgagagtcttgacccagcactgcttcgacctggacggattgataggaaaatcgagttccctctcccagatatcaaaacaagaagacgtatcttccagatacacacatcgaagatgactctctcggaagatgtaaacctcgaagagtttgtgatgacgaaagacgagttctcaggagctgatataaaggctatatgcactgaggctggtctactagctctcagggagcgtcgtatgaaggtgacacatcctgatttcaagaaagcaaaggagaaggttatgttcaagaagaaagaaggcgtccctgaaggcctctacatgtaaaattataatcatatcgtcatcatcggctttcctcctccacactttgttataatacttttgcttctgcttaggatctttctggtcatataaattgatcatgttttctgatctcctccggtaaaacaattcctcatttccatttaggatgtctatttcgcattaaacttaaccaac

SEQ ID NO: 37948 - protein, 465 aa, Arabidopsis thaliana
  peptide (1)..(465): Ceres Seq. ID no. 12339827
TRVQERKKGTSNSEKLREERRIMGQGPSGGLNRQGDRKPDGGDKKEKKFEPAAPPARVGRKQRKQKGPEAAARLPTVTPSTKCKLRLLKLERIKDYLLMEEEFVANQERLKPQEEKAEEDRSKVDDLRGTPMSVGNLEELIDENHAIVSSSVGPEYYVGILSFVDKDQLEPGCSILMHNKVLSVVGILQDEVDPMVSVMKVEKAPLESYADIGGLEAQIQEIKEAVELPLTHPELYEDIGIKPPKGVILYGEPGTGKTLLAKAVANSTSATFLRVVGSELIQKYLGDGPKLVRELFRVADDLSPSIVFIDEIDAVGTKRYDAHSGGEREIQRTMLELLNQLDGFDSRGDVKVILATNRIESLDPALLRPGRIDRKIEFPLPDIKTRRRIFQIHTSKMTLSEDVNLEEFVMTKDEFSGADIKAICTEAGLLALRERRMKVTHPDFKKAKEKVMFKKKEGVPEGLYM

SEQ ID NO: 37949 - protein, 443 aa, Arabidopsis thaliana
  peptide (1)..(443): Ceres Seq. ID no. 12339828
MGQGPSGGLNRQGDRKPDGGDKKEKKFEPAAPPARVGRKQRKQKGPEAAARLPTVTPSTKCKLRLLKLERIKDYLLMEEEFVANQERLKPQEEKAEEDRSKVDDLRGTPMSVGNLEELIDENHAIVSSSVGPEYYVGILSFVDKDQLEPGCSILMHNKVLSVVGILQDEVDPMVSVMKVEKAPLESYADIGGLEAQIQEIKEAVELPLTHPELYEDIGIKPPKGVILYGEPGTGKTLLAKAVANSTSATFLRVVGSELIQKYLGDGPKLVRELFRVADDLSPSIVFIDEIDAVGTKRYDAHSGGEREIQRTMLELLNQLDGFDSRGDVKVILATNRIESLDPALLRPGRIDRKIEFPLPDIKTRRRIFQIHTSKMTLSEDVNLEEFVMTKDEFSGADIKAICTEAGLLALRERRMKVTHPDFKKAKEKVMFKKKEGVPEGLYM

SEQ ID NO: 37950 - protein, 367 aa, Arabidopsis thaliana
  peptide (1)..(367): Ceres Seq. ID no. 12339829
MEEEFVANQERLKPQEEKAEEDRSKVDDLRGTPMSVGNLEELIDENHAIVSSSVGPEYYVGILSFVDKDQLEPGCSILMHNKVLSVVGILQDEVDPMVSVMKVEKAPLESYADIGGLEAQIQEIKEAVELPLTHPELYEDIGIKPPKGVILYGEPGTGKTLLAKAVANSTSATFLRVVGSELIQKYLGDGPKLVRELFRVADDLSPSIVFIDEIDAVGTKRYDAHSGGEREIQRTMLELLNQLDGFDSRGDVKVILATNRIESLDPALLRPGRIDRKIEFPLPDIKTRRRIFQIHTSKMTLSEDVNLEEFVMTKDEFSGADIKAICTEAGLLALRERRMKVTHPDFKKAKEKVMFKKKEGVPEGLYM

SEQ ID NO: 37951 - DNA, 961 bp, Arabidopsis thaliana
  misc_feature (1)..(961): Ceres Seq. ID no. 13496987
  misc_feature (1)..(961): Ortholog of  Ceres SEQ ID NO 14303374 as cited in SEQ ID NO 54088
  misc_feature (1)..(961): Ortholog of  Ceres SEQ ID NO 13639250 as cited in SEQ ID NO 56555
  misc_feature (1)..(961): Ortholog of  Ceres SEQ ID NO 15177034 as cited in SEQ ID NO 60024
  misc_feature (1)..(961): Ortholog of  Ceres SEQ ID NO 13598257 as cited in SEQ ID NO 63008
  misc_feature (1)..(961): Ortholog of  Ceres SEQ ID NO 13597309 as cited in SEQ ID NO 63851
  misc_feature (1)..(961): Ortholog of  Ceres SEQ ID NO 12599167 as cited in SEQ ID NO 64443
atatttcttcccatcgtcactagtcacgaccacacaaacaaaaaaaatataacatttagagagagagaaaggtacagcagtggcaaactcgtaaataaagaatgtcaaaagattgcggtaaccacggtggtggcaaagaagtagtcgtccggaaactctgcgccgccataatcgccttcatcgtaatagttctaatcaccatcttcctagtttgggtcatactcaggcccactaaaccaagattcgtcctccaagacgccaccgtctacgccttcaacctctcgcaaccaaacctccttacttcaaacttccaagtcacaatcgcatctcgtaaccctaactccaagatcggaatctactacgaccgtctccacgtctacgctacatacatgaaccagcagatcactctacgtacggcgattcctccgacgtatcaaggccacaaagaagtcaacgtttggtctcctttcgtctacgggactgcggttcccatcgcaccttacaactccgtcgctttgggagaggagaaagatcgtggatttgtagggttgatgatacgcgccgatgggaccgtgaggtggaaagtgaggactttgatcaccggaaaatatcatatccatgttcggtgtcaggcgttcatcaatcttggaaacaaagctgctggtgttcttgtcggtgataacgccgttaagtacacgttggctaataaatgcagtgtgaacgtttagaaagtttgacggcgttaagttgctttttttcttgaaattcaccaaacttctttccaccaacaggatactatttctgtttctacatatctttaagatttcactactttttggttgttattaagcttattgttgattatagaattattacaatcacgaaggtcagtggttggatttaactgtaaatccactttataaagttgaaataaaatggaggattgggttttggttctttt

SEQ ID NO: 37952 - protein, 208 aa, Arabidopsis thaliana
  peptide (1)..(208): Ceres Seq. ID no. 13496988
MSKDCGNHGGGKEVVVRKLCAAIIAFIVIVLITIFLVWVILRPTKPRFVLQDATVYAFNLSQPNLLTSNFQVTIASRNPNSKIGIYYDRLHVYATYMNQQITLRTAIPPTYQGHKEVNVWSPFVYGTAVPIAPYNSVALGEEKDRGFVGLMIRADGTVRWKVRTLITGKYHIHVRCQAFINLGNKAAGVLVGDNAVKYTLANKCSVNV

SEQ ID NO: 37953 - protein, 112 aa, Arabidopsis thaliana
  peptide (1)..(112): Ceres Seq. ID no. 13496989
MNQQITLRTAIPPTYQGHKEVNVWSPFVYGTAVPIAPYNSVALGEEKDRGFVGLMIRADGTVRWKVRTLITGKYHIHVRCQAFINLGNKAAGVLVGDNAVKYTLANKCSVNV

SEQ ID NO: 37954 - DNA, 834 bp, Arabidopsis thaliana; identical to SEQ ID NO: 24929
  misc_feature (1)..(834): Ceres Seq. ID no. 12488276
  misc_feature (1)..(834): Ortholog of  Ceres SEQ ID NO 12592832 as cited in SEQ ID NO 62031

SEQ ID NO: 37955 - protein, 198 aa, Arabidopsis thaliana; identical to SEQ ID NO: 24930
  peptide (1)..(198): Ceres Seq. ID no. 12488277

SEQ ID NO: 37956 - protein, 117 aa, Arabidopsis thaliana; identical to SEQ ID NO: 24931
  peptide (1)..(117): Ceres Seq. ID no. 12488278

SEQ ID NO: 37957 - DNA, 629 bp, Arabidopsis thaliana
  misc_feature (1)..(629): Ceres Seq. ID no. 12384479
  misc_feature (1)..(629): Ortholog of  Ceres SEQ ID NO 13584363 as cited in SEQ ID NO 64285
acacatcggttagggttttagtttctcttaccgagattcaaatggcgcttagaggagtttggcagctcaagaaactcgttgtgagctactgtaattggggtggtagcagtagaggcatcagagcctttatggaatcagaattgcctgctctaaaggagaaaaacccgcagctcgaagtaattaccgagctttcacggggacaacatccttatttgaagggcatttacaggaatagaaatgaaagggtagtgtgtgtgaagaacatggatcctgaagaagtgcttttgaatgcaacgaggctgaggaactcgcttggacggaaagtggttaaactgaggacccgacatgtcaccaaacaccccagtgttcaaggcacctggacaactgctgtcaaattctgagactttcctgctaaattgtttgcaggttttcatcttctagctgttaaatcgaatgttgcaagtatcaggattggtcgtttatctgtattgcaaccccaagttgtttgtaccgtctgtgacttgggacaaagatgtagtcttcaaatgttttgcagtttttgcaatgtttgaattttgtcttgtccttctggttgagtctataataagattacacaagggtttaaggtt

SEQ ID NO: 37958 - protein, 132 aa, Arabidopsis thaliana
  peptide (1)..(132): Ceres Seq. ID no. 12384480
TSVRVLVSLTEIQMALRGVWQLKKLVVSYCNWGGSSRGIRAFMESELPALKEKNPQLEVITELSRGQHPYLKGIYRNRNERVVCVKNMDPEEVLLNATRLRNSLGRKVVKLRTRHVTKHPSVQGTWTTAVKF

SEQ ID NO: 37959 - protein, 119 aa, Arabidopsis thaliana
  peptide (1)..(119): Ceres Seq. ID no. 12384481
MALRGVWQLKKLVVSYCNWGGSSRGIRAFMESELPALKEKNPQLEVITELSRGQHPYLKGIYRNRNERVVCVKNMDPEEVLLNATRLRNSLGRKVVKLRTRHVTKHPSVQGTWTTAVKF

SEQ ID NO: 37960 - protein, 90 aa, Arabidopsis thaliana
  peptide (1)..(90): Ceres Seq. ID no. 12384482
MESELPALKEKNPQLEVITELSRGQHPYLKGIYRNRNERVVCVKNMDPEEVLLNATRLRNSLGRKVVKLRTRHVTKHPSVQGTWTTAVKF

SEQ ID NO: 37961 - DNA, 1035 bp, Arabidopsis thaliana
  misc_feature (1)..(1035): Ceres Seq. ID no. 13488831
  misc_feature (1)..(1035): Ortholog of  Ceres SEQ ID NO 14309495 as cited in SEQ ID NO 0
gcttgaaaatgaaatctggtttaaatagtttctctgtttggtttttctgttttaattaatttacgggcaatggaagcattgagagcgtcctacggcgactcttcatcggattccgataccgatgatctttctccggcgagtcccgttactgcaaattctggagagaaagattcgatttccttgcctcctccaccgcttgcgcttctcgattccattgtatccacaggttcactggatttcttctcaacagagcctggagttcgtgtaagaaactttcctcatgtcgatggaaattacgctttgcacgtttacgtacctgtttgtatacctccactgccaaagaaggagattgtatgttttttaaagaaggttgcatcagttgttcctcatcttcatttggtagaggctgatgtgccactcagcattctatgcaaggatgatcagaagtttgagcgtgccttggggagagagttccacataagcttaggaagaaacgttccactacgtgttcatcagattaactcggtgatttctatgcttcggcaaaagcttcagttgcagaagagatacttgatagatttcaataagtgggaagtctttgtgaatgatgaccatactcgctctttcctttctttggaaatcactacttcaggactatccgagataagtaagcaaattgatgctgttaatgaagtttacaagctccacaatctgccggagttctacaaggatccgcggccgcatatatccttggtctgggcgttgggtgatattagaacttccctaaagggagctgttgacgtggaacttaggaagcttagagcaggtggttgtgtgcagaatcgtatcttcacctctaagttttgtgggatcgagtgtaagataggaaacaaaacacacaaaatatgtaaactcccagatgaataagaaaatctcaaatttctgtgtttgcagaccaatcaggtatgcatttgtaacgacatagaaggatgagttgatctgtgttcttgggtattccataatatatgtctcttc

SEQ ID NO: 37962 - protein, 285 aa, Arabidopsis thaliana
  peptide (1)..(285): Ceres Seq. ID no. 13488832
MEALRASYGDSSSDSDTDDLSPASPVTANSGEKDSISLPPPPLALLDSIVSTGSLDFFSTEPGVRVRNFPHVDGNYALHVYVPVCIPPLPKKEIVCFLKKVASVVPHLHLVEADVPLSILCKDDQKFERALGREFHISLGRNVPLRVHQINSVISMLRQKLQLQKRYLIDFNKWEVFVNDDHTRSFLSLEITTSGLSEISKQIDAVNEVYKLHNLPEFYKDPRPHISLVWALGDIRTSLKGAVDVELRKLRAGGCVQNRIFTSKFCGIECKIGNKTHKICKLPDE

SEQ ID NO: 37963 - DNA, 1889 bp, Arabidopsis thaliana
  misc_feature (1)..(1889): Ceres Seq. ID no. 13491619
  misc_feature (1)..(1889): Ortholog of  Ceres SEQ ID NO 13594080 as cited in SEQ ID NO 55001
  misc_feature (1)..(1889): Ortholog of  Ceres SEQ ID NO 13587495 as cited in SEQ ID NO 0
gatatgtgtgatatctctttgtcccccatctattaatctcctcctccgcatcgtcgccgtgcacttccccacctcttccggcggatatgatgagcattgtatcaagtcatcatcactgtcaacaatctgttatacacgaacgtagcggtataggaacaatatctaaggtttcttgttcgagatattgcggtccgtgtttctctggacgactggctttctctcatagcctctgcttgaagactacttatgggaaaactgataggagaaagttttcaagaatttgcagtattgtggatgatgaggggaatctagataattcggatgacgaggaaaaggaatcactcgatgataaaactaaaagggtatgtatgagaaatctataagctttgtaaactccggccattttttgctgtcctctaaggtgaagtcatgacttgacctttaagaactgagacttggtttccctgtgctttatacactagaattatattaaacagtcaatgtggttttaatccttgttgtacatgaaagcctcaaactctctagttcgtgagattacttagaatgttgatctactcctgcttgatcctggaaaaagtgcgtaactaatttgatttcttgagtccttttgatgtctaaatgtttgtccatctctgtcatggcttagtgacacagcaagtaaacaagcgttttgtttaaatttattggttgcttgatatcatctaatcatttagaattactttttttttctttttctttagcaagcgaatgatatgaatcgggctaatcttgaaagaatggttgggtcagatgattctgcatttaacggcttagatcttgcaaccctcatcagacagaagtatggaaaatcttatgatgttcaactcatcaagaaggtatgcccttctgtattcaagtgtgtttgtgattctgtatcgtagaaagaagttaagacctccaatcatcttcatttcattgcatgaatacagaatcagcttttacgaaattcagttgatcattttccttttcattttgagatttttggtgtgagctttattttatcaatgtggaaagatttgtcgctttagaagctaaaaatataaatcatagttcttagatgtgattaatgtaggagttcatggggaagaatcttcttgcaatgaatgtcatgtggaagtacagagaacaggtaagagaatcctttgctgtatacttgatcacagaagcctaatgatatgatagttcaattgattttagtgtacttgtttggactttagataattatgatcttcgttttccatatcattcagatttggtatgagaatctttgccacatagaaagatgaagtgtatatccatattttgttggtatagttcttgcttttgcaagtcaatccttgtaagctaattcacctttatatatttcttgcttcttcttcaacgcctagaggtcttttcctctaaccgaagaagaatatatacttagacttgacgatgtagccaacatgttgaaatgctggggagcagtctcacatatccgtagcagcctagcaaagtcgaaggagcgacctcggatagggaaggctgtcagcattttcatagacatggattcgacagggggaagagcaaatgaatggatttacaagtaaaaatcgaccggtttgcagctgctaaaccaagaaatcaaaaggttttgtctctacgtttatcgtcatcaattcattttgaaggctcttcagtgatggttgcctgcagaaaccgaggtttttgctatatttgatgtccaaatcaggtagtatatatgtacatgtgtgtattaagtagacacaaatctttacttgaactctctgtgtaaaatatctccatgtgttgaaattcaatcatctttg

SEQ ID NO: 37964 - protein, 98 aa, Arabidopsis thaliana
  peptide (1)..(98): Ceres Seq. ID no. 13491620
MMSIVSSHHHCQQSVIHERSGIGTISKVSCSRYCGPCFSGRLAFSHSLCLKTTYGKTDRRKFSRICSIVDDEGNLDNSDDEEKESLDDKTKRVCMRNL

SEQ ID NO: 37965 - protein, 97 aa, Arabidopsis thaliana
  peptide (1)..(97): Ceres Seq. ID no. 13491621
MSIVSSHHHCQQSVIHERSGIGTISKVSCSRYCGPCFSGRLAFSHSLCLKTTYGKTDRRKFSRICSIVDDEGNLDNSDDEEKESLDDKTKRVCMRNL

SEQ ID NO: 37966 - protein, 62 aa, Arabidopsis thaliana
  peptide (1)..(62): Ceres Seq. ID no. 13491622
MENLMMFNSSRRYALLYSSVFVILYRRKKLRPPIIFISLHEYRISFYEIQLIIFLFILRFLV

SEQ ID NO: 37967 - DNA, 2238 bp, Arabidopsis thaliana
  misc_feature (1)..(2238): Ceres Seq. ID no. 12326863
  misc_feature (1)..(2238): Ortholog of  Ceres SEQ ID NO 13659394 as cited in SEQ ID NO 67049
atccactttttgtggctgcttactgttttcctcgaaagttccatttttttcttttgctctgcaaacgaaaaagaaccataaatttttctcatatttaaagctctctctttctctcacaactgtgttcacatgaactttctcaccgctttcttctcttcattgaacaaaaaaaaaagctcttaacttttttttcttctttaggtaaaatttgacaaaagctctcaactttcaaactctgtttcttcatcatcatcatcatcaccatggacgccctgcttcaagtttcagttgatgggtttagatttgagaacggatctggatcttgctgcaaacccagaaacaatctcgaatctgggaacaatctcttccctgatttccacgagtctcagaatcagtcttcaccaaacgattcacctccaacggtgtgtttggataactctcctgttctgaagtacatcaatgatatgttgatggacgaagaagacttcgtaggtatatctcgtgacgatttagctttacaagccgctgagagatccttctacgagataattcaacagcaatctccagaatctgatcagaacactagctcctcctccgatcaaaactccggtgaccaagatttctgttttcccagcacaacaacagattcatcagcgttggtttcgagcggagaatcacagagaaagtaccgtcatcggaatgatgaagaagatgatcttgagaacaatcggagaaacaaacaaccagcgatatttgtctcggagatggaagagttagcagtgaagttagaacatgtgttgttggtatgcaaaacgaaccaagaagaagaagaagaaagaacagtaataacgaaacagagtactccaaacagagcaggaagagcaaaaggttcatcgaacaaatcaaagacgcacaaaactaataccgttgatctacgaagtctcttgacgcaatgtgctcaagctgtagcgagctttgaccagagaagagctacagataaactcaaggagataagagcacactcttctagcaatggagatggaacacaaagactagctttttactttgcagaggcgcttgaggcacgtatcactggaaacatctcaccgcctgtttctaatccgtttccttcaagcacgacatcgatggtggacattttgaaagcgtacaagctgtttgttcatacttgtcccatctatgtaactgattacttcgctgcgaacaaatcgatttacgaacttgctatgaaagcaactaagcttcacatagttgattttggagttctctacggctttcaatggccttgtttgttacgagctctgtctaaacgaccgggcggaccaccaatgcttcgggtgactggaatcgagctgccacaagcgggttttcgtccttcagaccgcgttgaagagactggtcgaagactgaaaaggttctgcgatcagtttaatgttccttttgagttcaacttcatagccaaaaaatgggaaaccatcactcttgatgaacttatgatcaatccaggagagacaacggtcgtcaactgcattcatcggttacaatacactcctgatgaaactgtgtcattagactctccaagagacacggttctgaagctattcagagatatcaatcctgacctctttgtgtttgcagagattaacggaatgtacaactctcctttcttcatgacgaggttccgagaagcgctttttcattactcttcactctttgacatgtttgacaccacaatacacgcagaggatgagtacaaaaacaggtcactgttggagagagagttacttgtgagagacgcgatgagcgtgatttcctgcgagggtgcagagcggtttgcgaggcctgaaacctacaagcaatggcgagttaggattttgagagccgggtttaagccagcaactattagcaaacagatcatgaaggaggctaaggaaattgtgaggaaacgttaccatagagattttgtgatcgatagcgataacaattggatgcttcaaggatggaaaggaagagtcatctatgctttttcttgctggaaacctgctgagaagttcacaaacaataatttaaacatctgaaaaatgttacttctcaattacatcatttttgtttcccaatggttttgtagaatatgtttgatcccgtgagtggatgcaactcttttttcctgcaagtacatattgtattcaaatccttgtggaaatgataaattgtttaatc

SEQ ID NO: 37968 - protein, 610 aa, Arabidopsis thaliana
  peptide (1)..(610): Ceres Seq. ID no. 12326864
MDALLQVSVDGFRFENGSGSCCKPRNNLESGNNLFPDFHESQNQSSPNDSPPTVCLDNSPVLKYINDMLMDEEDFVGISRDDLALQAAERSFYEIIQQQSPESDQNTSSSSDQNSGDQDFCFPSTTTDSSALVSSGESQRKYRHRNDEEDDLENNRRNKQPAIFVSEMEELAVKLEHVLLVCKTNQEEEEERTVITKQSTPNRAGRAKGSSNKSKTHKTNTVDLRSLLTQCAQAVASFDQRRATDKLKEIRAHSSSNGDGTQRLAFYFAEALEARITGNISPPVSNPFPSSTTSMVDILKAYKLFVHTCPIYVTDYFAANKSIYELAMKATKLHIVDFGVLYGFQWPCLLRALSKRPGGPPMLRVTGIELPQAGFRPSDRVEETGRRLKRFCDQFNVPFEFNFIAKKWETITLDELMINPGETTVVNCIHRLQYTPDETVSLDSPRDTVLKLFRDINPDLFVFAEINGMYNSPFFMTRFREALFHYSSLFDMFDTTIHAEDEYKNRSLLERELLVRDAMSVISCEGAERFARPETYKQWRVRILRAGFKPATISKQIMKEAKEIVRKRYHRDFVIDSDNNWMLQGWKGRVIYAFSCWKPAEKFTNNNLNI

SEQ ID NO: 37969 - protein, 543 aa, Arabidopsis thaliana
  peptide (1)..(543): Ceres Seq. ID no. 12326865
MLMDEEDFVGISRDDLALQAAERSFYEIIQQQSPESDQNTSSSSDQNSGDQDFCFPSTTTDSSALVSSGESQRKYRHRNDEEDDLENNRRNKQPAIFVSEMEELAVKLEHVLLVCKTNQEEEEERTVITKQSTPNRAGRAKGSSNKSKTHKTNTVDLRSLLTQCAQAVASFDQRRATDKLKEIRAHSSSNGDGTQRLAFYFAEALEARITGNISPPVSNPFPSSTTSMVDILKAYKLFVHTCPIYVTDYFAANKSIYELAMKATKLHIVDFGVLYGFQWPCLLRALSKRPGGPPMLRVTGIELPQAGFRPSDRVEETGRRLKRFCDQFNVPFEFNFIAKKWETITLDELMINPGETTVVNCIHRLQYTPDETVSLDSPRDTVLKLFRDINPDLFVFAEINGMYNSPFFMTRFREALFHYSSLFDMFDTTIHAEDEYKNRSLLERELLVRDAMSVISCEGAERFARPETYKQWRVRILRAGFKPATISKQIMKEAKEIVRKRYHRDFVIDSDNNWMLQGWKGRVIYAFSCWKPAEKFTNNNLNI

SEQ ID NO: 37970 - protein, 541 aa, Arabidopsis thaliana
  peptide (1)..(541): Ceres Seq. ID no. 12326866
MDEEDFVGISRDDLALQAAERSFYEIIQQQSPESDQNTSSSSDQNSGDQDFCFPSTTTDSSALVSSGESQRKYRHRNDEEDDLENNRRNKQPAIFVSEMEELAVKLEHVLLVCKTNQEEEEERTVITKQSTPNRAGRAKGSSNKSKTHKTNTVDLRSLLTQCAQAVASFDQRRATDKLKEIRAHSSSNGDGTQRLAFYFAEALEARITGNISPPVSNPFPSSTTSMVDILKAYKLFVHTCPIYVTDYFAANKSIYELAMKATKLHIVDFGVLYGFQWPCLLRALSKRPGGPPMLRVTGIELPQAGFRPSDRVEETGRRLKRFCDQFNVPFEFNFIAKKWETITLDELMINPGETTVVNCIHRLQYTPDETVSLDSPRDTVLKLFRDINPDLFVFAEINGMYNSPFFMTRFREALFHYSSLFDMFDTTIHAEDEYKNRSLLERELLVRDAMSVISCEGAERFARPETYKQWRVRILRAGFKPATISKQIMKEAKEIVRKRYHRDFVIDSDNNWMLQGWKGRVIYAFSCWKPAEKFTNNNLNI

SEQ ID NO: 37971 - DNA, 1612 bp, Arabidopsis thaliana
  misc_feature (1)..(1612): Ceres Seq. ID no. 12329884
  misc_feature (1)..(1612): Ortholog of  Ceres SEQ ID NO 15170155 as cited in SEQ ID NO 64363
acgccgtgtcgtttctcatctcgccggtcaacttttgagagagagaagaagaaaaatgcatttgagtgagaatgaaggtgtcgaaggtaacaccttcgtggtcactggaggtcttggcttcgtcggtgcagctctctgcttagagctcgttcgtcgtggtgctcgccaagttcgctcttttgacctccgtcactcttctccttggtccgatgatctcaaaaacagtggcgttcgctgcattcaaggtgatgtgactaagaaacaagatgtggataacgctttagatggagcagactgtgttttgcatcttgcttcttatggtatgtctgggaaggagatgcttcggtttggtcgttgtgatgaggttaacatcaacgggacttgtaatgtcttggaagctgcgtttaaacatgagattacaagaattgtgtatgttagcacttacaatgttgtgtttggtggtaaagagattctcaatggtaatgaaggtttgccttatttccctcttgatgatcatgttgatgcatatagtcgaactaaatcgattgcagaacagttggttctcaagagtaatggtcgaccttttaagaatggaggcaaacggatgtatacatgtgcgattcgtccagcggctatatatggacctggcgaagataggcatcttcctaggattgttactctaacaaagttgggtttggctctcttcaagatcggtgaaccgagtgtcaaatcagactggatttatgtcgaaaaccttgtcctagcaatcatcttggcaagtatgggactcttggatgacattcctggcagagaaggacaacctgttgctgctggtcaaccatattttgtctctgacggttacccggtgaatacctttgagtttctgcgtcctttactaaaaagtttagactatgacctgcccaagtgtacaatctctgtaccttttgcgctgtccttgggtaagatcttccaaggtttctacactgtgctatatccatggctatcaaagagctggttaccacagccccttgttcttcctgctgaagtctacaaggtcggtgttacccattatttctcatatcttaaagccaaggaggagcttggatatgttccattcaagagctccaaggaaggtatggctgcaactatctcatactggcaggaaaggaagcggagatctttagacggtccaaccatgttcacttggatagctgttacaataggaatgtctgctctttttgctgccggatggttacccgacataggacctgtgcctttcttaagagccatacacctcttctttttccggacaatcacgattgtaaaggctgtcttcattgtagcagtggtactacatgttgcagaaggaatctatgcgtggtttctggctaaacgagtcgacccaggaaatgcaatggggtggttcttgcaaaccagcgctctcgggtttttctcaatgcggtttttattgaagagagcgaaagagcaccagatttaaacccagccttgttttgatgttgtaatcaaaaaaagttttacatgacttgaatgttttcaagattgaaaaacacaaaataaaagatctacattaatcaggatattccaatttctg

SEQ ID NO: 37972 - protein, 498 aa, Arabidopsis thaliana
  peptide (1)..(498): Ceres Seq. ID no. 12329885
RRVVSHLAGQLLRERRRKMHLSENEGVEGNTFVVTGGLGFVGAALCLELVRRGARQVRSFDLRHSSPWSDDLKNSGVRCIQGDVTKKQDVDNALDGADCVLHLASYGMSGKEMLRFGRCDEVNINGTCNVLEAAFKHEITRIVYVSTYNVVFGGKEILNGNEGLPYFPLDDHVDAYSRTKSIAEQLVLKSNGRPFKNGGKRMYTCAIRPAAIYGPGEDRHLPRIVTLTKLGLALFKIGEPSVKSDWIYVENLVLAIILASMGLLDDIPGREGQPVAAGQPYFVSDGYPVNTFEFLRPLLKSLDYDLPKCTISVPFALSLGKIFQGFYTVLYPWLSKSWLPQPLVLPAEVYKVGVTHYFSYLKAKEELGYVPFKSSKEGMAATISYWQERKRRSLDGPTMFTWIAVTIGMSALFAAGWLPDIGPVPFLRAIHLFFFRTITIVKAVFIVAVVLHVAEGIYAWFLAKRVDPGNAMGWFLQTSALGFFSMRFLLKRAKEHQI

SEQ ID NO: 37973 - protein, 480 aa, Arabidopsis thaliana
  peptide (1)..(480): Ceres Seq. ID no. 12329886
MHLSENEGVEGNTFVVTGGLGFVGAALCLELVRRGARQVRSFDLRHSSPWSDDLKNSGVRCIQGDVTKKQDVDNALDGADCVLHLASYGMSGKEMLRFGRCDEVNINGTCNVLEAAFKHEITRIVYVSTYNVVFGGKEILNGNEGLPYFPLDDHVDAYSRTKSIAEQLVLKSNGRPFKNGGKRMYTCAIRPAAIYGPGEDRHLPRIVTLTKLGLALFKIGEPSVKSDWIYVENLVLAIILASMGLLDDIPGREGQPVAAGQPYFVSDGYPVNTFEFLRPLLKSLDYDLPKCTISVPFALSLGKIFQGFYTVLYPWLSKSWLPQPLVLPAEVYKVGVTHYFSYLKAKEELGYVPFKSSKEGMAATISYWQERKRRSLDGPTMFTWIAVTIGMSALFAAGWLPDIGPVPFLRAIHLFFFRTITIVKAVFIVAVVLHVAEGIYAWFLAKRVDPGNAMGWFLQTSALGFFSMRFLLKRAKEHQI

SEQ ID NO: 37974 - protein, 391 aa, Arabidopsis thaliana
  peptide (1)..(391): Ceres Seq. ID no. 12329887
MSGKEMLRFGRCDEVNINGTCNVLEAAFKHEITRIVYVSTYNVVFGGKEILNGNEGLPYFPLDDHVDAYSRTKSIAEQLVLKSNGRPFKNGGKRMYTCAIRPAAIYGPGEDRHLPRIVTLTKLGLALFKIGEPSVKSDWIYVENLVLAIILASMGLLDDIPGREGQPVAAGQPYFVSDGYPVNTFEFLRPLLKSLDYDLPKCTISVPFALSLGKIFQGFYTVLYPWLSKSWLPQPLVLPAEVYKVGVTHYFSYLKAKEELGYVPFKSSKEGMAATISYWQERKRRSLDGPTMFTWIAVTIGMSALFAAGWLPDIGPVPFLRAIHLFFFRTITIVKAVFIVAVVLHVAEGIYAWFLAKRVDPGNAMGWFLQTSALGFFSMRFLLKRAKEHQI

SEQ ID NO: 37975 - DNA, 713 bp, Arabidopsis thaliana
  misc_feature (1)..(713): Ceres Seq. ID no. 12384460
  misc_feature (1)..(713): Ortholog of  Ceres SEQ ID NO 13637939 as cited in SEQ ID NO 54930
aacgagtactttgtcacggacgacaacgtaggaatgctcaagttggccaaggaagctaactccatcttgtttgattaccggattccgccgatgggatgtgccggcgcantgcgaccgacagtccaatccaaatgaacggtcttccgatcagcatttacgcaccggagacagtcgggtgcgttgtggttgacgggaaaggacattgtgccgccgggacatccacgggtggtttaatgaacaagatgatgggaaggattggtgactcgccgctgataggagccgggacgtatgcgtcggagttttgtggtgtgtcgtgtaccggagaaggagaagccattataagagcaaccctagctcgtgatgtgtcagctgttatggagtataaaggacttaacctccaagaagcggttgattacgtcatcaagcatcgacttgacgaagggttcgctggactcattgctgtctcgaataaaggagaggtggtttgtggttttaactctaatgggatgttcaggggatgtgcaactgaggatggattcatggaggttgctatttgggagtgagaaatatttttagattaagaaaatgtcttactagtatttaatcagtcatcgctctattaatttggttattcattatcataaagctggagtagtaaatttagttctgtcgttatcaccagtcctatattgatttgtgtttaatgcggttcc

SEQ ID NO: 37976 - protein, 155 aa, Arabidopsis thaliana
  peptide (1)..(155): Ceres Seq. ID no. 12384461
  misc_feature (5)..(5): Xaa is any aa, unknown or other
MCRRXATDSPIQMNGLPISIYAPETVGCVVVDGKGHCAAGTSTGGLMNKMMGRIGDSPLIGAGTYASEFCGVSCTGEGEAIIRATLARDVSAVMEYKGLNLQEAVDYVIKHRLDEGFAGLIAVSNKGEVVCGFNSNGMFRGCATEDGFMEVAIWE

SEQ ID NO: 37977 - protein, 143 aa, Arabidopsis thaliana
  peptide (1)..(143): Ceres Seq. ID no. 12384462
MNGLPISIYAPETVGCVVVDGKGHCAAGTSTGGLMNKMMGRIGDSPLIGAGTYASEFCGVSCTGEGEAIIRATLARDVSAVMEYKGLNLQEAVDYVIKHRLDEGFAGLIAVSNKGEVVCGFNSNGMFRGCATEDGFMEVAIWE

SEQ ID NO: 37978 - protein, 109 aa, Arabidopsis thaliana
  peptide (1)..(109): Ceres Seq. ID no. 12384463
MNKMMGRIGDSPLIGAGTYASEFCGVSCTGEGEAIIRATLARDVSAVMEYKGLNLQEAVDYVIKHRLDEGFAGLIAVSNKGEVVCGFNSNGMFRGCATEDGFMEVAIWE

SEQ ID NO: 37979 - DNA, 907 bp, Arabidopsis thaliana
  misc_feature (1)..(907): Ceres Seq. ID no. 13646188
  misc_feature (1)..(907): Ortholog of  Ceres SEQ ID NO 12610031 as cited in SEQ ID NO 55811
  misc_feature (1)..(907): Ortholog of  Ceres SEQ ID NO 12610896 as cited in SEQ ID NO 55861
  misc_feature (1)..(907): Ortholog of  Ceres SEQ ID NO 12619664 as cited in SEQ ID NO 66048
  misc_feature (1)..(907): Ortholog of  Ceres SEQ ID NO 12635952 as cited in SEQ ID NO 0
agaaattaaacaagtgtatctatatcgtatatatggactgcttacagatggtgttcaagttatttccaaactggaaacgtgaggcagaagttaaaaagctcgttgcaggttacaaggttcatggcgatcctttctccaccaacacaaggcgtgtcctcgctgttctccatgagaaaagactctcttacgagcctattaccgtcaaattgcaaaccggtgaacacaaaaccgaacctttcctctctctcaacccatttggtcaagtccctgtttttgaggatggaagtgttaagctgtatgaatcccgagccatcacacaatacatcgcatatgttcatagctcaagaggcacacagcttctgaatcttagaagtcacgagacaatggcaactctaacaatgtggatggaaatcgaagctcatcagtttgatccacccgcatcgaaactcacttgggaacaagtcattaagcctatctacggtctagagactgaccaaacaatcgtcaaagagaacgaggctattctagagaaagttctaaatatctacgagaaacgactcgaagaatctagattcttggcttgtaatagctttactttggttgatcttcatcacctaccaaacatacaataccttttgggaactccaacgaagaaattgttcgaaaaaagatctaaagtgcgtaagtgggtggatgagattacgagtagagaggcttggaaaatggcatgtgatcaagagaaatcttggtttaataagccaaggaactaactgaaagcagaagtaatctttacgtgtgaatgtgtgtgtatgtgtatgttgagtttgggtctttgtttgtaagcttgtgcgtgttgtttgttgccttgcgaatcttattttatgtttggttaatatatgtttcatgc

SEQ ID NO: 37980 - protein, 255 aa, Arabidopsis thaliana
  peptide (1)..(255): Ceres Seq. ID no. 13646189
KLNKCIYIVYMDCLQMVFKLFPNWKREAEVKKLVAGYKVHGDPFSTNTRRVLAVLHEKRLSYEPITVKLQTGEHKTEPFLSLNPFGQVPVFEDGSVKLYESRAITQYIAYVHSSRGTQLLNLRSHETMATLTMWMEIEAHQFDPPASKLTWEQVIKPIYGLETDQTIVKENEAILEKVLNIYEKRLEESRFLACNSFTLVDLHHLPNIQYLLGTPTKKLFEKRSKVRKWVDEITSREAWKMACDQEKSWFNKPRN

SEQ ID NO: 37981 - protein, 245 aa, Arabidopsis thaliana
  peptide (1)..(245): Ceres Seq. ID no. 13646190
MDCLQMVFKLFPNWKREAEVKKLVAGYKVHGDPFSTNTRRVLAVLHEKRLSYEPITVKLQTGEHKTEPFLSLNPFGQVPVFEDGSVKLYESRAITQYIAYVHSSRGTQLLNLRSHETMATLTMWMEIEAHQFDPPASKLTWEQVIKPIYGLETDQTIVKENEAILEKVLNIYEKRLEESRFLACNSFTLVDLHHLPNIQYLLGTPTKKLFEKRSKVRKWVDEITSREAWKMACDQEKSWFNKPRN

SEQ ID NO: 37982 - protein, 240 aa, Arabidopsis thaliana
  peptide (1)..(240): Ceres Seq. ID no. 13646191
MVFKLFPNWKREAEVKKLVAGYKVHGDPFSTNTRRVLAVLHEKRLSYEPITVKLQTGEHKTEPFLSLNPFGQVPVFEDGSVKLYESRAITQYIAYVHSSRGTQLLNLRSHETMATLTMWMEIEAHQFDPPASKLTWEQVIKPIYGLETDQTIVKENEAILEKVLNIYEKRLEESRFLACNSFTLVDLHHLPNIQYLLGTPTKKLFEKRSKVRKWVDEITSREAWKMACDQEKSWFNKPRN

SEQ ID NO: 37983 - DNA, 972 bp, Arabidopsis thaliana
  misc_feature (1)..(972): Ceres Seq. ID no. 12330362
  misc_feature (1)..(972): Ortholog of  Ceres SEQ ID NO 14311859 as cited in SEQ ID NO 51658
  misc_feature (1)..(972): Ortholog of  Ceres SEQ ID NO 13638685 as cited in SEQ ID NO 51871
  misc_feature (1)..(972): Ortholog of  Ceres SEQ ID NO 13599200 as cited in SEQ ID NO 0
aaaaaacggattcttgtgatattgagcgtcgtcttctcttccttagccaaagccagatctgcttctttttcgctgcgtcgtcgagaggtctctctttgaggaagctaattccttcttcttcttcaccatccgtttcaagaataacaatggaaggaagcggtggtgacagtggttcgatggctacgcctgtacaaaagaaagtacatgaggcatggagggtttaccaatattatctggacaagactacacctcattcaactaacaggtggatcggaacacttgttgtctttcttatctactgtttgagggtttactctattcacggattctacatcatctcctatggtcttggaatctacctcctgaatctgcttatcgggtttttgtctcctcttgttgatcctgagctcgaggtatctgatggagctactctgcctactcgaggttctgatgagttcaagccatttatccgccgtctcccggagtttaaattctggtactccatgactaaggcattctgcatagcctttcttatgacattcttctcggtgtttgatgttcccgtcttctggcccatactgctttgctactgggtcgttctctttgtcctcaccatgagacgccaaatagcccacatgatcaagcacaagtacattcctttcagcatcggaaaacagaaatatagcggccggaaatcttctgcgaacagcggcggcggctctcgtgctgattgatttcaacttgcagccacattttctgcagaaaaagaatgaaaaaaagttgggttttcacgttggaacgttttgtagtgatgaattactagtattgttatgcttctacaatgaagaagaaggaaacagaaaagggtcattagtttttatgttgcaggaatattgttctttgttagttccctttaatccaagtacctctgctgtaaatataattcaattttatttcgaaacaaattcattc

SEQ ID NO: 37984 - protein, 243 aa, Arabidopsis thaliana
  peptide (1)..(243): Ceres Seq. ID no. 12330363
KTDSCDIERRLLFLSQSQICFFFAASSRGLSLRKLIPSSSSPSVSRITMEGSGGDSGSMATPVQKKVHEAWRVYQYYLDKTTPHSTNRWIGTLVVFLIYCLRVYSIHGFYIISYGLGIYLLNLLIGFLSPLVDPELEVSDGATLPTRGSDEFKPFIRRLPEFKFWYSMTKAFCIAFLMTFFSVFDVPVFWPILLCYWVVLFVLTMRRQIAHMIKHKYIPFSIGKQKYSGRKSSANSGGGSRAD

SEQ ID NO: 37985 - protein, 195 aa, Arabidopsis thaliana
  peptide (1)..(195): Ceres Seq. ID no. 12330364
MEGSGGDSGSMATPVQKKVHEAWRVYQYYLDKTTPHSTNRWIGTLVVFLIYCLRVYSIHGFYIISYGLGIYLLNLLIGFLSPLVDPELEVSDGATLPTRGSDEFKPFIRRLPEFKFWYSMTKAFCIAFLMTFFSVFDVPVFWPILLCYWVVLFVLTMRRQIAHMIKHKYIPFSIGKQKYSGRKSSANSGGGSRAD

SEQ ID NO: 37986 - protein, 185 aa, Arabidopsis thaliana
  peptide (1)..(185): Ceres Seq. ID no. 12330365
MATPVQKKVHEAWRVYQYYLDKTTPHSTNRWIGTLVVFLIYCLRVYSIHGFYIISYGLGIYLLNLLIGFLSPLVDPELEVSDGATLPTRGSDEFKPFIRRLPEFKFWYSMTKAFCIAFLMTFFSVFDVPVFWPILLCYWVVLFVLTMRRQIAHMIKHKYIPFSIGKQKYSGRKSSANSGGGSRAD

SEQ ID NO: 37987 - DNA, 1842 bp, Arabidopsis thaliana; identical to SEQ ID NO: 37427
  misc_feature (1)..(1842): Ceres Seq. ID no. 13509651
  misc_feature (1)..(1842): Ortholog of  Ceres SEQ ID NO 15226493 as cited in SEQ ID NO 59078

SEQ ID NO: 37988 - protein, 497 aa, Arabidopsis thaliana; identical to SEQ ID NO: 37428
  peptide (1)..(497): Ceres Seq. ID no. 13509652

SEQ ID NO: 37989 - protein, 495 aa, Arabidopsis thaliana; identical to SEQ ID NO: 37429
  peptide (1)..(495): Ceres Seq. ID no. 13509653

SEQ ID NO: 37990 - protein, 492 aa, Arabidopsis thaliana; identical to SEQ ID NO: 37430
  peptide (1)..(492): Ceres Seq. ID no. 13509654

SEQ ID NO: 37991 - DNA, 883 bp, Arabidopsis thaliana
  misc_feature (1)..(883): Ceres Seq. ID no. 12560092
  misc_feature (1)..(883): Ortholog of  Ceres SEQ ID NO 15180555 as cited in SEQ ID NO 1214
agaaccctttcttctctctctctctctccctaaaatcaatctatcttttttttaaccattgcgtttctttttttccctttccgagcagatctgagccgaaggttaactacatgaccggcgctgagaacggcgtgagaatgacgtcaccagagacgtcttcaacatcttccctcgccaccacaagtgtccacgtaagcgctctcgacggactcgtgaacgtgaactctctcttcaccatcgccgtcttcgttggtctttccttagcgactccaggacaacacagcctcgaacaacgatccagctgcgacgcaagtgctgacgtcgccaagaagctactggtcttcgaagtcgtctccttcagcttcttcctcttctcctctcttgtagctcagggtcttaagcttgccttaaaccttcttaatagcaaagacgtcaacgagattttcagagctcacatcaatatcaaggttttgagatggggaatgatggcttctgctgtcggatctgtaatgggctgtctcttcttgatgctctctatggttaatgtgattcagatccgtcttggtttgctctcttgcggcagcaaatcggcggctcaagctgttgcaacgctcgtcactctggtttcctctgctctgctgatttacatctctaccgccatttacgctttctggcattgatgctatgtcaaaattggataatgtccatggctttgttttgattagccaatgtgtaatttcatcatcaatgccttccaatctagttttttgtttttttgtttcggagaatgaagaatcaatcacaagatacagaacattggattatgagaatttgatgttaagcttttatgaacagaaatgaagcattatgtttgttgtttggt

SEQ ID NO: 37992 - protein, 225 aa, Arabidopsis thaliana
  peptide (1)..(225): Ceres Seq. ID no. 12560093
NPFFSLSLSLKSIYLFFNHCVSFFPFPSRSEPKVNYMTGAENGVRMTSPETSSTSSLATTSVHVSALDGLVNVNSLFTIAVFVGLSLATPGQHSLEQRSSCDASADVAKKLLVFEVVSFSFFLFSSLVAQGLKLALNLLNSKDVNEIFRAHINIKVLRWGMMASAVGSVMGCLFLMLSMVNVIQIRLGLLSCGSKSAAQAVATLVTLVSSALLIYISTAIYAFWH

SEQ ID NO: 37993 - protein, 189 aa, Arabidopsis thaliana; identical to SEQ ID NO: 37106
  peptide (1)..(189): Ceres Seq. ID no. 12560094

SEQ ID NO: 37994 - protein, 180 aa, Arabidopsis thaliana; identical to SEQ ID NO: 37107
  peptide (1)..(180): Ceres Seq. ID no. 12560095

SEQ ID NO: 37995 - DNA, 613 bp, Arabidopsis thaliana
  misc_feature (1)..(613): Ceres Seq. ID no. 12602584
  misc_feature (1)..(613): Ortholog of  Ceres SEQ ID NO 15174293 as cited in SEQ ID NO 0
atctctttcctcaatcggagtgagcgcaaaaaatcaaaaattcgccgagagcacaaaccctaatggcttctctctcaatggcttccgttaacgttagcttctgtcatcctttacgctcttcttctccaaaggtctcacttcgcagttccgttcatttcgcgacgagtctttcctcaagtcactccatttctgggcttcgcgctgttttgcctctgaagatttctacagttgcttcccccaattctcaaaagcttcattcttttaccgttttcgctcataagggctacaagatgaagacccacaaggcctcagcgaagcggttcagagtgacgggtagagggaagattgtgaggaggagatctggaaagcagcatttgttagctaagaagaacaacaagaggaaattacgtctatcgaaaatgacggaagtgaaccggagcgactatgacaacgtgatcggagctctgccctacttgaaagtcaatcgaaaggcgacttaagcagagcaggcttgatccttttcttacctgcaattctcattttgtaatctaaagttgtggtaatatccttttgtattgtgatataatttggtcaatgagttgatttttgtttc

SEQ ID NO: 37996 - protein, 145 aa, Arabidopsis thaliana
  peptide (1)..(145): Ceres Seq. ID no. 12602585
MASLSMASVNVSFCHPLRSSSPKVSLRSSVHFATSLSSSHSISGLRAVLPLKISTVASPNSQKLHSFTVFAHKGYKMKTHKASAKRFRVTGRGKIVRRRSGKQHLLAKKNNKRKLRLSKMTEVNRSDYDNVIGALPYLKVNRKAT

SEQ ID NO: 37997 - protein, 140 aa, Arabidopsis thaliana
  peptide (1)..(140): Ceres Seq. ID no. 12602586
MASVNVSFCHPLRSSSPKVSLRSSVHFATSLSSSHSISGLRAVLPLKISTVASPNSQKLHSFTVFAHKGYKMKTHKASAKRFRVTGRGKIVRRRSGKQHLLAKKNNKRKLRLSKMTEVNRSDYDNVIGALPYLKVNRKAT

SEQ ID NO: 37998 - DNA, 933 bp, Arabidopsis thaliana
  misc_feature (1)..(933): Ceres Seq. ID no. 12601209
  misc_feature (1)..(933): Ortholog of  Ceres SEQ ID NO 15226343 as cited in SEQ ID NO 61627
aaatctctctgtgtgatcccacttgtcatcctcctccacaacataaagcttgagaccataaccctttagcgttttcggctaaagctttcgctgactactacaacaatggcgtcctcatccctttcccctgctactcagcttggttctagcagaagtgctttgatggcgatgtcaagtgggttgtttgtgaagccaacgaagatgaatcatcaaatggttagaaaagagaagattggattgagaatttcttgtcaagcgtcgagtattccagcagacagagttccagatatggaaaagaggaagactttgaatcttcttcttcttggggctctttctctacctactggctacatgcttgtcccttacgctaccttctttgttcctcctggaaccggaggtggaggtggtggtactccagccaaggatgcccttggaaacgatgtagttgcagcggaatggcttaagactcatggtcccggtgaccgaaccttgacccaaggattaaagggagatccgacttacctagttgtagagaacgacaagactctagcgacatacggtatcaacgcagtgtgcactcatcttggatgtgttgtgccatggaacaaagctgagaacaagtttctatgtccttgccatggatcccaatacaacgcccaaggaagagtcgttagaggtccagccccattgtcgctagcgttggctcacgcggatatagatgaagctgggaaggttctttttgttccatgggtggaaactgacttcaggactggtgatgctccatggtggtcttaagactcttcaacaagaaaaagagaaagatttggtctttttgtgtaagacttgtttgaatgttcttataatgtataagctacatttcatcgcaattactctgtgaattcttgcctcttatatgaaatattatgttcattc

SEQ ID NO: 37999 - protein, 229 aa, Arabidopsis thaliana
  peptide (1)..(229): Ceres Seq. ID no. 12601210
MASSSLSPATQLGSSRSALMAMSSGLFVKPTKMNHQMVRKEKIGLRISCQASSIPADRVPDMEKRKTLNLLLLGALSLPTGYMLVPYATFFVPPGTGGGGGGTPAKDALGNDVVAAEWLKTHGPGDRTLTQGLKGDPTYLVVENDKTLATYGINAVCTHLGCVVPWNKAENKFLCPCHGSQYNAQGRVVRGPAPLSLALAHADIDEAGKVLFVPWVETDFRTGDAPWWS

SEQ ID NO: 38000 - protein, 210 aa, Arabidopsis thaliana
  peptide (1)..(210): Ceres Seq. ID no. 12601211
MAMSSGLFVKPTKMNHQMVRKEKIGLRISCQASSIPADRVPDMEKRKTLNLLLLGALSLPTGYMLVPYATFFVPPGTGGGGGGTPAKDALGNDVVAAEWLKTHGPGDRTLTQGLKGDPTYLVVENDKTLATYGINAVCTHLGCVVPWNKAENKFLCPCHGSQYNAQGRVVRGPAPLSLALAHADIDEAGKVLFVPWVETDFRTGDAPWWS

SEQ ID NO: 38001 - protein, 208 aa, Arabidopsis thaliana
  peptide (1)..(208): Ceres Seq. ID no. 12601212
MSSGLFVKPTKMNHQMVRKEKIGLRISCQASSIPADRVPDMEKRKTLNLLLLGALSLPTGYMLVPYATFFVPPGTGGGGGGTPAKDALGNDVVAAEWLKTHGPGDRTLTQGLKGDPTYLVVENDKTLATYGINAVCTHLGCVVPWNKAENKFLCPCHGSQYNAQGRVVRGPAPLSLALAHADIDEAGKVLFVPWVETDFRTGDAPWWS

SEQ ID NO: 38002 - DNA, 2235 bp, Arabidopsis thaliana
  misc_feature (1)..(2235): Ceres Seq. ID no. 12466389
  misc_feature (1)..(2235): Ortholog of  Ceres SEQ ID NO 14312180 as cited in SEQ ID NO 59480
atggtggatccctttttctcgtgcttcgagctccaataaacttttcttacatttttaatccatttttacgttgatatttttttataaaatttccaccaccttacaaaagattttagctttttgtgttactaattaaaatcagaacaaaagttgcaagtctttcatctctatgcacaaatggcgaaagagaacagtagtcatagccttgcagaagcaaagagaaagagactcacttggattctttgtgtaagtggactttgcatattgtcttatgttcttggatcttggcaaaccaacactgtcccaacttcttcctctgaggcttactcaagaatgggatgtgatgaaacatcaacaaccactcgggctcagactactcagactcaaacaaatccttcttctgacgatacttcttcctctttgtcttcctcagaaccagttgagttagatttcgaaagccatcacaaactcgagctgaagattacgaatcaaaccgtaaagtactttgagccatgtgacatgtctttgagtgagtacactccatgtgaagatcgagagagaggaagaagatttgataggaacatgatgaagtacagagagagacattgtccttctaaagatgagcttctttattgtctgattcctcctccaccaaactacaagattccattcaagtggcctcaaagtagagattatgcttggtacgacaacattccacacaaggagcttagtattgagaaagctatccagaactggattcaagtagaaggggaaagattcaggttccctggtggtggcacaatgtttccacgtggagctgatgcttacattgatgatattgctagactcattcctcttactgatggagccattagaacagctattgatacaggatgtggtgtggcgagttttggtgcatacttgttgaagagggatattgtggctatgtcatttgctccaagggacactcatgaagctcaagttcaatttgcgttggaacgtggagttcctgcgattatcgggattatgggatcaagaaggcttccttatccagctagagcttttgatcttgctcactgttctcgttgtttgattccttggtttcaaaatgatggtttgtacttgaccgaagtggaccgggttttaagaccgggcggttattggatcctttcgggtccaccgatcaactggaagaaatactggaaaggctgggaaagatcacaagaggatttgaagcaagagcaagattctatagaagatgcagcaagaagtctttgttggaagaaagttacagaaaagggtgatttatcaatttggcaaaagcctatcaatcacgttgagtgtaacaaactcaaacgagttcacaaaactcctcctctatgcagtaaatcagatttacccgattttgcttggtacaaagatttggaatcttgtgtaacaccattaccagaagcaaacagttcagacgaattcgcaggcggtgcattggaggattggccaaaccgagcttttgcggtgccacctaggataatcgggggaaccattccggacattaatgctgagaaattcagagaagacaatgaagtgtggaaggagagaatatcatattacaaacagataatgccagagctttcaagaggaagatttaggaacataatggacatgaatgcatacttgggaggatttgctgcggcaatgatgaaatatccatcttgggttatgaatgtggttcctgtggatgctgagaagcaaacgttaggggttatctttgaacgaggatttatagggacttatcaagattggtgtgaaggattctctacgtatccgagaacttatgatttgattcatgctggtggattgttcagcatttatgagaacaggtgtgatgttacattaatactacttgagatggatagaattttgagaccagaaggaaccgtggtgtttagagacactgtggaaatgttgacgaagatacaaagcataaccaatggaatgaggtggaagagtcggattttggatcatgagagaggtccttttaatcctgagaagatccttctcgctgtaaaatcctattggaccggtccttcttcttagctagttctagctttcttggaactctctactctaatctttttcttatcttgtgtgtctcatctttgttttatttttaattgtttgttttaaaagatttctatgattatataagaaaatacagggaggatcaacatcttc

SEQ ID NO: 38003 - protein, 639 aa, Arabidopsis thaliana
  peptide (1)..(639): Ceres Seq. ID no. 12466390
MAKENSSHSLAEAKRKRLTWILCVSGLCILSYVLGSWQTNTVPTSSSEAYSRMGCDETSTTTRAQTTQTQTNPSSDDTSSSLSSSEPVELDFESHHKLELKITNQTVKYFEPCDMSLSEYTPCEDRERGRRFDRNMMKYRERHCPSKDELLYCLIPPPPNYKIPFKWPQSRDYAWYDNIPHKELSIEKAIQNWIQVEGERFRFPGGGTMFPRGADAYIDDIARLIPLTDGAIRTAIDTGCGVASFGAYLLKRDIVAMSFAPRDTHEAQVQFALERGVPAIIGIMGSRRLPYPARAFDLAHCSRCLIPWFQNDGLYLTEVDRVLRPGGYWILSGPPINWKKYWKGWERSQEDLKQEQDSIEDAARSLCWKKVTEKGDLSIWQKPINHVECNKLKRVHKTPPLCSKSDLPDFAWYKDLESCVTPLPEANSSDEFAGGALEDWPNRAFAVPPRIIGGTIPDINAEKFREDNEVWKERISYYKQIMPELSRGRFRNIMDMNAYLGGFAAAMMKYPSWVMNVVPVDAEKQTLGVIFERGFIGTYQDWCEGFSTYPRTYDLIHAGGLFSIYENRCDVTLILLEMDRILRPEGTVVFRDTVEMLTKIQSITNGMRWKSRILDHERGPFNPEKILLAVKSYWTGPSS

SEQ ID NO: 38004 - protein, 587 aa, Arabidopsis thaliana
  peptide (1)..(587): Ceres Seq. ID no. 12466391
MGCDETSTTTRAQTTQTQTNPSSDDTSSSLSSSEPVELDFESHHKLELKITNQTVKYFEPCDMSLSEYTPCEDRERGRRFDRNMMKYRERHCPSKDELLYCLIPPPPNYKIPFKWPQSRDYAWYDNIPHKELSIEKAIQNWIQVEGERFRFPGGGTMFPRGADAYIDDIARLIPLTDGAIRTAIDTGCGVASFGAYLLKRDIVAMSFAPRDTHEAQVQFALERGVPAIIGIMGSRRLPYPARAFDLAHCSRCLIPWFQNDGLYLTEVDRVLRPGGYWILSGPPINWKKYWKGWERSQEDLKQEQDSIEDAARSLCWKKVTEKGDLSIWQKPINHVECNKLKRVHKTPPLCSKSDLPDFAWYKDLESCVTPLPEANSSDEFAGGALEDWPNRAFAVPPRIIGGTIPDINAEKFREDNEVWKERISYYKQIMPELSRGRFRNIMDMNAYLGGFAAAMMKYPSWVMNVVPVDAEKQTLGVIFERGFIGTYQDWCEGFSTYPRTYDLIHAGGLFSIYENRCDVTLILLEMDRILRPEGTVVFRDTVEMLTKIQSITNGMRWKSRILDHERGPFNPEKILLAVKSYWTGPSS

SEQ ID NO: 38005 - protein, 525 aa, Arabidopsis thaliana
  peptide (1)..(525): Ceres Seq. ID no. 12466392
MSLSEYTPCEDRERGRRFDRNMMKYRERHCPSKDELLYCLIPPPPNYKIPFKWPQSRDYAWYDNIPHKELSIEKAIQNWIQVEGERFRFPGGGTMFPRGADAYIDDIARLIPLTDGAIRTAIDTGCGVASFGAYLLKRDIVAMSFAPRDTHEAQVQFALERGVPAIIGIMGSRRLPYPARAFDLAHCSRCLIPWFQNDGLYLTEVDRVLRPGGYWILSGPPINWKKYWKGWERSQEDLKQEQDSIEDAARSLCWKKVTEKGDLSIWQKPINHVECNKLKRVHKTPPLCSKSDLPDFAWYKDLESCVTPLPEANSSDEFAGGALEDWPNRAFAVPPRIIGGTIPDINAEKFREDNEVWKERISYYKQIMPELSRGRFRNIMDMNAYLGGFAAAMMKYPSWVMNVVPVDAEKQTLGVIFERGFIGTYQDWCEGFSTYPRTYDLIHAGGLFSIYENRCDVTLILLEMDRILRPEGTVVFRDTVEMLTKIQSITNGMRWKSRILDHERGPFNPEKILLAVKSYWTGPSS

SEQ ID NO: 38006 - DNA, 940 bp, Arabidopsis thaliana
  misc_feature (1)..(940): Ceres Seq. ID no. 12327548
  misc_feature (1)..(940): Ortholog of  Ceres SEQ ID NO 13597546 as cited in SEQ ID NO 65017
  misc_feature (1)..(940): Ortholog of  Ceres SEQ ID NO 13654353 as cited in SEQ ID NO 68318
gttgtattcagtcacgtgaagaagctatccaggtgatgaaagacgttctcatgatgagaaaagagacgcgagagaagcaagaagacttccttaacacgcttctagaagaactggagaaagacggtagctttttcgaccaaggatcggctataaatctcatcttccttctggcgtttgccttgagagaaggtacctctagttgtactgctttggccgtgaagttcatatccaaagacccgaaagtgcttgcagagctcaagcgtgagcataaggcaattgtagacaacagaaaagataaggaagctggagttagctgggaagaatatagacacaacatgactttcaccaacatggttagcaatgaggtgcttcgcctagcaaacacgacccctttgttgtttcgaaaggcggtgcaagatgttgagatcaaaggatatacaattccggctggttggattgtggcggttgcaccttcagcggttcattttgatcctgcaatctatgagaacccatttgagtttaatccatggagatgggaggggaaagaaatgatttggggatctaaaacgttcatggcgtttggatatggagttagactttgtgtaggtgcagagttttcgcggcttcaaatggcaatcttcctccatcatcttgtggcatattacgatttctcaatggtccaagactccgagatcattcgttcaccattccatcaatacaccaaggatctgcttataaacatctctcagtctcctaccaagtgaaccatgcatgcagtttccaaatcttaataatcagatcattatatgcaataatctcatttcctgcttccgcaaaatctctggagtctttttatatgtaatatgcgatctctataatttttaaaaagtatctatcttgtcaaatgagttaaactttgtttatatatgtcttgaatctg

SEQ ID NO: 38007 - protein, 253 aa, Arabidopsis thaliana
  peptide (1)..(253): Ceres Seq. ID no. 12327549
CIQSREEAIQVMKDVLMMRKETREKQEDFLNTLLEELEKDGSFFDQGSAINLIFLLAFALREGTSSCTALAVKFISKDPKVLAELKREHKAIVDNRKDKEAGVSWEEYRHNMTFTNMVSNEVLRLANTTPLLFRKAVQDVEIKGYTIPAGWIVAVAPSAVHFDPAIYENPFEFNPWRWEGKEMIWGSKTFMAFGYGVRLCVGAEFSRLQMAIFLHHLVAYYDFSMVQDSEIIRSPFHQYTKDLLINISQSPTK

SEQ ID NO: 38008 - protein, 242 aa, Arabidopsis thaliana
  peptide (1)..(242): Ceres Seq. ID no. 12327550
MKDVLMMRKETREKQEDFLNTLLEELEKDGSFFDQGSAINLIFLLAFALREGTSSCTALAVKFISKDPKVLAELKREHKAIVDNRKDKEAGVSWEEYRHNMTFTNMVSNEVLRLANTTPLLFRKAVQDVEIKGYTIPAGWIVAVAPSAVHFDPAIYENPFEFNPWRWEGKEMIWGSKTFMAFGYGVRLCVGAEFSRLQMAIFLHHLVAYYDFSMVQDSEIIRSPFHQYTKDLLINISQSPTK

SEQ ID NO: 38009 - protein, 237 aa, Arabidopsis thaliana
  peptide (1)..(237): Ceres Seq. ID no. 12327551
MMRKETREKQEDFLNTLLEELEKDGSFFDQGSAINLIFLLAFALREGTSSCTALAVKFISKDPKVLAELKREHKAIVDNRKDKEAGVSWEEYRHNMTFTNMVSNEVLRLANTTPLLFRKAVQDVEIKGYTIPAGWIVAVAPSAVHFDPAIYENPFEFNPWRWEGKEMIWGSKTFMAFGYGVRLCVGAEFSRLQMAIFLHHLVAYYDFSMVQDSEIIRSPFHQYTKDLLINISQSPTK

SEQ ID NO: 38010 - DNA, 973 bp, Arabidopsis thaliana
  misc_feature (1)..(973): Ceres Seq. ID no. 13592713
  misc_feature (1)..(973): Ortholog of  Ceres SEQ ID NO 15227260 as cited in SEQ ID NO 69285
atcgaaaaataattctccgtcgagatcgcttctctccccgttgccgtccgtccccaccgctgagtgatagatcgaaacagagaaacacacacggcgaagaagatttcaccatattttgtctaagtggattctgttgagagagagagatggctatgtctcaggtggtgaacacgtacccgctttcgaactacagcttcggaactaaggaacccaagctggaaaaggacacctccgtcgccgaccggctcgctcgtatgaaaatcaactatatgaaagagggcatgaggactagcgttgaagggattctactggtgcaagaacacaaccatcctcatatacttctgctacaaattggtaacacattctgcaaacttccaggtggacgcctgaagcctggtgaaaatgaagctgatggtctgaaaagaaagctgaccagtaaacttggaggcaattcggctgctcttgtacctgactggacggtaggagaatgtgttgcgacatggtggcgtccaaactttgaaaccatgatgtacccgtattgccctcctcacatcacgaaaccaaaggaatgcaagagactctacattgttcacttgtctgagaaagagtactttgctgtgcccaaaaatttgaagctcttggccgtccctttgttcgaactctatgacaatgttcagagatatggaccggttatatcaaccattccgcagcagctatccagattccatttcaacatgattagttcgtgatttcgactcggtgtgttcaagaacaaggaacctatcagatgggtaagttacttaggtacggtagagagctgtagctaccggattagagatggggttttccaatgatgcgagttgggttttttgcattatagacttgttggcttttatgtagaaccggttcaaagtgtcagcacaaaaaacaaagattattgtatctcatttttaaaagcatttgtcattgtttg

SEQ ID NO: 38011 - protein, 200 aa, Arabidopsis thaliana
  peptide (1)..(200): Ceres Seq. ID no. 13592714
MAMSQVVNTYPLSNYSFGTKEPKLEKDTSVADRLARMKINYMKEGMRTSVEGILLVQEHNHPHILLLQIGNTFCKLPGGRLKPGENEADGLKRKLTSKLGGNSAALVPDWTVGECVATWWRPNFETMMYPYCPPHITKPKECKRLYIVHLSEKEYFAVPKNLKLLAVPLFELYDNVQRYGPVISTIPQQLSRFHFNMISS

SEQ ID NO: 38012 - protein, 198 aa, Arabidopsis thaliana
  peptide (1)..(198): Ceres Seq. ID no. 13592715
MSQVVNTYPLSNYSFGTKEPKLEKDTSVADRLARMKINYMKEGMRTSVEGILLVQEHNHPHILLLQIGNTFCKLPGGRLKPGENEADGLKRKLTSKLGGNSAALVPDWTVGECVATWWRPNFETMMYPYCPPHITKPKECKRLYIVHLSEKEYFAVPKNLKLLAVPLFELYDNVQRYGPVISTIPQQLSRFHFNMISS

SEQ ID NO: 38013 - protein, 164 aa, Arabidopsis thaliana
  peptide (1)..(164): Ceres Seq. ID no. 13592716
MKINYMKEGMRTSVEGILLVQEHNHPHILLLQIGNTFCKLPGGRLKPGENEADGLKRKLTSKLGGNSAALVPDWTVGECVATWWRPNFETMMYPYCPPHITKPKECKRLYIVHLSEKEYFAVPKNLKLLAVPLFELYDNVQRYGPVISTIPQQLSRFHFNMISS

SEQ ID NO: 38014 - DNA, 1065 bp, Arabidopsis thaliana
  misc_feature (1)..(1065): Ceres Seq. ID no. 13487967
  misc_feature (1)..(1065): Ortholog of  Ceres SEQ ID NO 14302082 as cited in SEQ ID NO 64529
agaagaaatctttcagatttgcgcatatcgacaattttccgagcggccagtttacgtattttgtttgtagttaacgtgtttcaaggactttgacaatggctgaggaagcgcataaggtaacattgaatgtctatgatttaagccaaggcttggcacgccagctctcacaatcactcctgggaaaggttattgaaggtgtatggcatacaggaatagttgtctatgggaatgagtacttttttggaggagggatacaacatttaccagttggaagaactccatatggaacaccaattcgaacgatagagttgggtctatcacatgtgcctaaagatgtattcgagatgtacttggaagaaatcagtcctcgttacactgctgaatcctacaatttacttactcacaactgcaacaacttcagcaacgaggtcgctcagtttttggtgggtaaagggattcctgactacattctccagcttcctaatgatgttctaaacagtcccatgggtggtcttataatgcctatgttgcaaggcctcgaaacaactctaaaggctggtgctgttcctcaagttccacagtttaggccacagccacaaccttttggagcttttagtaaagatgatggcccacaaattgtgatagctcctaagctcgaggcagcagaaacctcaactgcaactgagaaagtgccacctgttattcaaccatcagctagtaaagagaaggtcaaggacgacccgttgggtgatgctagggccaagattcaggaagagattacaagcgaatttgcagctctaatggcacaaggcacattacgagcaagtgaagcagctgctatggcgacaaaaagagtcatgcaaaagtacggacatctcaatgtaaacgcttagtgcaataacagagagatgaaacattttatttttactgtcttgaaactaagtccagaatcttgaacgatttcattacactattgccttcagctgtattatgttcaacgatctacaaattaattatcataaaagaggaaaagagcagtaaacaagagaaaaaaaaaaagatttt

SEQ ID NO: 38015 - protein, 265 aa, Arabidopsis thaliana
  peptide (1)..(265): Ceres Seq. ID no. 13487968
MAEEAHKVTLNVYDLSQGLARQLSQSLLGKVIEGVWHTGIVVYGNEYFFGGGIQHLPVGRTPYGTPIRTIELGLSHVPKDVFEMYLEEISPRYTAESYNLLTHNCNNFSNEVAQFLVGKGIPDYILQLPNDVLNSPMGGLIMPMLQGLETTLKAGAVPQVPQFRPQPQPFGAFSKDDGPQIVIAPKLEAAETSTATEKVPPVIQPSASKEKVKDDPLGDARAKIQEEITSEFAALMAQGTLRASEAAAMATKRVMQKYGHLNVNA

SEQ ID NO: 38016 - protein, 182 aa, Arabidopsis thaliana
  peptide (1)..(182): Ceres Seq. ID no. 13487969
MYLEEISPRYTAESYNLLTHNCNNFSNEVAQFLVGKGIPDYILQLPNDVLNSPMGGLIMPMLQGLETTLKAGAVPQVPQFRPQPQPFGAFSKDDGPQIVIAPKLEAAETSTATEKVPPVIQPSASKEKVKDDPLGDARAKIQEEITSEFAALMAQGTLRASEAAAMATKRVMQKYGHLNVNA

SEQ ID NO: 38017 - DNA, 1632 bp, Arabidopsis thaliana
  misc_feature (1)..(1632): Ceres Seq. ID no. 12385819
  misc_feature (1)..(1632): Ortholog of  Ceres SEQ ID NO 14315422 as cited in SEQ ID NO 59255
tcttctctctacacacacacacacacacacacacacaaaatggattcttcgaatgttgaagaaaacctaaacccagaaacaaaatccgcagaagaacaaaacccacttgccattttccattcttctctaccaatcgcatctctttctctgaccttgttcccatcctcgactcaatttctcaaattgtttgctcatcatccaaacaaggttaagatccctacgcaggcttcttctctcactcatctctctctttcttctgtctctccttttccttcttccagaatctctttcaaatccaccatcgctgctaaccctcttcaatcccctctctccatcgtccctcgtcgtcccgttgatccttcctccgccgccgctctccgccgtgctgctgtcgtctggttccgcaatgacctccgtgtccacgacaacgagtgtctcaactccgccaacgacgagtgcgtctccgttttgcccgtttactgcttcgaccctagagattacggcaagtcctcttccggcttcgacaaaacggggccttttcgtgcccagtttctgattgagtccgtttcggagctccggaagaatctccaagccagagggtcgaatctagttgtccgtgtcgggaaacctgaagctgttttggtggaattggctaaggagattggagctgacgcggtttatgctcacagagaagtgtctcacgacgaggttaaagcggaagggaagatagagaccgcgatgaaggaggaaggcgttgaagtcaagtatttctggggaagcactctctatcatttggatgatttgcccttcaaaattgaagacttgccgtcaaattacggagctttcaaggataaagtccagaaattggagattaggaagactatcgcagcgcttgatcaattgaaaagcttgccctctcgaggagacgttgagcttggcgatattccttctctcctggatcttggcattagccccactcctaggactagccaggaggggaaaccgacaatggttggaggagagacagaggcgttgactagactaaagagctttgccgcggattgtcaggctcggttgagcaagggaaaccagaaaggaggcaacaacagtgtctttggtgcaaacttctcttgcaagatatcaccttggttagccatgggaagcatctctcctcgttccatgttcgatgagctgaagaaaacaatctccgcatcaaccacctccacaactccaaggaacggaccgggagatacaggactcaactggttaatgtatgagttgctatggagggatttcttcaggtttataaccaagaaatacagctcagcgaagacgcaggtcgaggctggtccggctacagcctgtaccggtgcctttgcttaaacatttgaaaactttcaggtgaccggaaaagttagaagcgacctgtttctttgccctactctggtgtatggtgattaatttgctatccggacaggactttactgctctcttttgaaacttgagtgtcaggagaataaaatctaagcttctttttttggctcaatcaagttgtccgttccctgttctaaacatttcggatactcattccataaaaagtctctacaatttgagacgctctcctttgtggtc

SEQ ID NO: 38018 - protein, 460 aa, Arabidopsis thaliana
  peptide (1)..(460): Ceres Seq. ID no. 12385820
SSLYTHTHTHTHKMDSSNVEENLNPETKSAEEQNPLAIFHSSLPIASLSLTLFPSSTQFLKLFAHHPNKVKIPTQASSLTHLSLSSVSPFPSSRISFKSTIAANPLQSPLSIVPRRPVDPSSAAALRRAAVVWFRNDLRVHDNECLNSANDECVSVLPVYCFDPRDYGKSSSGFDKTGPFRAQFLIESVSELRKNLQARGSNLVVRVGKPEAVLVELAKEIGADAVYAHREVSHDEVKAEGKIETAMKEEGVEVKYFWGSTLYHLDDLPFKIEDLPSNYGAFKDKVQKLEIRKTIAALDQLKSLPSRGDVELGDIPSLLDLGISPTPRTSQEGKPTMVGGETEALTRLKSFAADCQARLSKGNQKGGNNSVFGANFSCKISPWLAMGSISPRSMFDELKKTISASTTSTTPRNGPGDTGLNWLMYELLWRDFFRFITKKYSSAKTQVEAGPATACTGAFA

SEQ ID NO: 38019 - protein, 447 aa, Arabidopsis thaliana; identical to SEQ ID NO: 22874
  peptide (1)..(447): Ceres Seq. ID no. 12385821

SEQ ID NO: 38020 - DNA, 1439 bp, Arabidopsis thaliana
  misc_feature (1)..(1439): Ceres Seq. ID no. 13621928
  misc_feature (1)..(1439): Ortholog of  Ceres SEQ ID NO 13655660 as cited in SEQ ID NO 63727
gttaccaaacctaatttgaagtattaaagccgttcccctgactaaaaacctttgaacactccgatccaaaaaaaagaagagaaaaacctttgcatacagctaaaaacgatgtcgtctctctctcgctttctccttcgtggcaacttcagcttcagcacccacacgaatcgccgcttcttctccgccgttaccgctgctgcagccacaccctcgccacccaaaccgtccctcatcaccctcgtaaatgacgaacgcgaccccaaattcatcacggagaagttcaagaaagcctgccaagcagagtggttccggaagaatatagctgtctatgagagaaccgttcgccgtctcgccgcagccaagaagtttgagtgggtcgaggagatcctggaggagcagaacaagtatccaaacatgtcaaaggaaggattcgtggcgaggattatcaatctctatggacgagtcggtatgtttgagaatgcacagaaagtgttcgacgaaatgcctgagagaaactgcaagagaacagcgttgtctttcaacgcattactgaatgcctgtgtgaactccaagaagtttgatttggttgaaggtatcttcaaggagttgccaggtaagctctcgattgaaccagatgttgcatcttacaatactttgatcaagggattgtgtggaaagggttccttcactgaagctgttgcgttgattgatgagattgagaacaagggtttgaaacctgatcatatcaccttcaatatacttttacatgagtcgtatacaaaagggaagtttgaggaaggagaacagatatgggctagaatggtagagaagaatgttaagcgagacatccgtagttacaatgctcggttgttaggactagccatggagaataaatcagaagagatggttagtctctttgacaaacttaagggtaatgagctcaaacctgatgttttcacattcactgccatgattaaaggatttgtcagtgaaggaaaattagatgaagccataacgtggtacaaggaaatcgagaagaatggttgtcgcccgttgaaatttgtctttaactcattgcttcctgcaatatgtaaggcgggcgatttagagtctgcttatgagctctgcaaggaaatatttgctaagcgtctgctagtcgatgaggctgtcctgcaggaggtagttgatgcattggtgaaagggtccaagcaagacgaagctgaagagattgtcgagctagcaaagacgaatgactatttgcagtgcaagcttcgtctctttcccaaagagtagttaattggcaaggcttattgactagtttttaatttagtctgtgtttccctctttttaatgtcttgttgcaaactgcgagtgcggtgatttaataattgaactatctctatctgtagtgtgtttgtgttgctttcaattctcaaagt

SEQ ID NO: 38021 - protein, 394 aa, Arabidopsis thaliana
  peptide (1)..(394): Ceres Seq. ID no. 13621929
MSSLSRFLLRGNFSFSTHTNRRFFSAVTAAAATPSPPKPSLITLVNDERDPKFITEKFKKACQAEWFRKNIAVYERTVRRLAAAKKFEWVEEILEEQNKYPNMSKEGFVARIINLYGRVGMFENAQKVFDEMPERNCKRTALSFNALLNACVNSKKFDLVEGIFKELPGKLSIEPDVASYNTLIKGLCGKGSFTEAVALIDEIENKGLKPDHITFNILLHESYTKGKFEEGEQIWARMVEKNVKRDIRSYNARLLGLAMENKSEEMVSLFDKLKGNELKPDVFTFTAMIKGFVSEGKLDEAITWYKEIEKNGCRPLKFVFNSLLPAICKAGDLESAYELCKEIFAKRLLVDEAVLQEVVDALVKGSKQDEAEEIVELAKTNDYLQCKLRLFPKE

SEQ ID NO: 38022 - protein, 292 aa, Arabidopsis thaliana
  peptide (1)..(292): Ceres Seq. ID no. 13621930
MSKEGFVARIINLYGRVGMFENAQKVFDEMPERNCKRTALSFNALLNACVNSKKFDLVEGIFKELPGKLSIEPDVASYNTLIKGLCGKGSFTEAVALIDEIENKGLKPDHITFNILLHESYTKGKFEEGEQIWARMVEKNVKRDIRSYNARLLGLAMENKSEEMVSLFDKLKGNELKPDVFTFTAMIKGFVSEGKLDEAITWYKEIEKNGCRPLKFVFNSLLPAICKAGDLESAYELCKEIFAKRLLVDEAVLQEVVDALVKGSKQDEAEEIVELAKTNDYLQCKLRLFPKE

SEQ ID NO: 38023 - protein, 274 aa, Arabidopsis thaliana
  peptide (1)..(274): Ceres Seq. ID no. 13621931
MFENAQKVFDEMPERNCKRTALSFNALLNACVNSKKFDLVEGIFKELPGKLSIEPDVASYNTLIKGLCGKGSFTEAVALIDEIENKGLKPDHITFNILLHESYTKGKFEEGEQIWARMVEKNVKRDIRSYNARLLGLAMENKSEEMVSLFDKLKGNELKPDVFTFTAMIKGFVSEGKLDEAITWYKEIEKNGCRPLKFVFNSLLPAICKAGDLESAYELCKEIFAKRLLVDEAVLQEVVDALVKGSKQDEAEEIVELAKTNDYLQCKLRLFPKE

SEQ ID NO: 38024 - DNA, 940 bp, Arabidopsis thaliana; identical to SEQ ID NO: 28735
  misc_feature (1)..(940): Ceres Seq. ID no. 12327087
  misc_feature (1)..(940): Ortholog of  Ceres SEQ ID NO 14308320 as cited in SEQ ID NO 59093
  misc_feature (1)..(940): Ortholog of  Ceres SEQ ID NO 12590628 as cited in SEQ ID NO 0

SEQ ID NO: 38025 - protein, 244 aa, Arabidopsis thaliana; identical to SEQ ID NO: 28736
  peptide (1)..(244): Ceres Seq. ID no. 12327088

SEQ ID NO: 38026 - protein, 141 aa, Arabidopsis thaliana; identical to SEQ ID NO: 28737
  peptide (1)..(141): Ceres Seq. ID no. 12327089

SEQ ID NO: 38027 - DNA, 987 bp, Arabidopsis thaliana
  misc_feature (1)..(987): Ceres Seq. ID no. 12326871
  misc_feature (1)..(987): Ortholog of  Ceres SEQ ID NO 15172070 as cited in SEQ ID NO 59663
aaaagaagacttttgtaaggaaataaacacacaactaaagagatgtcgtcaaccttgagcaacgaagagtcaggactcggtgattcaaatcgttcgacggaagtagatagcggcgacggaggaaacttcacggcttacgagtctcgattccagtcgcagcggtttgactcttccttctctaattttgactcccaaccggagaaagagtcagacttaccaggcggcgattcatctcctcgacccgaaactcaatctccgccgtcgataaatagtttcgatgatacaaacggttcgatcttgccgccaccatcggccatggagaaagaggaaggtttcgctcttagagagtggcgaaggctaaatgctctgagattggaagagaaagaaaaggaagagaaagaaatggttcaacaaattctagaagcagcagagcaatataaggctgagttctatagcaagcgtaacgttactattgaaaacaacaagaaactaaaccgcgagaaagagaagttttttttggagaatcaagaaaagttttacgctgaagctgacaaaaacaattggaaggcgattgcagaactcattcctcgtgaagtgccagttatagagaatagagggaacaagaagaaaacagcaaccataactgtaatccagggaccaaagccagggaagcccactgatctgtctcgtatgcgtcaagtgctcacgaaactcaagcacaatccgccaactcatatgaagccaaaactgccctcaccatctggagctgacccgaatgtgagtgtgagtgaacaggtcacagttacagagaagttgtagttgtgtatgtgacaagttaacttcttcttgattgatgttaaaccgtctttactttgttagcttccctcatgttcagtctcgactattgtttgttttgatttcgtctttggtcttaccattgttggtttcccacacagttttctactttgatgtatatataatatattc

SEQ ID NO: 38028 - protein, 258 aa, Arabidopsis thaliana
  peptide (1)..(258): Ceres Seq. ID no. 12326872
MSSTLSNEESGLGDSNRSTEVDSGDGGNFTAYESRFQSQRFDSSFSNFDSQPEKESDLPGGDSSPRPETQSPPSINSFDDTNGSILPPPSAMEKEEGFALREWRRLNALRLEEKEKEEKEMVQQILEAAEQYKAEFYSKRNVTIENNKKLNREKEKFFLENQEKFYAEADKNNWKAIAELIPREVPVIENRGNKKKTATITVIQGPKPGKPTDLSRMRQVLTKLKHNPPTHMKPKLPSPSGADPNVSVSEQVTVTEKL

SEQ ID NO: 38029 - protein, 167 aa, Arabidopsis thaliana
  peptide (1)..(167): Ceres Seq. ID no. 12326873
MEKEEGFALREWRRLNALRLEEKEKEEKEMVQQILEAAEQYKAEFYSKRNVTIENNKKLNREKEKFFLENQEKFYAEADKNNWKAIAELIPREVPVIENRGNKKKTATITVIQGPKPGKPTDLSRMRQVLTKLKHNPPTHMKPKLPSPSGADPNVSVSEQVTVTEKL

SEQ ID NO: 38030 - protein, 138 aa, Arabidopsis thaliana
  peptide (1)..(138): Ceres Seq. ID no. 12326874
MVQQILEAAEQYKAEFYSKRNVTIENNKKLNREKEKFFLENQEKFYAEADKNNWKAIAELIPREVPVIENRGNKKKTATITVIQGPKPGKPTDLSRMRQVLTKLKHNPPTHMKPKLPSPSGADPNVSVSEQVTVTEKL

SEQ ID NO: 38031 - DNA, 1356 bp, Arabidopsis thaliana; identical to SEQ ID NO: 30117
  misc_feature (1)..(1356): Ceres Seq. ID no. 13504985
  misc_feature (1)..(1356): Ortholog of  Ceres SEQ ID NO 12583469 as cited in SEQ ID NO 51031
  misc_feature (1)..(1356): Ortholog of  Ceres SEQ ID NO 13597389 as cited in SEQ ID NO 63426
  misc_feature (1)..(1356): Ortholog of  Ceres SEQ ID NO 15180463 as cited in SEQ ID NO 0

SEQ ID NO: 38032 - protein, 379 aa, Arabidopsis thaliana; identical to SEQ ID NO: 30118
  peptide (1)..(379): Ceres Seq. ID no. 13504986

SEQ ID NO: 38033 - protein, 294 aa, Arabidopsis thaliana; identical to SEQ ID NO: 30119
  peptide (1)..(294): Ceres Seq. ID no. 13504987

SEQ ID NO: 38034 - protein, 208 aa, Arabidopsis thaliana; identical to SEQ ID NO: 30120
  peptide (1)..(208): Ceres Seq. ID no. 13504988

SEQ ID NO: 38035 - DNA, 1171 bp, Arabidopsis thaliana
  misc_feature (1)..(1171): Ceres Seq. ID no. 12327829
  misc_feature (1)..(1171): Ortholog of  Ceres SEQ ID NO 14310358 as cited in SEQ ID NO 54582
  misc_feature (1)..(1171): Ortholog of  Ceres SEQ ID NO 15176085 as cited in SEQ ID NO 69305
aaacgaataaagaagtaactgtgaaagagcgaagaagagtcacacaaaaaaaacaatggcggaatcttcagagcctccggttgttctccttcaccgaccaccgtctctaactttcatggacgagattctgactcgtgaattccgtactctcatcaccgacacttcatcatcggaatcactcccgagcttcctcccccgtcacgcctcctccgccagagccttcgttatcaccggcagacttccggtaaccgaagaactcctttctcatctcccttctctccagatactcgtctgcactagcgtcggcatcgatcacatcgatctcgccgcatgcaagcgtcgcggcatcgttatcaccaacgctggcaacgcgttttccgatgacgttgctgattgtgccgtcggtttgcttattagtgttctccgtcgtattcctgcagccgatcgttacgtccgggctggtaattgggcgaaatttggggattttcaattagggtccaaggtaagtgggaagagagttgggatagttggattggggagcattggatcatttgttgctaaaagacttgaatcatttggctgtgttatctcttacaattcaaggagtcagaaacagagtagtccataccggttttactctgacattctctcgttagcagagaacaacgatgtacttgtcctctgctgctctttgacagacgaaacgcaccatattgtgaatagagaagtgatggagttgcttggtaaggatggggttgtgatcaatgtgggacgaggaaagttgattgatgagaaggagatggtcaagtgtttggttgacggtgtgattggtggtgctggtttagatgtgtttgagaatgaaccggcagttcctcaggagttgtttggtttggataatgtagtgttgtctcctcattttgctgtggctacaccagggtctttggacaatgttgcacagattgctttagctaacttgaaggcgtttttctcgaaccggcctttgctttctccggttcaattggattgagagagcgcccggtttgatcaggtagctaaattagttaagctattgtttattataatcaataattcaaaaagaaagtgtaatgaatatttgaatgtaccctgacattctctcccaaagaagaagaattaatgacgcatattattt

SEQ ID NO: 38036 - protein, 323 aa, Arabidopsis thaliana
  peptide (1)..(323): Ceres Seq. ID no. 12327830
MAESSEPPVVLLHRPPSLTFMDEILTREFRTLITDTSSSESLPSFLPRHASSARAFVITGRLPVTEELLSHLPSLQILVCTSVGIDHIDLAACKRRGIVITNAGNAFSDDVADCAVGLLISVLRRIPAADRYVRAGNWAKFGDFQLGSKVSGKRVGIVGLGSIGSFVAKRLESFGCVISYNSRSQKQSSPYRFYSDILSLAENNDVLVLCCSLTDETHHIVNREVMELLGKDGVVINVGRGKLIDEKEMVKCLVDGVIGGAGLDVFENEPAVPQELFGLDNVVLSPHFAVATPGSLDNVAQIALANLKAFFSNRPLLSPVQLD

SEQ ID NO: 38037 - protein, 303 aa, Arabidopsis thaliana
  peptide (1)..(303): Ceres Seq. ID no. 12327831
MDEILTREFRTLITDTSSSESLPSFLPRHASSARAFVITGRLPVTEELLSHLPSLQILVCTSVGIDHIDLAACKRRGIVITNAGNAFSDDVADCAVGLLISVLRRIPAADRYVRAGNWAKFGDFQLGSKVSGKRVGIVGLGSIGSFVAKRLESFGCVISYNSRSQKQSSPYRFYSDILSLAENNDVLVLCCSLTDETHHIVNREVMELLGKDGVVINVGRGKLIDEKEMVKCLVDGVIGGAGLDVFENEPAVPQELFGLDNVVLSPHFAVATPGSLDNVAQIALANLKAFFSNRPLLSPVQLD

SEQ ID NO: 38038 - DNA, 1014 bp, Arabidopsis thaliana
  misc_feature (1)..(1014): Ceres Seq. ID no. 12329789
  misc_feature (1)..(1014): Ortholog of  Ceres SEQ ID NO 12465955 as cited in SEQ ID NO 147
gtcactctccgttaattctaacggtcatgtcagacgccgtaaccaaaaccgtcgcccctctccgtcgtaaagctaatcctattaacggaaaacacactaacggcgtcaccatcgacggaatcttcgacgaccacaatcgccaaataggaccaataaatagccaaatggaagatattgctcagaaaactgatgacggtggaggaggagaatggacaagcaaagcgtcgtttatgacgtggacgatgcatgacataatttacgtggcgagacaccattggataccgtgtttattcgcggccggagttatgttttttacggttgtggagtacacgttccagatgactcctgcgagttctcagccgtttgatctaggatttgtggccacacgttatctgcataacatcttggcatcttcacccaatcttaacaccgttttagccgctttaaacacgattttggtagggatgcaaacaacgtatattggatgtacatgggcagtggaaggacgaccacgggcaaccatcgcggctttattcatgttcacttgtcgtggcattctcggctactctactcagctccctcgccctcaggaatttttaggatcaggagtagattatccggtcggaaacgtgtcgttcttcctcttctactcaggtcacgtcgccggatcgatgatcgcatcgttggacatgaagagaatgcagaggtttaggctggcgatgttttttgacattctcaatgtattgcaatccatcaggctgcttggtacgagaggacactacacgattgatattgcggttggagttggcgctgggattctctttgactcattggccgggaagtacaaagagatgagcaagagacatttacggaatactcgttgtagtttgatttcaaaagactctctagtcacttaaatctatttttttttccggcaaaataattgtatattacactaaatctatttcttcttaaaacgtttagaaacacatttagttgaagtttaatgatttc

SEQ ID NO: 38039 - protein, 304 aa, Arabidopsis thaliana
  peptide (1)..(304): Ceres Seq. ID no. 12329790
HSPLILTVMSDAVTKTVAPLRRKANPINGKHTNGVTIDGIFDDHNRQIGPINSQMEDIAQKTDDGGGGEWTSKASFMTWTMHDIIYVARHHWIPCLFAAGVMFFTVVEYTFQMTPASSQPFDLGFVATRYLHNILASSPNLNTVLAALNTILVGMQTTYIGCTWAVEGRPRATIAALFMFTCRGILGYSTQLPRPQEFLGSGVDYPVGNVSFFLFYSGHVAGSMIASLDMKRMQRFRLAMFFDILNVLQSIRLLGTRGHYTIDIAVGVGAGILFDSLAGKYKEMSKRHLRNTRCSLISKDSLVT

SEQ ID NO: 38040 - protein, 296 aa, Arabidopsis thaliana
  peptide (1)..(296): Ceres Seq. ID no. 12329791
MSDAVTKTVAPLRRKANPINGKHTNGVTIDGIFDDHNRQIGPINSQMEDIAQKTDDGGGGEWTSKASFMTWTMHDIIYVARHHWIPCLFAAGVMFFTVVEYTFQMTPASSQPFDLGFVATRYLHNILASSPNLNTVLAALNTILVGMQTTYIGCTWAVEGRPRATIAALFMFTCRGILGYSTQLPRPQEFLGSGVDYPVGNVSFFLFYSGHVAGSMIASLDMKRMQRFRLAMFFDILNVLQSIRLLGTRGHYTIDIAVGVGAGILFDSLAGKYKEMSKRHLRNTRCSLISKDSLVT

SEQ ID NO: 38041 - protein, 250 aa, Arabidopsis thaliana
  peptide (1)..(250): Ceres Seq. ID no. 12329792
MEDIAQKTDDGGGGEWTSKASFMTWTMHDIIYVARHHWIPCLFAAGVMFFTVVEYTFQMTPASSQPFDLGFVATRYLHNILASSPNLNTVLAALNTILVGMQTTYIGCTWAVEGRPRATIAALFMFTCRGILGYSTQLPRPQEFLGSGVDYPVGNVSFFLFYSGHVAGSMIASLDMKRMQRFRLAMFFDILNVLQSIRLLGTRGHYTIDIAVGVGAGILFDSLAGKYKEMSKRHLRNTRCSLISKDSLVT

SEQ ID NO: 38042 - DNA, 1982 bp, Arabidopsis thaliana
  misc_feature (1)..(1982): Ceres Seq. ID no. 12331159
  misc_feature (1)..(1982): Ortholog of  Ceres SEQ ID NO 15226493 as cited in SEQ ID NO 59078
gatccttgtcacaaaatgtcgcgtaattcttctactgatttcagctcaatcgctcaaattcgagtttgcgtttagaaattgaagttgactcttctgttcttgaatctatctccgatcggtgaactatctctcagtaccaggagattgatcactccttcgacattgctctttgaattcgtcctcaagggtattaatgagctcgtagaagctaccagaaatggcgtccatgagctctggtgatgaaagccttcgactttgcatgtttgatttgaggagaggtcaaactgaaggacaagagttagagaaaattttgttcttttatcctgccgatttagacttctcgacgcagttatcagtgatcgggctcagtgaagggcttattacttttactagacttttctctccggaggcggcttgtgaagtgatcgaagcagaaagacattcccatgttttctatgaggctgaacctgatatctggatggttatggttgtggagaaaaataaggagacaggagcgatatggaggatcgatgcattaaggagggtgcttaaagaagtgcactcactctttgtgatgtttcacgggtcaattagggcattaatcgaaaaagaaccaacaggagggcttacccgatcactattgtacccgttcatcacagattatttaagcacatttcaaatatggtctctctcggaagactgctgctgtgaattttttgttgggaagaaacttcagctaccaactttccgtgaaactttgagagagcgtggaactgttcaaatgcttactttagcaagggacactgcagttgaagttcagtctcttgttcaagtactagattcatgtgctgggagcttacgatgtcactctatgatcttatttcaagatcttttggtttcaacaaccctctcagctgatgataccgtcgacttgtttacatttgcggtaatgaggttgacctcaaaagctttctcctctgatacgagttcttggtcatatctacgtaaagggcctggttcatctgaaatctcttctagatctaatctggcacccgttggctcaattgattccctacactcaagaaacggtaataacatgcatcatgttattaggccactacaaaatgataagtggacaaaagggaaagatgggtttctaataaccgatatttggggtcttgagactggcggctcccctgattctgccatccctacaatttggcttcagcagacacaagaaagaatgtatctccttgcctatcagcataaaagtctcaccttacttcttctgatgcctacaaatgccattgtcaatggagatttaagcatctcagccgtgaaacagcaagttattgaagatgcatcactgagaattttgaaaattgaagagaatatttcaagagggtggggcggtgagaatgcttaccatattaagggttaccgttacttagtagttgataatgacacgaaagtatccagatcttctccttcaggaaaagtaacaacacttgcaaaggagtctctacttgcactaaacaagcttagagaagaagtggattcagaaaaaagccgtgcaaaaggacaggagaaagacatggaaatatgcatcagagctaagaacaatgtgtgggtgatcgcccgtgtgaccagaggcaaagagctttacatggctttggagaaaggcagcgacactcttcttgataccacagacgctgttggaagattcagcaacaggtattgcagcggagcattcttgatggactaagttttcgtgttctttcttctggttttgggaagagggttcttctagtttcaagtacgaagtgaaaagctcagaagaagtaatgagcacttctctctcagccattaattttgttttgtgagaaattgcagagaggaaaacgattgtgttcttagttggcctgtagatatgtaacaatgatattccacgttggatcagtgcaaacaaatccttttttgtg

SEQ ID NO: 38043 - protein, 515 aa, Arabidopsis thaliana
  peptide (1)..(515): Ceres Seq. ID no. 12331160
MASMSSGDESLRLCMFDLRRGQTEGQELEKILFFYPADLDFSTQLSVIGLSEGLITFTRLFSPEAACEVIEAERHSHVFYEAEPDIWMVMVVEKNKETGAIWRIDALRRVLKEVHSLFVMFHGSIRALIEKEPTGGLTRSLLYPFITDYLSTFQIWSLSEDCCCEFFVGKKLQLPTFRETLRERGTVQMLTLARDTAVEVQSLVQVLDSCAGSLRCHSMILFQDLLVSTTLSADDTVDLFTFAVMRLTSKAFSSDTSSWSYLRKGPGSSEISSRSNLAPVGSIDSLHSRNGNNMHHVIRPLQNDKWTKGKDGFLITDIWGLETGGSPDSAIPTIWLQQTQERMYLLAYQHKSLTLLLLMPTNAIVNGDLSISAVKQQVIEDASLRILKIEENISRGWGGENAYHIKGYRYLVVDNDTKVSRSSPSGKVTTLAKESLLALNKLREEVDSEKSRAKGQEKDMEICIRAKNNVWVIARVTRGKELYMALEKGSDTLLDTTDAVGRFSNRYCSGAFLMD

SEQ ID NO: 38044 - protein, 512 aa, Arabidopsis thaliana
  peptide (1)..(512): Ceres Seq. ID no. 12331161
MSSGDESLRLCMFDLRRGQTEGQELEKILFFYPADLDFSTQLSVIGLSEGLITFTRLFSPEAACEVIEAERHSHVFYEAEPDIWMVMVVEKNKETGAIWRIDALRRVLKEVHSLFVMFHGSIRALIEKEPTGGLTRSLLYPFITDYLSTFQIWSLSEDCCCEFFVGKKLQLPTFRETLRERGTVQMLTLARDTAVEVQSLVQVLDSCAGSLRCHSMILFQDLLVSTTLSADDTVDLFTFAVMRLTSKAFSSDTSSWSYLRKGPGSSEISSRSNLAPVGSIDSLHSRNGNNMHHVIRPLQNDKWTKGKDGFLITDIWGLETGGSPDSAIPTIWLQQTQERMYLLAYQHKSLTLLLLMPTNAIVNGDLSISAVKQQVIEDASLRILKIEENISRGWGGENAYHIKGYRYLVVDNDTKVSRSSPSGKVTTLAKESLLALNKLREEVDSEKSRAKGQEKDMEICIRAKNNVWVIARVTRGKELYMALEKGSDTLLDTTDAVGRFSNRYCSGAFLMD

SEQ ID NO: 38045 - protein, 501 aa, Arabidopsis thaliana
  peptide (1)..(501): Ceres Seq. ID no. 12331162
MFDLRRGQTEGQELEKILFFYPADLDFSTQLSVIGLSEGLITFTRLFSPEAACEVIEAERHSHVFYEAEPDIWMVMVVEKNKETGAIWRIDALRRVLKEVHSLFVMFHGSIRALIEKEPTGGLTRSLLYPFITDYLSTFQIWSLSEDCCCEFFVGKKLQLPTFRETLRERGTVQMLTLARDTAVEVQSLVQVLDSCAGSLRCHSMILFQDLLVSTTLSADDTVDLFTFAVMRLTSKAFSSDTSSWSYLRKGPGSSEISSRSNLAPVGSIDSLHSRNGNNMHHVIRPLQNDKWTKGKDGFLITDIWGLETGGSPDSAIPTIWLQQTQERMYLLAYQHKSLTLLLLMPTNAIVNGDLSISAVKQQVIEDASLRILKIEENISRGWGGENAYHIKGYRYLVVDNDTKVSRSSPSGKVTTLAKESLLALNKLREEVDSEKSRAKGQEKDMEICIRAKNNVWVIARVTRGKELYMALEKGSDTLLDTTDAVGRFSNRYCSGAFLMD

SEQ ID NO: 38046 - DNA, 1646 bp, Arabidopsis thaliana
  misc_feature (1)..(1646): Ceres Seq. ID no. 13574937
  misc_feature (1)..(1646): Ortholog of  Ceres SEQ ID NO 14302458 as cited in SEQ ID NO 66127
aacaatctactactactattatattttcttacacattttgcatcactctttttcaggatttttggttctcgagaaaaaagtgaagatttttgagattctctttcgatggattacgaacgaatcggaaagacccaggttactagtagcggcggcggattttctccggggaagttaaggagtatgcttcttctaggtgttgatagaaagaagaatgaagaagaagaatcaactcctacaatgagatctgggtctaatcaaattgatgaccctagggtttatgttgctagtggattagatgattgcaaagatgttgatgttgtgagtgagattactgattgttctacttcagggatagctagatcgattagtttgggtcttcaagagtattctgattatgataatgtgaatgagatcaagagtgtttctgcatcatctgtctttgagtttcaaaagactgagaaggaaaaagttaatcaaagaatgcctattagatcattctctaaaccagctccatctaaatgggatgatgctcagaaatggattgctagtcctacggctaaccgaccgaagactggacaggttcaggttccgggttcgaagaaagggcctagctttggtcgtcagtcttctatgaagattgttgaagttgctgaacatagagtggttgaagagcctgatacaaagagaatagatgtaagccaagtgaaaaaggatatgggaaacaagtttggtagctgggaagttgattcgtacactaccgtggattcatatgtcaaaccggttcttatggttgagaactctattgtagaatcagcaactgaagttaatctcagccgtcatgactcgtcagtcgcaactgcgtttgctcaaccgccttcaacggcaaggtctgtgtcaatgagagacatgggaactgaaatgactcctatagcgagccaagaaccttctagaaacgggacaccgattagggcaacaacgccaatacgaagtcctatatcttctgaaccttcaagtccaggcagacaagcatcagcttctcctatgagtaacaaggaactgtcagagaaagagcttcaaatgaaaactaggagagagataatggtgttgggtactcaacttggtaaatttaacattgctgcttgggctagcaaggaggatgaagataaagacgcatccacatcattaaagaccaaagcttctctacaaacttctaaaagtgtttctgaagctcgtgctacagcgtgggaggaagcggaaaaagctaagcacatggctaggttcagacgcgaagagatgaagattcaagcatgggagaatcatcagaaggcgaaatctgaagccgagatgaagaaaaccgaggttaaagttgagaggattaagggacgagcacaagaccggttgatgaagaaactcgctacaatcgagcgcaaagcagaggaaaagcgagcagcggctgaagcaaagaaggatcatcaggcagctaaaacagagaaacaagctgaacaaatccgaagaacaggcaaagtaccttcattgttgttctcttgctttagcttttgttcttaaatccaatcctantgtgaatgtgatgttgttaattctcaagaacacatctttctatcatcatttgtataataaaagctttg

SEQ ID NO: 38047 - protein, 486 aa, Arabidopsis thaliana
  peptide (1)..(486): Ceres Seq. ID no. 13574938
MDYERIGKTQVTSSGGGFSPGKLRSMLLLGVDRKKNEEEESTPTMRSGSNQIDDPRVYVASGLDDCKDVDVVSEITDCSTSGIARSISLGLQEYSDYDNVNEIKSVSASSVFEFQKTEKEKVNQRMPIRSFSKPAPSKWDDAQKWIASPTANRPKTGQVQVPGSKKGPSFGRQSSMKIVEVAEHRVVEEPDTKRIDVSQVKKDMGNKFGSWEVDSYTTVDSYVKPVLMVENSIVESATEVNLSRHDSSVATAFAQPPSTARSVSMRDMGTEMTPIASQEPSRNGTPIRATTPIRSPISSEPSSPGRQASASPMSNKELSEKELQMKTRREIMVLGTQLGKFNIAAWASKEDEDKDASTSLKTKASLQTSKSVSEARATAWEEAEKAKHMARFRREEMKIQAWENHQKAKSEAEMKKTEVKVERIKGRAQDRLMKKLATIERKAEEKRAAAEAKKDHQAAKTEKQAEQIRRTGKVPSLLFSCFSFCS

SEQ ID NO: 38048 - protein, 461 aa, Arabidopsis thaliana
  peptide (1)..(461): Ceres Seq. ID no. 13574939
MLLLGVDRKKNEEEESTPTMRSGSNQIDDPRVYVASGLDDCKDVDVVSEITDCSTSGIARSISLGLQEYSDYDNVNEIKSVSASSVFEFQKTEKEKVNQRMPIRSFSKPAPSKWDDAQKWIASPTANRPKTGQVQVPGSKKGPSFGRQSSMKIVEVAEHRVVEEPDTKRIDVSQVKKDMGNKFGSWEVDSYTTVDSYVKPVLMVENSIVESATEVNLSRHDSSVATAFAQPPSTARSVSMRDMGTEMTPIASQEPSRNGTPIRATTPIRSPISSEPSSPGRQASASPMSNKELSEKELQMKTRREIMVLGTQLGKFNIAAWASKEDEDKDASTSLKTKASLQTSKSVSEARATAWEEAEKAKHMARFRREEMKIQAWENHQKAKSEAEMKKTEVKVERIKGRAQDRLMKKLATIERKAEEKRAAAEAKKDHQAAKTEKQAEQIRRTGKVPSLLFSCFSFCS

SEQ ID NO: 38049 - protein, 442 aa, Arabidopsis thaliana
  peptide (1)..(442): Ceres Seq. ID no. 13574940
MRSGSNQIDDPRVYVASGLDDCKDVDVVSEITDCSTSGIARSISLGLQEYSDYDNVNEIKSVSASSVFEFQKTEKEKVNQRMPIRSFSKPAPSKWDDAQKWIASPTANRPKTGQVQVPGSKKGPSFGRQSSMKIVEVAEHRVVEEPDTKRIDVSQVKKDMGNKFGSWEVDSYTTVDSYVKPVLMVENSIVESATEVNLSRHDSSVATAFAQPPSTARSVSMRDMGTEMTPIASQEPSRNGTPIRATTPIRSPISSEPSSPGRQASASPMSNKELSEKELQMKTRREIMVLGTQLGKFNIAAWASKEDEDKDASTSLKTKASLQTSKSVSEARATAWEEAEKAKHMARFRREEMKIQAWENHQKAKSEAEMKKTEVKVERIKGRAQDRLMKKLATIERKAEEKRAAAEAKKDHQAAKTEKQAEQIRRTGKVPSLLFSCFSFCS

SEQ ID NO: 38050 - DNA, 591 bp, Arabidopsis thaliana
  misc_feature (1)..(591): Ceres Seq. ID no. 12466015
  misc_feature (1)..(591): Ortholog of  Ceres SEQ ID NO 13638877 as cited in SEQ ID NO 55794
  misc_feature (1)..(591): Ortholog of  Ceres SEQ ID NO 13656156 as cited in SEQ ID NO 64620
caaaatgtccatacaaggatctagctgcaccaaccgatgtcttcattgacaagccacccacaggggaatcatctaccatgtccgctgcacctggaactggcaaggccgcgtatgtcccgcctagcatgagagcaggtgcagacagaagcgctgtgggttcagacatgaggaggaggaacgatgagaactctgtgcgtgtaaccaatctgtccgaggatacccgtgaacctgacttgatggagctgttccatccgtttggagctgtcacacgtgtctatgtggccattgatcagaaaactgaagtgagcagaggatttggtttcgtcaatttcgtgagcagagaagacgctcaaagagcaatcaacaaattgaatggttatggttatgataacctcatcctcagggttgaatgggcaactccaagaccaacctagaaagaaatgtctgatgttgagaccttaaaactcttctcattctcgtctttcttgttatggatttttgtttatcgaccagtttgtttgttggtttggtttctgtatgaatagatgagaatttgttcaatttctctttaatacataaggcatgcttttt

SEQ ID NO: 38051 - protein, 143 aa, Arabidopsis thaliana
  peptide (1)..(143): Ceres Seq. ID no. 12466016
KCPYKDLAAPTDVFIDKPPTGESSTMSAAPGTGKAAYVPPSMRAGADRSAVGSDMRRRNDENSVRVTNLSEDTREPDLMELFHPFGAVTRVYVAIDQKTEVSRGFGFVNFVSREDAQRAINKLNGYGYDNLILRVEWATPRPT

SEQ ID NO: 38052 - protein, 118 aa, Arabidopsis thaliana
  peptide (1)..(118): Ceres Seq. ID no. 12466017
MSAAPGTGKAAYVPPSMRAGADRSAVGSDMRRRNDENSVRVTNLSEDTREPDLMELFHPFGAVTRVYVAIDQKTEVSRGFGFVNFVSREDAQRAINKLNGYGYDNLILRVEWATPRPT

SEQ ID NO: 38053 - protein, 102 aa, Arabidopsis thaliana
  peptide (1)..(102): Ceres Seq. ID no. 12466018
MRAGADRSAVGSDMRRRNDENSVRVTNLSEDTREPDLMELFHPFGAVTRVYVAIDQKTEVSRGFGFVNFVSREDAQRAINKLNGYGYDNLILRVEWATPRPT

SEQ ID NO: 38054 - DNA, 1097 bp, Arabidopsis thaliana
  misc_feature (1)..(1097): Ceres Seq. ID no. 12337666
  misc_feature (1)..(1097): Ortholog of  Ceres SEQ ID NO 12609518 as cited in SEQ ID NO 51887
  misc_feature (1)..(1097): Ortholog of  Ceres SEQ ID NO 13638980 as cited in SEQ ID NO 55975
  misc_feature (1)..(1097): Ortholog of  Ceres SEQ ID NO 13597466 as cited in SEQ ID NO 65077
  misc_feature (1)..(1097): Ortholog of  Ceres SEQ ID NO 13654590 as cited in SEQ ID NO 68615
aattgcatattcgaagataatagccacatgtatgagatgacgtggttggataatagcttgtagtgttaaaatacctcatttgacctttcgacattcatacgcaatcgactcattccacggatctgcttactcattgattctcgataaattgttcttctcccacagacaccagattctaccaatcatttgctcgaaaaggaatcatgggtcttaaagctggaacctttgtgcttctcttgttgggtttgatcttggtctctgacgctagatctttcgttgactccaccatctcagagaaagtttccaacaaggaagacgtttgcactctgtgtgaggaatatgttactgatgctctcagctaccttgagaaaaatgtcacacaagcggagatcatcgaagatcttcatgatcggtgttcccaattgcgcggatattcgcagcagtgcataagtttggtggattactatgttcctcttttcttcttacaactagagtcgtttcaacctcattatttctgcaagaggatgaatctttgtggcaaagttgtagctcttgtcgaagaagctcgtcaggacagttgcggtgtatgccacaggactgtttcagagattctcatcaaactacaagatcctgacacacagctggatatcgttgaactgcttatcaagggatgcaaatcgctcaagaactacgagaagaagtgcaagacgttggtgtttgaatatggacctctgatactcgtaaatgcagaggaattcctagtgaaaaacgacgtctgcacactcttgcgcgcatgcccccctgagaaatcggttctaaggcagccggagttggctgattcttgaatgttcaaaacgttgctataacaggattttaattccttatgggttatacaagtaggaacacgagctgctccatgagaatggttgcagactttgtgtagtgtctatatgtatggattcaaacacatcctccaaaatgtccctttgcctttgtgtaaataatgatcgctacaacaattgtacctctactatgatatcactgtattctatttgaggtttgttacattttatatgaatgatattagtgtagtttgc

SEQ ID NO: 38055 - protein, 213 aa, Arabidopsis thaliana
  peptide (1)..(213): Ceres Seq. ID no. 12337667
MGLKAGTFVLLLLGLILVSDARSFVDSTISEKVSNKEDVCTLCEEYVTDALSYLEKNVTQAEIIEDLHDRCSQLRGYSQQCISLVDYYVPLFFLQLESFQPHYFCKRMNLCGKVVALVEEARQDSCGVCHRTVSEILIKLQDPDTQLDIVELLIKGCKSLKNYEKKCKTLVFEYGPLILVNAEEFLVKNDVCTLLRACPPEKSVLRQPELADS

SEQ ID NO: 38056 - protein, 106 aa, Arabidopsis thaliana
  peptide (1)..(106): Ceres Seq. ID no. 12337668
MNLCGKVVALVEEARQDSCGVCHRTVSEILIKLQDPDTQLDIVELLIKGCKSLKNYEKKCKTLVFEYGPLILVNAEEFLVKNDVCTLLRACPPEKSVLRQPELADS

SEQ ID NO: 38057 - DNA, 1049 bp, Arabidopsis thaliana
  misc_feature (1)..(1049): Ceres Seq. ID no. 13491469
  misc_feature (1)..(1049): Ortholog of  Ceres SEQ ID NO 13594252 as cited in SEQ ID NO 57528
  misc_feature (1)..(1049): Ortholog of  Ceres SEQ ID NO 14315060 as cited in SEQ ID NO 60039
  misc_feature (1)..(1049): Ortholog of  Ceres SEQ ID NO 13597809 as cited in SEQ ID NO 64598
  misc_feature (1)..(1049): Ortholog of  Ceres SEQ ID NO 12617960 as cited in SEQ ID NO 69051
  misc_feature (1)..(1049): Ortholog of  Ceres SEQ ID NO 13589401 as cited in SEQ ID NO 0
  misc_feature (1)..(1049): Ortholog of  Ceres SEQ ID NO 15179361 as cited in SEQ ID NO 0
gttttcttctccgtttctcgctcatcgcttactgaaaccagaaacaagtttagggtttttgcggaggtttcaaagttaacaatggcggaagagcacaagcacgaggaatcgatcatggagaagatctctgagaagatccatggtcacgatgactcttcttcttcttcttccgattcggatgacgataagaactctgcgtctctcaaaaccaagatttatcgtcttttcggaagagaacagcctcttcacaagcttttcggtggcggaaaacctgccgacattttcctgtggaggaacaagaaggtatcaggaggagtattgggtgctgcaactgtttcctggatcttattcgagttacttgagtacaatcttctcacactcttcggccacatttcaattcttgctctcgcagtattgttcttgtggtctagtgctagtaccttcattcacaagtcacctcttcatatccctgaagttcacatccccgaggatgttgttcttcagcttgcttctggattaaggattgaaatcaatcgtggatttactgttcttagggacattgcatcaggaagagatcttaagaagtttctgttggtgattgctggtttatgggttttgtccaaagttggtagctcctgcaacttcttgaccttaatctacatcgcaactgtacttctcttcacgattcccgtgctttacgagaagtatgaagataaagtagatgactttggtgaaaaggcgatgagggagatcaagaagcaatacgtggagttcgacgtgaaggttttgagtaaggtgatgagcaaaattcctaaaggagcctttgcctttatcaagaagaaagattagagagtgtgtaagtttctctcatcatcattatccgagattattcaagattgatatataaatctcgaagcattgtttttttggctgttggttaataaccctttattctctcaaatatctgctatatggattttattcgggttttaaccaaattttatagcaatattgaatctgattgaaatttgaattgatccttttttcgt

SEQ ID NO: 38058 - protein, 282 aa, Arabidopsis thaliana
  peptide (1)..(282): Ceres Seq. ID no. 13491470
VFFSVSRSSLTETRNKFRVFAEVSKLTMAEEHKHEESIMEKISEKIHGHDDSSSSSSDSDDDKNSASLKTKIYRLFGREQPLHKLFGGGKPADIFLWRNKKVSGGVLGAATVSWILFELLEYNLLTLFGHISILALAVLFLWSSASTFIHKSPLHIPEVHIPEDVVLQLASGLRIEINRGFTVLRDIASGRDLKKFLLVIAGLWVLSKVGSSCNFLTLIYIATVLLFTIPVLYEKYEDKVDDFGEKAMREIKKQYVEFDVKVLSKVMSKIPKGAFAFIKKKD

SEQ ID NO: 38059 - protein, 255 aa, Arabidopsis thaliana
  peptide (1)..(255): Ceres Seq. ID no. 13491471
MAEEHKHEESIMEKISEKIHGHDDSSSSSSDSDDDKNSASLKTKIYRLFGREQPLHKLFGGGKPADIFLWRNKKVSGGVLGAATVSWILFELLEYNLLTLFGHISILALAVLFLWSSASTFIHKSPLHIPEVHIPEDVVLQLASGLRIEINRGFTVLRDIASGRDLKKFLLVIAGLWVLSKVGSSCNFLTLIYIATVLLFTIPVLYEKYEDKVDDFGEKAMREIKKQYVEFDVKVLSKVMSKIPKGAFAFIKKKD

SEQ ID NO: 38060 - protein, 244 aa, Arabidopsis thaliana
  peptide (1)..(244): Ceres Seq. ID no. 13491472
MEKISEKIHGHDDSSSSSSDSDDDKNSASLKTKIYRLFGREQPLHKLFGGGKPADIFLWRNKKVSGGVLGAATVSWILFELLEYNLLTLFGHISILALAVLFLWSSASTFIHKSPLHIPEVHIPEDVVLQLASGLRIEINRGFTVLRDIASGRDLKKFLLVIAGLWVLSKVGSSCNFLTLIYIATVLLFTIPVLYEKYEDKVDDFGEKAMREIKKQYVEFDVKVLSKVMSKIPKGAFAFIKKKD

SEQ ID NO: 38061 - DNA, 1071 bp, Arabidopsis thaliana; identical to SEQ ID NO: 25085
  misc_feature (1)..(1071): Ceres Seq. ID no. 12385269
  misc_feature (1)..(1071): Ortholog of  Ceres SEQ ID NO 12557497 as cited in SEQ ID NO 43
  misc_feature (1)..(1071): Ortholog of  Ceres SEQ ID NO 12635723 as cited in SEQ ID NO 0

SEQ ID NO: 38062 - protein, 280 aa, Arabidopsis thaliana; identical to SEQ ID NO: 25086
  peptide (1)..(280): Ceres Seq. ID no. 12385270

SEQ ID NO: 38063 - protein, 272 aa, Arabidopsis thaliana; identical to SEQ ID NO: 25087
  peptide (1)..(272): Ceres Seq. ID no. 12385271

SEQ ID NO: 38064 - protein, 159 aa, Arabidopsis thaliana; identical to SEQ ID NO: 25088
  peptide (1)..(159): Ceres Seq. ID no. 12385272

SEQ ID NO: 38065 - DNA, 1444 bp, Arabidopsis thaliana
  misc_feature (1)..(1444): Ceres Seq. ID no. 12422058
  misc_feature (1)..(1444): Ortholog of  Ceres SEQ ID NO 13599602 as cited in SEQ ID NO 0
aatcttaacacaagcttgatcgtcctcatctgccaccaaaccaaagacataatttcttcggtgacttccatggctccgcctgtctctgatgattccctacagcctcgagatgtttgtgttgtgggagtggcgcgaacgcctataggggacttccttggctccctctcgtctttaactgctacaagacttgggtccatagccatccaagccgcacttaagagagcacatgttgatccggcccttgtggaagaggtcttctttggcaatgtcttaactgccaatcttgggcaagcaccagcaagacaggctgcacttggtgctgggattccctattctgtgatctgcaccactatcaacaaagtttgtgctgcaggaatgaaatctgtaatgctagcgtctcaaagtatccagctcggcttgaatgatattgttgttgctggtgggatggagagcatgtcaaacgtacctaagtacctcccggacgcaagaaggggttctcgattaggtcatgatactgttgttgatggtatgatgaaagatggactttgggatgtctataatgactttggaatgggagtttgtggagaaatatgcgctgaccagtaccgtattacaagagaagaacaggatgcttatgctatccagagctttgagcgtggtattgctgcgcaaaacactcagttgttcgcttgggaaattgttccggtcgaagtttccactggaagagggaggccttcagttgttattgacaaggatgaaggattggggaagtttgatgcagccaagttaaaaaagcttagaccaagtttcaaggaggatgggggatcagtcactgctggaaatgcatcaagcataagtgatggtgcggcagcgttagtgctagtgagtggagagaaggctcttgagcttggactgcatgttatcgctaagattagaggatacgctgatgctgctcaggcaccagagttattcacaaccacgccagctcttgctattcctaaagctataaagcgggctggtttggatgcatctcaagtggattattatgaaataaacgaagcattttctgtggtagctctagccaatcagaaactactgggattagatcctgaacggctcaatgcgcatggaggggctgtttcactgggacatccattgggctgtagcggtgctcgtatcttggtcacattattgggggtgttgagagcaaagaagggaaagtatggagtggcatcaatatgcaacggaggaggaggagcatcagcacttgtccttgagttcatgtcggagaagacaatcggatattcggcactctgaagctaatagctgttgttttataacgcaaagcttatgtatatggttcatgtgtgtgtcacaagactgtaactttgtacttgagagagatgcaataaaagtgtgttagaaaatgagcggtagatttccc

SEQ ID NO: 38066 - protein, 438 aa, Arabidopsis thaliana
  peptide (1)..(438): Ceres Seq. ID no. 12422059
NLNTSLIVLICHQTKDIISSVTSMAPPVSDDSLQPRDVCVVGVARTPIGDFLGSLSSLTATRLGSIAIQAALKRAHVDPALVEEVFFGNVLTANLGQAPARQAALGAGIPYSVICTTINKVCAAGMKSVMLASQSIQLGLNDIVVAGGMESMSNVPKYLPDARRGSRLGHDTVVDGMMKDGLWDVYNDFGMGVCGEICADQYRITREEQDAYAIQSFERGIAAQNTQLFAWEIVPVEVSTGRGRPSVVIDKDEGLGKFDAAKLKKLRPSFKEDGGSVTAGNASSISDGAAALVLVSGEKALELGLHVIAKIRGYADAAQAPELFTTTPALAIPKAIKRAGLDASQVDYYEINEAFSVVALANQKLLGLDPERLNAHGGAVSLGHPLGCSGARILVTLLGVLRAKKGKYGVASICNGGGGASALVLEFMSEKTIGYSAL

SEQ ID NO: 38067 - protein, 415 aa, Arabidopsis thaliana
  peptide (1)..(415): Ceres Seq. ID no. 12422060
MAPPVSDDSLQPRDVCVVGVARTPIGDFLGSLSSLTATRLGSIAIQAALKRAHVDPALVEEVFFGNVLTANLGQAPARQAALGAGIPYSVICTTINKVCAAGMKSVMLASQSIQLGLNDIVVAGGMESMSNVPKYLPDARRGSRLGHDTVVDGMMKDGLWDVYNDFGMGVCGEICADQYRITREEQDAYAIQSFERGIAAQNTQLFAWEIVPVEVSTGRGRPSVVIDKDEGLGKFDAAKLKKLRPSFKEDGGSVTAGNASSISDGAAALVLVSGEKALELGLHVIAKIRGYADAAQAPELFTTTPALAIPKAIKRAGLDASQVDYYEINEAFSVVALANQKLLGLDPERLNAHGGAVSLGHPLGCSGARILVTLLGVLRAKKGKYGVASICNGGGGASALVLEFMSEKTIGYSAL

SEQ ID NO: 38068 - protein, 313 aa, Arabidopsis thaliana
  peptide (1)..(313): Ceres Seq. ID no. 12422061
MKSVMLASQSIQLGLNDIVVAGGMESMSNVPKYLPDARRGSRLGHDTVVDGMMKDGLWDVYNDFGMGVCGEICADQYRITREEQDAYAIQSFERGIAAQNTQLFAWEIVPVEVSTGRGRPSVVIDKDEGLGKFDAAKLKKLRPSFKEDGGSVTAGNASSISDGAAALVLVSGEKALELGLHVIAKIRGYADAAQAPELFTTTPALAIPKAIKRAGLDASQVDYYEINEAFSVVALANQKLLGLDPERLNAHGGAVSLGHPLGCSGARILVTLLGVLRAKKGKYGVASICNGGGGASALVLEFMSEKTIGYSAL

SEQ ID NO: 38069 - DNA, 1310 bp, Arabidopsis thaliana
  misc_feature (1)..(1310): Ceres Seq. ID no. 12327792
  misc_feature (1)..(1310): Ortholog of  Ceres SEQ ID NO 13597019 as cited in SEQ ID NO 64303
  misc_feature (1)..(1310): Ortholog of  Ceres SEQ ID NO 13654191 as cited in SEQ ID NO 68235
  misc_feature (1)..(1310): Ortholog of  Ceres SEQ ID NO 15179513 as cited in SEQ ID NO 0
agaatcagaagagagtacatgagtttcctcttctgcctctttggtgattcttagcatttattattactcactcatcttcttttcattacattacataccaaacaagagctctcaaatggaaaggtttcaaggacacatcaacccctgtttcttcgatcgaaaaccggatgtgagaagcctcgaggttcaaggatttgcagaggctcaaagctttgctttcaaagaaaaagaggaagaaagcttacaagatacagttctatttctacagatgctgcaaagtgaagacccctcatcgtttttttcaatcaaagagccaaactttctgacgctactgtctcttcaaaccctcaaggagccttgggaactcgaaagatatctttcacttgaggattcacaatttcattcaccggtccaatctgagaccaaccgccttcatggaaggagccaatcaagctgtgtcaagccaagaaattccctttagccaagcaaacatgacactcccttcttctacctcatcaccactcagtgcacattcaagacgaaagcgcaaaatcaaccacttgctgcctcaagaaatgactagagaaaagagaaagaggaggaaaacaaaaccaagtaaaaacaatgaagagattgagaatcaaagaataaaccacattgctgttgaacgaaacagaagacgtcaaatgaacgaacatatcaactctctccgggcccttctcccaccttcctacatccaacgaggagaccaagcttccatagtaggaggagcaataaactacgtgaaggtcctcgagcaaatcatacaatctctcgaatcgcaaaagagaacgcaacaacaaagtaacagtgaggtagtagaaaacgcacttaatcatctcttaggcatttcgtcgaacgacctgtggacaactcttgaagatcaaacttgtatccccaagatcgaagctacagtgatacaaaaccatgtcagccttaaagttcaatgtgagaagaaacaaggacaacttctcaaaggaatcatatcacttgaaaagcttaaactcactgttcttcatctcaatatcactacttcgtctcattcctctgtttcttattccttcaacctcaagatggaagatgagtgcgacttagagtcagccgacgagattacggcggctgttcatcggattttcgatattccgacaatttgattaaacacatataattccaaaaatattaacagctgacaaaatggtatcttttttttttttcctacttgtaccatttttttaagaattaagagaataaaaaaatttcgtttttcgttc

SEQ ID NO: 38070 - protein, 252 aa, Arabidopsis thaliana
  peptide (1)..(252): Ceres Seq. ID no. 12327793
MEGANQAVSSQEIPFSQANMTLPSSTSSPLSAHSRRKRKINHLLPQEMTREKRKRRKTKPSKNNEEIENQRINHIAVERNRRRQMNEHINSLRALLPPSYIQRGDQASIVGGAINYVKVLEQIIQSLESQKRTQQQSNSEVVENALNHLLGISSNDLWTTLEDQTCIPKIEATVIQNHVSLKVQCEKKQGQLLKGIISLEKLKLTVLHLNITTSSHSSVSYSFNLKMEDECDLESADEITAAVHRIFDIPTI

SEQ ID NO: 38071 - protein, 233 aa, Arabidopsis thaliana
  peptide (1)..(233): Ceres Seq. ID no. 12327794
MTLPSSTSSPLSAHSRRKRKINHLLPQEMTREKRKRRKTKPSKNNEEIENQRINHIAVERNRRRQMNEHINSLRALLPPSYIQRGDQASIVGGAINYVKVLEQIIQSLESQKRTQQQSNSEVVENALNHLLGISSNDLWTTLEDQTCIPKIEATVIQNHVSLKVQCEKKQGQLLKGIISLEKLKLTVLHLNITTSSHSSVSYSFNLKMEDECDLESADEITAAVHRIFDIPTI

SEQ ID NO: 38072 - protein, 205 aa, Arabidopsis thaliana
  peptide (1)..(205): Ceres Seq. ID no. 12327795
MTREKRKRRKTKPSKNNEEIENQRINHIAVERNRRRQMNEHINSLRALLPPSYIQRGDQASIVGGAINYVKVLEQIIQSLESQKRTQQQSNSEVVENALNHLLGISSNDLWTTLEDQTCIPKIEATVIQNHVSLKVQCEKKQGQLLKGIISLEKLKLTVLHLNITTSSHSSVSYSFNLKMEDECDLESADEITAAVHRIFDIPTI

SEQ ID NO: 38073 - DNA, 1194 bp, Arabidopsis thaliana
  misc_feature (1)..(1194): Ceres Seq. ID no. 13488606
  misc_feature (1)..(1194): Ortholog of  Ceres SEQ ID NO 13590776 as cited in SEQ ID NO 64877
  misc_feature (1)..(1194): Ortholog of  Ceres SEQ ID NO 12780534 as cited in SEQ ID NO 65670
  misc_feature (1)..(1194): Ortholog of  Ceres SEQ ID NO 13598301 as cited in SEQ ID NO 68281
aaaaccgacattgacctgacagtttcttacgccggcgagcgaactcgacgaagaagacaacttccttttgttgcacctgtgagtctgcgaccatggctatgcaatctggtattgggttatcgaagattttgattctagctggagcaggttatactagtacgattctggttaagaatgggaagatggcagatattttgggtgagcttcaggctttggttaagcgatttgagaaatctggagatcatgtagatgatgattctgatgccatgactactcagatgcaacgattagcaatggaggttcggcaattggcttcgtcgcggcagataactgttatgaatggagctcagggagctgattttacaccgtttattgtcccggcagcgacattgggagcattaggctatggctatatgtggttcaagggaatttcattctctgatatcatgtgtgtaacgaagcggaacatggaaaatgcagtgtcgaacttgaccaagcatttggataccgtttcagaagctattttgaatgctaagaagcacctgagccagcggcttcagaaggtggacgataagctagacttgcagaaagatctcttaaagggagtccaggataatgtgggtttggctcttgaggatcttgctaacattggagatgattttgacgcaatgcatagcatctttggtggtatgggtgggaaattagatagcattgagtacaagcagaatattgcgaacatgggtttgatatatctgtgcgactctttgggtggagaaaatcacaagatgccggatatattgatgcaggagaagcttcggctttcagggaagtcaaacacatgtatagtacttacaaccgaagaaacttcaagctcagagggtttaaaagaaagcgataagatacagctactagatgactgctaattcaaatggtgccaatatatcatcaagcaagaagccacgagtctgatagcattgacgagaatgaccctggatttggatagaaagaaggtataggattaataggagtgattattatgtattggtatttagaatagtgtgtcctttgaggcaagtaagaagattgagaaaaataaaaagaatgtgctttttttttccttcaattttttcgcatccaacaaaaaatgaaacctatattttttctaataatatactgcattatgcacaatttgtc

SEQ ID NO: 38074 - protein, 276 aa, Arabidopsis thaliana
  peptide (1)..(276): Ceres Seq. ID no. 13488607
MAMQSGIGLSKILILAGAGYTSTILVKNGKMADILGELQALVKRFEKSGDHVDDDSDAMTTQMQRLAMEVRQLASSRQITVMNGAQGADFTPFIVPAATLGALGYGYMWFKGISFSDIMCVTKRNMENAVSNLTKHLDTVSEAILNAKKHLSQRLQKVDDKLDLQKDLLKGVQDNVGLALEDLANIGDDFDAMHSIFGGMGGKLDSIEYKQNIANMGLIYLCDSLGGENHKMPDILMQEKLRLSGKSNTCIVLTTEETSSSEGLKESDKIQLLDDC

SEQ ID NO: 38075 - protein, 274 aa, Arabidopsis thaliana
  peptide (1)..(274): Ceres Seq. ID no. 13488608
MQSGIGLSKILILAGAGYTSTILVKNGKMADILGELQALVKRFEKSGDHVDDDSDAMTTQMQRLAMEVRQLASSRQITVMNGAQGADFTPFIVPAATLGALGYGYMWFKGISFSDIMCVTKRNMENAVSNLTKHLDTVSEAILNAKKHLSQRLQKVDDKLDLQKDLLKGVQDNVGLALEDLANIGDDFDAMHSIFGGMGGKLDSIEYKQNIANMGLIYLCDSLGGENHKMPDILMQEKLRLSGKSNTCIVLTTEETSSSEGLKESDKIQLLDDC

SEQ ID NO: 38076 - protein, 246 aa, Arabidopsis thaliana
  peptide (1)..(246): Ceres Seq. ID no. 13488609
MADILGELQALVKRFEKSGDHVDDDSDAMTTQMQRLAMEVRQLASSRQITVMNGAQGADFTPFIVPAATLGALGYGYMWFKGISFSDIMCVTKRNMENAVSNLTKHLDTVSEAILNAKKHLSQRLQKVDDKLDLQKDLLKGVQDNVGLALEDLANIGDDFDAMHSIFGGMGGKLDSIEYKQNIANMGLIYLCDSLGGENHKMPDILMQEKLRLSGKSNTCIVLTTEETSSSEGLKESDKIQLLDDC

SEQ ID NO: 38077 - DNA, 1326 bp, Arabidopsis thaliana
  misc_feature (1)..(1326): Ceres Seq. ID no. 13489024
  misc_feature (1)..(1326): Ortholog of  Ceres SEQ ID NO 13662984 as cited in SEQ ID NO 64419
atcaagctccggactcaaaacccaaatctctgagaaagaatcaaagccaatattcgatcaatcaagctggagtggaagaaagggaaagtgaacccattcgtgaggggaataagatagaggttaattaggcccaaatcgatgcctttaaatgtagtcaatgatcgtgatggctcttctcgcattcttttgaccgaccctgccggatcaactgctgaggtgcttttgtatggagggcaagtggtttcttggaaaaacgaaaggagagagaagttgctttatatgagcaccaaggcgcaattgaagccaccaaaggcgatcaggggagggttacctatcagctttccacagtttggaaattttggtgcacttgagcgacatggatttgcccgtaacagattctggtcacttgataatgatccttcacctctgcctccggctaaccagcaatcaactgttgatttagtattgaagtctactgaagatgatttgaagatatggcctcatagctttgaacttcgtgttcgcatatctatcagtcctggaaaacttacaataatcccgcgtgtgaggaacactgacacaaaggcattttcctttatgttttcacttcgtaactacttatatgtatccgatataagtgaagttcgggttgagggtctggagacgcttgattatctggacaacttggtgcgtagagaaagattcacggagcaggcagatgcaattacctttgacggcgaggttgataaagtgtacttgaacacgccgacaaagattgccatcatagatcatgagaggaaaagaactatcgagttgcgaaaggaaggcatgccaaatgcagctgtgtggaacccttgggacaagaaggccaagagtattgcagatatgggagatgaggattacacaacaatgctgtgtgtagattctggtgctatagaaagcccaattgtgttgaagccacatgaagagtggaaaggaagacaagaactctctatcgtctcctcaagctactgcagcggtcagctcgatccacgtaaggttctttatggggattactgataatatatatgaaatcaaacttggaaacatcatcagtcttatattttgatcgtcttcatggataaagcgattgatgcccaaacaaatctgatatgatatgattttgtttggagctattgccctttgtgagtttctgacaggcacacagaaagataggcaaatgtagtattttgtaacgttgccttctgtgtggcggtcagggacttattaatatgtattatggttcacccggaaacatgagtcttatattgaatcgtcttcttcatg

SEQ ID NO: 38078 - protein, 306 aa, Arabidopsis thaliana
  peptide (1)..(306): Ceres Seq. ID no. 13489025
MPLNVVNDRDGSSRILLTDPAGSTAEVLLYGGQVVSWKNERREKLLYMSTKAQLKPPKAIRGGLPISFPQFGNFGALERHGFARNRFWSLDNDPSPLPPANQQSTVDLVLKSTEDDLKIWPHSFELRVRISISPGKLTIIPRVRNTDTKAFSFMFSLRNYLYVSDISEVRVEGLETLDYLDNLVRRERFTEQADAITFDGEVDKVYLNTPTKIAIIDHERKRTIELRKEGMPNAAVWNPWDKKAKSIADMGDEDYTTMLCVDSGAIESPIVLKPHEEWKGRQELSIVSSSYCSGQLDPRKVLYGDY

SEQ ID NO: 38079 - protein, 259 aa, Arabidopsis thaliana
  peptide (1)..(259): Ceres Seq. ID no. 13489026
MSTKAQLKPPKAIRGGLPISFPQFGNFGALERHGFARNRFWSLDNDPSPLPPANQQSTVDLVLKSTEDDLKIWPHSFELRVRISISPGKLTIIPRVRNTDTKAFSFMFSLRNYLYVSDISEVRVEGLETLDYLDNLVRRERFTEQADAITFDGEVDKVYLNTPTKIAIIDHERKRTIELRKEGMPNAAVWNPWDKKAKSIADMGDEDYTTMLCVDSGAIESPIVLKPHEEWKGRQELSIVSSSYCSGQLDPRKVLYGDY

SEQ ID NO: 38080 - protein, 153 aa, Arabidopsis thaliana
  peptide (1)..(153): Ceres Seq. ID no. 13489027
MFSLRNYLYVSDISEVRVEGLETLDYLDNLVRRERFTEQADAITFDGEVDKVYLNTPTKIAIIDHERKRTIELRKEGMPNAAVWNPWDKKAKSIADMGDEDYTTMLCVDSGAIESPIVLKPHEEWKGRQELSIVSSSYCSGQLDPRKVLYGDY

SEQ ID NO: 38081 - DNA, 1108 bp, Arabidopsis thaliana
  misc_feature (1)..(1108): Ceres Seq. ID no. 12371248
  misc_feature (1)..(1108): Ortholog of  Ceres SEQ ID NO 15179676 as cited in SEQ ID NO 52442
  misc_feature (1)..(1108): Ortholog of  Ceres SEQ ID NO 13582807 as cited in SEQ ID NO 67806
aataaccttttcggtgctcaagcgccgtttctagggtttttctctgaggaagaagcgtttcatttctctgaatttcatcgaaaatggcggaaagaggaggagaaggcggcgcagagcgtggcggtgaccgtggtgacttcggacgtggattcggcggtggacgtggaggtggccgtggccgtgatcgtggtccaagaggccgtggaagacgtggaggccgtgcctcggaagaaacgaaatgggttccagtgaccaaactaggtcgtctagtggctgacaataaaataacgaagctagagcagatctatctccattctctcccagtaaaggagtaccaaatcatagatcatcttgttggtcctacgttgaaagacgaggttatgaagatcatgcctgttcagaaacaaaccagagctggtcaaaggactagattcaaggcctttgttgttgttggtgatggtaatggtcatgttggtttgggtgtcaagtgttctaaggaagttgctactgccattagaggagctattattcttgctaagctctctgttgttccggtgaggagaggttactgggggaataagattgggaagccacacactgtgccttgtaaggttactgggaagtgtggctctgttactgtgagaatggttcctgctccgagaggttctggtattgttgctgctagggttcctaagaaggttcttcagttcgctggtattgatgatgtctttacttcttccagaggatctactaaaactcttggaaactttgtcaaggcgacgtttgactgcttacagaagacatatgggttccttacaccagagttctggaaagagactagattctccagatcgccctaccaagagcacactgatttcttgtcgactaaggctgtttctgcaaccaaggttatcacggagggtgaagaccaagcttaagaccttcatgagataagttttggttgttcttaatactaattcctactttgaaaaagagtatttttttttcttgattatctatgagttttgttattggtggtttcgttactgttttggattttgttagatgtttgccttaatgcaaatttcaatgaaatagcttttgcaat

SEQ ID NO: 38082 - protein, 284 aa, Arabidopsis thaliana
  peptide (1)..(284): Ceres Seq. ID no. 12371249
MAERGGEGGAERGGDRGDFGRGFGGGRGGGRGRDRGPRGRGRRGGRASEETKWVPVTKLGRLVADNKITKLEQIYLHSLPVKEYQIIDHLVGPTLKDEVMKIMPVQKQTRAGQRTRFKAFVVVGDGNGHVGLGVKCSKEVATAIRGAIILAKLSVVPVRRGYWGNKIGKPHTVPCKVTGKCGSVTVRMVPAPRGSGIVAARVPKKVLQFAGIDDVFTSSRGSTKTLGNFVKATFDCLQKTYGFLTPEFWKETRFSRSPYQEHTDFLSTKAVSATKVITEGEDQA

SEQ ID NO: 38083 - protein, 185 aa, Arabidopsis thaliana
  peptide (1)..(185): Ceres Seq. ID no. 12371250
MKIMPVQKQTRAGQRTRFKAFVVVGDGNGHVGLGVKCSKEVATAIRGAIILAKLSVVPVRRGYWGNKIGKPHTVPCKVTGKCGSVTVRMVPAPRGSGIVAARVPKKVLQFAGIDDVFTSSRGSTKTLGNFVKATFDCLQKTYGFLTPEFWKETRFSRSPYQEHTDFLSTKAVSATKVITEGEDQA

SEQ ID NO: 38084 - protein, 182 aa, Arabidopsis thaliana
  peptide (1)..(182): Ceres Seq. ID no. 12371251
MPVQKQTRAGQRTRFKAFVVVGDGNGHVGLGVKCSKEVATAIRGAIILAKLSVVPVRRGYWGNKIGKPHTVPCKVTGKCGSVTVRMVPAPRGSGIVAARVPKKVLQFAGIDDVFTSSRGSTKTLGNFVKATFDCLQKTYGFLTPEFWKETRFSRSPYQEHTDFLSTKAVSATKVITEGEDQA

SEQ ID NO: 38085 - DNA, 854 bp, Arabidopsis thaliana
  misc_feature (1)..(854): Ceres Seq. ID no. 12330075
  misc_feature (1)..(854): Ortholog of  Ceres SEQ ID NO 12474478 as cited in SEQ ID NO 96
  misc_feature (1)..(854): Ortholog of  Ceres SEQ ID NO 14302025 as cited in SEQ ID NO 52138
  misc_feature (1)..(854): Ortholog of  Ceres SEQ ID NO 14309053 as cited in SEQ ID NO 0
attttagaaaaaataaacaaacaaacaaaccaaaacaccatggagcttaaaaatacaatctttctagtcatacttctatcaataaccattctccaatcttcatctgcaaccccaaaccggtcggaatcagaccagtttattgtgtcttcatgccaaaccacccaatatccatcactatgcgtgcacacactctctgcttacgccaccaagatccgccacaacaatgaccaagatctcgcccagactgctctcatcatcagcttggctcgagccaaatccgttactatcttcgtcgccaaactaaccaaagagacaccaagatttaaacgtagggaatatctagcaatcaaagattgcatcgaagtgctaggcaatagcgtggaccggttagctcaatcggttaaggaacttgctcgagctggtcatgctgtggctagtgaggacttcatgtggaaaatgagtaacgttcaaacatgggtcagtgccgctttgacggacgagacaacgtgtctagatggattctcagaacgagccatgggaggcaaagtgaagagactgattcggtataaggtggttcacgtggctcaagtcactagcaatgctcttgctttggttaatcagtttgcagagaagcgaagtgtgaagtttccttaaatggacttaaatgtgaaaattttggcttgtaagtgagagtttgaatctaaacttcaattagttgtgtaaattgttatcttttttttttttgtcggtcggaaagaaaactcaagattgtgtaacaatctttgttgtgtcctgcataatattgtattttaagataatgatatatagtcaccttttttgggtgtaaattatgg

SEQ ID NO: 38086 - protein, 217 aa, Arabidopsis thaliana
  peptide (1)..(217): Ceres Seq. ID no. 12330076
ILEKINKQTNQNTMELKNTIFLVILLSITILQSSSATPNRSESDQFIVSSCQTTQYPSLCVHTLSAYATKIRHNNDQDLAQTALIISLARAKSVTIFVAKLTKETPRFKRREYLAIKDCIEVLGNSVDRLAQSVKELARAGHAVASEDFMWKMSNVQTWVSAALTDETTCLDGFSERAMGGKVKRLIRYKVVHVAQVTSNALALVNQFAEKRSVKFP

SEQ ID NO: 38087 - protein, 204 aa, Arabidopsis thaliana
  peptide (1)..(204): Ceres Seq. ID no. 12330077
MELKNTIFLVILLSITILQSSSATPNRSESDQFIVSSCQTTQYPSLCVHTLSAYATKIRHNNDQDLAQTALIISLARAKSVTIFVAKLTKETPRFKRREYLAIKDCIEVLGNSVDRLAQSVKELARAGHAVASEDFMWKMSNVQTWVSAALTDETTCLDGFSERAMGGKVKRLIRYKVVHVAQVTSNALALVNQFAEKRSVKFP

SEQ ID NO: 38088 - DNA, 829 bp, Arabidopsis thaliana
  misc_feature (1)..(829): Ceres Seq. ID no. 12660820
  misc_feature (1)..(829): Ortholog of  Ceres SEQ ID NO 15168314 as cited in SEQ ID NO 60142
aagcaactactctctctctctctctttcttctgccatcgccaaaaacttgtcttttgcttcttatttggtctcagctctgatcttttgattcaacggctcccggagacgacggaagcaatgcagttcttcggtggatctgagattagtccgtcgccgccagttccgacggcgagtggaaacaacgcgcacatgatgtacgttttcaatcgtaacggtgtatgtcttctctacaaagaatggaatcggcctcttcatacacttaatcctcagcaagatcacaagctcatgtttggtcttctcttctctctcaaatctctcaccgctaagatggatccagtcaatgcggataaaggaaatcttggggttccacagttgccaggacaaggttgctctttccatagtttccgtacgaatacttacaagctaagtttcatggagactccctctggtattaagattatcttagtaactcatccaaagaccggagatttacgcgaatccttgaagtacatctacagtttatacgttgaatatgtcgtaaaaaatcctatatacagcccaggatctccaatcaagtcggagttgttcaacactgcacttgaccagtacgtaaggagcatctcttagtgtgtgcattacagatttgtccattggaacttctctccttcaacagaactatcgtctgaacaatctctgaaaagaagagagaattgtagtagagagatttatcttgagttcgactgttttctctgcaaatctatgtttcgtttaccctttttattaactccactgtattggcttgctatcaatgatgttcatggtttactc

SEQ ID NO: 38089 - protein, 208 aa, Arabidopsis thaliana
  peptide (1)..(208): Ceres Seq. ID no. 12660821
SNYSLSLSFFCHRQKLVFCFLFGLSSDLLIQRLPETTEAMQFFGGSEISPSPPVPTASGNNAHMMYVFNRNGVCLLYKEWNRPLHTLNPQQDHKLMFGLLFSLKSLTAKMDPVNADKGNLGVPQLPGQGCSFHSFRTNTYKLSFMETPSGIKIILVTHPKTGDLRESLKYIYSLYVEYVVKNPIYSPGSPIKSELFNTALDQYVRSIS

SEQ ID NO: 38090 - protein, 169 aa, Arabidopsis thaliana; identical to SEQ ID NO: 24678
  peptide (1)..(169): Ceres Seq. ID no. 12660822

SEQ ID NO: 38091 - protein, 145 aa, Arabidopsis thaliana; identical to SEQ ID NO: 24679
  peptide (1)..(145): Ceres Seq. ID no. 12660823

SEQ ID NO: 38092 - DNA, 1347 bp, Arabidopsis thaliana
  misc_feature (1)..(1347): Ceres Seq. ID no. 12371273
  misc_feature (1)..(1347): Ortholog of  Ceres SEQ ID NO 13663419 as cited in SEQ ID NO 66561
atcagataaacgaatggctaacgactacgtttccactgttctgcttcttcttagcctccttatcttcttgagtcagcgtactgattctgcctctatcgtcaagtctcttcctggttttgatggccctcttccctttgaactcgaaaccgggtatattggtgttggtgaggaagaggaagtgcagttgttttactactttatcaagtctgagaggaatccacaagaagatcctcttctactctggttaagtggaggacctggttgctcttctatctctggtcttctttacgagaatgggcctgtgaatgtgaagattgaggtttacaatggaactcttccttccttggtctctactacatattcatggactaaggtttcgagtataatatatttggatcagcctgttggaactggcttctcctactcaagaactaaacttgttaacaaacccagtgattcaggagaagccaagagaatccacgagtttcttcacaagtggctaggcaagcatcaagagttttcctccaaccctttctatgtcggtggggattcttattgtggtatggtcattccggcactcgttcaagaaatctcaaaaggaaactatgtatgctgcaaacctccaataaatcttcagggctatattcttggaaacccatcaacagaaaatgaagttgatattaattatcgcattccatatgctcatggaatggcactgatctctgatgaactctatgagtcaatgaagagaatctgcaaaggaaaatatgaaaatgttgatccacgtaacacaaaatgcttgaaactcgttggagaatatcagaagtgcactaaaagaataaacaaagcacttataataacgccagagtgtgtagacacatctcctgattgctatatgtatcggtatttgttaactacctactgggccaatgatgagaatgtgcaaagagctcttcatgtcaataaggggagtataggggaatgggtacgttgttattttgagataccttacaatcatgacattaaaagcagtgtaccgtaccacatgaataacagcatcgatggatatgcatctctcatcttcagtggtgatcacgacatggaagtaccttaccttggaactcaagcttggattaggtctcttaattattctctcattgatgactggagaccttggatgataggagatcaaatcgctggatacacgaggacctatgccaataagatggcatttgctactatcaaaggaggaggacacacaccagagtataaaccagaggagagttatatcatgttccaaaggtggatcagtggtcagcctttgtaacttgaagccaaagcaattcc

SEQ ID NO: 38093 - protein, 441 aa, Arabidopsis thaliana
  peptide (1)..(441): Ceres Seq. ID no. 12371274
SDKRMANDYVSTVLLLLSLLIFLSQRTDSASIVKSLPGFDGPLPFELETGYIGVGEEEEVQLFYYFIKSERNPQEDPLLLWLSGGPGCSSISGLLYENGPVNVKIEVYNGTLPSLVSTTYSWTKVSSIIYLDQPVGTGFSYSRTKLVNKPSDSGEAKRIHEFLHKWLGKHQEFSSNPFYVGGDSYCGMVIPALVQEISKGNYVCCKPPINLQGYILGNPSTENEVDINYRIPYAHGMALISDELYESMKRICKGKYENVDPRNTKCLKLVGEYQKCTKRINKALIITPECVDTSPDCYMYRYLLTTYWANDENVQRALHVNKGSIGEWVRCYFEIPYNHDIKSSVPYHMNNSIDGYASLIFSGDHDMEVPYLGTQAWIRSLNYSLIDDWRPWMIGDQIAGYTRTYANKMAFATIKGGGHTPEYKPEESYIMFQRWISGQPL

SEQ ID NO: 38094 - protein, 437 aa, Arabidopsis thaliana
  peptide (1)..(437): Ceres Seq. ID no. 12371275
MANDYVSTVLLLLSLLIFLSQRTDSASIVKSLPGFDGPLPFELETGYIGVGEEEEVQLFYYFIKSERNPQEDPLLLWLSGGPGCSSISGLLYENGPVNVKIEVYNGTLPSLVSTTYSWTKVSSIIYLDQPVGTGFSYSRTKLVNKPSDSGEAKRIHEFLHKWLGKHQEFSSNPFYVGGDSYCGMVIPALVQEISKGNYVCCKPPINLQGYILGNPSTENEVDINYRIPYAHGMALISDELYESMKRICKGKYENVDPRNTKCLKLVGEYQKCTKRINKALIITPECVDTSPDCYMYRYLLTTYWANDENVQRALHVNKGSIGEWVRCYFEIPYNHDIKSSVPYHMNNSIDGYASLIFSGDHDMEVPYLGTQAWIRSLNYSLIDDWRPWMIGDQIAGYTRTYANKMAFATIKGGGHTPEYKPEESYIMFQRWISGQPL

SEQ ID NO: 38095 - protein, 254 aa, Arabidopsis thaliana
  peptide (1)..(254): Ceres Seq. ID no. 12371276
MVIPALVQEISKGNYVCCKPPINLQGYILGNPSTENEVDINYRIPYAHGMALISDELYESMKRICKGKYENVDPRNTKCLKLVGEYQKCTKRINKALIITPECVDTSPDCYMYRYLLTTYWANDENVQRALHVNKGSIGEWVRCYFEIPYNHDIKSSVPYHMNNSIDGYASLIFSGDHDMEVPYLGTQAWIRSLNYSLIDDWRPWMIGDQIAGYTRTYANKMAFATIKGGGHTPEYKPEESYIMFQRWISGQPL

SEQ ID NO: 38096 - DNA, 1539 bp, Arabidopsis thaliana
  misc_feature (1)..(1539): Ceres Seq. ID no. 13494002
  misc_feature (1)..(1539): Ortholog of  Ceres SEQ ID NO 13582281 as cited in SEQ ID NO 51014
  misc_feature (1)..(1539): Ortholog of  Ceres SEQ ID NO 14315606 as cited in SEQ ID NO 53515
  misc_feature (1)..(1539): Ortholog of  Ceres SEQ ID NO 12617417 as cited in SEQ ID NO 65089
atcatcaaagtgaaaatgacaaacttcaaagacaacgatggagatggaaccaaactccacgtggtaatgtttccatggttagcctttggtcacatggttccatacttggagctctctaaactcatagctcaaaagggtcacaaagtctctttcatttccactccacgtaacatcgaccgtctcctcccacggttaccggaaaatctctcctccgtcattaacttcgtcaagctatcacttcccgtcggcgacaacaaactcccggaagacggtgaagctaccacagacgtccctttcgaactcataccttacttaaaaatcgcttacgacgggttaaaagttccggtgacggagtttcttgaatcttcgaaacccgattgggttcttcaagatttcgcggggttttggcttcctccaatctctcgtcgtctcggaatcaaaaccggattctttagcgctttcaacggcgcgacgctcggtattcttaaaccgccggggttcgaagagtaccgtacttcgccggcggattttatgaagccgcctaagtgggttccgtttgaaacttcggtagctttcaagttatttgaatgcaggttcattttcaaaggatttatggcggaaaccaccgaagggaatgttcccgacatccaccgtgtcggcggcgtaattgacggctgtgacgtcatcttcgtacggagctgttacgagtatgaagcggagtggttaggacttacacaagaacttcaccggaaaccggttataccggtcggagttttgcctccaaaaccggacgaaaagtttgaagataccgacacgtggctgtctgttaaaaaatggttggactcacggaaaagtaagtccattgtctacgtagcttttggttcagaagctaaaccgagtcaaacggagctaaatgagatcgctctcggtttagagctttctggtttacctttcttttgggtgttaaagactcgtcgtggtccgtgggataccgaaccggtcgagcttccggaaggattcgaagagcgtacagcggatagagggatggtgtggagaggttgggttgagcaattgcgtacattgagccatgactcgatcggtttggttctgactcatcccggttggggaacgataattgaagctatccggtttgctaaaccgatggcaatgctggtttttgtgtatgaccaaggattgaatgcgagagtcattgaagagaagaaaattgggtatatgatccctcgagacgagacagaaggtttctttactaaagaaagtgttgcgaattcgctaagattggtaatggtggaagaagaaggaaaggtttatagagagaatgtgaaggagatgaaaggagtgtttggagatatggatagacaagatcgttatgtggattcattcttggaatatcttgttactaatcgttaactttgagtcttgatccaatggtcggttaattgagtgaagttgatcaagtgttgcaaggatgatcattgtataatgttatgatattttggaatggtcaagttttcttgaggc

SEQ ID NO: 38097 - protein, 475 aa, Arabidopsis thaliana
  peptide (1)..(475): Ceres Seq. ID no. 13494003
IIKVKMTNFKDNDGDGTKLHVVMFPWLAFGHMVPYLELSKLIAQKGHKVSFISTPRNIDRLLPRLPENLSSVINFVKLSLPVGDNKLPEDGEATTDVPFELIPYLKIAYDGLKVPVTEFLESSKPDWVLQDFAGFWLPPISRRLGIKTGFFSAFNGATLGILKPPGFEEYRTSPADFMKPPKWVPFETSVAFKLFECRFIFKGFMAETTEGNVPDIHRVGGVIDGCDVIFVRSCYEYEAEWLGLTQELHRKPVIPVGVLPPKPDEKFEDTDTWLSVKKWLDSRKSKSIVYVAFGSEAKPSQTELNEIALGLELSGLPFFWVLKTRRGPWDTEPVELPEGFEERTADRGMVWRGWVEQLRTLSHDSIGLVLTHPGWGTIIEAIRFAKPMAMLVFVYDQGLNARVIEEKKIGYMIPRDETEGFFTKESVANSLRLVMVEEEGKVYRENVKEMKGVFGDMDRQDRYVDSFLEYLVTNR

SEQ ID NO: 38098 - protein, 470 aa, Arabidopsis thaliana
  peptide (1)..(470): Ceres Seq. ID no. 13494004
MTNFKDNDGDGTKLHVVMFPWLAFGHMVPYLELSKLIAQKGHKVSFISTPRNIDRLLPRLPENLSSVINFVKLSLPVGDNKLPEDGEATTDVPFELIPYLKIAYDGLKVPVTEFLESSKPDWVLQDFAGFWLPPISRRLGIKTGFFSAFNGATLGILKPPGFEEYRTSPADFMKPPKWVPFETSVAFKLFECRFIFKGFMAETTEGNVPDIHRVGGVIDGCDVIFVRSCYEYEAEWLGLTQELHRKPVIPVGVLPPKPDEKFEDTDTWLSVKKWLDSRKSKSIVYVAFGSEAKPSQTELNEIALGLELSGLPFFWVLKTRRGPWDTEPVELPEGFEERTADRGMVWRGWVEQLRTLSHDSIGLVLTHPGWGTIIEAIRFAKPMAMLVFVYDQGLNARVIEEKKIGYMIPRDETEGFFTKESVANSLRLVMVEEEGKVYRENVKEMKGVFGDMDRQDRYVDSFLEYLVTNR

SEQ ID NO: 38099 - protein, 453 aa, Arabidopsis thaliana
  peptide (1)..(453): Ceres Seq. ID no. 13494005
MFPWLAFGHMVPYLELSKLIAQKGHKVSFISTPRNIDRLLPRLPENLSSVINFVKLSLPVGDNKLPEDGEATTDVPFELIPYLKIAYDGLKVPVTEFLESSKPDWVLQDFAGFWLPPISRRLGIKTGFFSAFNGATLGILKPPGFEEYRTSPADFMKPPKWVPFETSVAFKLFECRFIFKGFMAETTEGNVPDIHRVGGVIDGCDVIFVRSCYEYEAEWLGLTQELHRKPVIPVGVLPPKPDEKFEDTDTWLSVKKWLDSRKSKSIVYVAFGSEAKPSQTELNEIALGLELSGLPFFWVLKTRRGPWDTEPVELPEGFEERTADRGMVWRGWVEQLRTLSHDSIGLVLTHPGWGTIIEAIRFAKPMAMLVFVYDQGLNARVIEEKKIGYMIPRDETEGFFTKESVANSLRLVMVEEEGKVYRENVKEMKGVFGDMDRQDRYVDSFLEYLVTNR

SEQ ID NO: 38100 - DNA, 1188 bp, Arabidopsis thaliana
  misc_feature (1)..(1188): Ceres Seq. ID no. 13488410
  misc_feature (1)..(1188): Ortholog of  Ceres SEQ ID NO 15175697 as cited in SEQ ID NO 55165
aaatgatcattttaatttttcatgttactctctccttcttcttcacttgttctctttctcatcgcctcttgattcacgcgaacgagaaagcgacgatcgtaaccaccggcgctgaccaaaaagtaatcgattctcttcccgagctgatctctcagcttcaggtgtcttgaatctgaatctgtggctatatttggtgctcggtggtgagcaggaagggagggggatattgtcagggttttaatgtacgtcagatgaatagagcaactaatgttactggcagtagaaggagggggtttattctcagcgtccgcgtctgggtatagtaagggattgacccttcttttctctggtgataaagacgtagataggcccatgagagttgtcccgtggaatcactaccaggtggttgaccaagagcctgaggctgaccctgttcttcagctggattctattaagaaccgagtttcccgcggttgcgctgcttccttcagttgttttggtggcgcttccgcgggacttgagaccccttctcctcttaaagttgaacctgtgcagcagcagcatcgtgaaatatcatcaccagagtctgttgttgttgtttctgaaaagggtaaagaccaaataagtgaagctgataatggcagcagcaaagaagctttcaaactctcgttgaggagtagcttgaagaggccctctgttgcggaatcacgctctctagaagatataaaagaatacgagacgttgagtgtggatggtagcgatctcactggtgacatggcaaggcggaaagttcagtggcctgatgcttgtggtagtgaactcactcaagttagagaatttgagccgagtgagatgggattatcagatgaagaatgggaggtaggacgacaaagaacatgttcgtgtgtgatcatgtaaattcagaaatcatcggtatcactctttactcatgtcttgtgtgcattgctcatatatttaaagtgtatctgttattacaaaagttctcttcaaggttttggcttgtacattattccctttgttttgagtggcaacttgttccgggtttctgttttctaaaaacgataagacaacatccaaatcgatgcaaagtggaagagagtggcaataactcttgttcttgtaacgctctcaaccacattacgtacgtgtacaacaaaactagaatgc

SEQ ID NO: 38101 - protein, 216 aa, Arabidopsis thaliana
  peptide (1)..(216): Ceres Seq. ID no. 13488411
MLLAVEGGGLFSASASGYSKGLTLLFSGDKDVDRPMRVVPWNHYQVVDQEPEADPVLQLDSIKNRVSRGCAASFSCFGGASAGLETPSPLKVEPVQQQHREISSPESVVVVSEKGKDQISEADNGSSKEAFKLSLRSSLKRPSVAESRSLEDIKEYETLSVDGSDLTGDMARRKVQWPDACGSELTQVREFEPSEMGLSDEEWEVGRQRTCSCVIM

SEQ ID NO: 38102 - protein, 181 aa, Arabidopsis thaliana
  peptide (1)..(181): Ceres Seq. ID no. 13488412
MRVVPWNHYQVVDQEPEADPVLQLDSIKNRVSRGCAASFSCFGGASAGLETPSPLKVEPVQQQHREISSPESVVVVSEKGKDQISEADNGSSKEAFKLSLRSSLKRPSVAESRSLEDIKEYETLSVDGSDLTGDMARRKVQWPDACGSELTQVREFEPSEMGLSDEEWEVGRQRTCSCVIM

SEQ ID NO: 38103 - DNA, 959 bp, Arabidopsis thaliana
  misc_feature (1)..(959): Ceres Seq. ID no. 13591405
  misc_feature (1)..(959): Ortholog of  Ceres SEQ ID NO 13596958 as cited in SEQ ID NO 63319
  misc_feature (1)..(959): Ortholog of  Ceres SEQ ID NO 12614814 as cited in SEQ ID NO 68816
gtaggagaagaaagttctcatttcataattgtatcaaattgtgagaggaaaaaaagaagttcaagaaatggagaaggaaggactcgggcttgagataacggagctgagattggggcttccggggagagatgtggcagagaagatgatgaagaagagagctttcacggagatgaatatgacgtcgtcgggtagtaatagtgatcaatgtgaaagcggcgtcgtttcatctggtggtgacgctgagaaggttaatgattcgccggcggcgaaaagccaggtggtggggtggccaccggtttgttcttaccggaagaaaaacagctgtaaggaagcttcgaccacgaaagtggggttagggtatgtgaaagtgagcatggatggtgtgccttatttgaggaagatggatcttggttcgagccaaggctatgatgatctagcctttgctcttgataagctcttcggtttccgtggcatcggtgtggccttgaaagatggtgacaactgcgaatacgttaccatatacgaagacaaagatggagactggatgctcgccggtgatgtaccttgggggatgtttctagagtcatgcaagaggttgagaataatgaaaagatcggatgctaccgggtttgggctgcagcctagaggagtagacgagtgatgatgacttgaacaagaagcaaggagctggttcattaatttaatcttaaacttgatcatcaagatcctttagaacatttttcctattcatgttatataaatatatatgttatagtatattattttgcaacaaaatttcatgttatggttttgcataattatcttcagaaagacagctatatatatatacactacttgtttcttgagtgttgagttaaaacattaatctgtttcaaaatttattgttatttcggatctatatatgtgtgtagaaacatatgtaataagtatccattatt

SEQ ID NO: 38104 - protein, 197 aa, Arabidopsis thaliana
  peptide (1)..(197): Ceres Seq. ID no. 13591406
MEKEGLGLEITELRLGLPGRDVAEKMMKKRAFTEMNMTSSGSNSDQCESGVVSSGGDAEKVNDSPAAKSQVVGWPPVCSYRKKNSCKEASTTKVGLGYVKVSMDGVPYLRKMDLGSSQGYDDLAFALDKLFGFRGIGVALKDGDNCEYVTIYEDKDGDWMLAGDVPWGMFLESCKRLRIMKRSDATGFGLQPRGVDE

SEQ ID NO: 38105 - protein, 172 aa, Arabidopsis thaliana
  peptide (1)..(172): Ceres Seq. ID no. 13591407
MMKKRAFTEMNMTSSGSNSDQCESGVVSSGGDAEKVNDSPAAKSQVVGWPPVCSYRKKNSCKEASTTKVGLGYVKVSMDGVPYLRKMDLGSSQGYDDLAFALDKLFGFRGIGVALKDGDNCEYVTIYEDKDGDWMLAGDVPWGMFLESCKRLRIMKRSDATGFGLQPRGVDE

SEQ ID NO: 38106 - protein, 171 aa, Arabidopsis thaliana
  peptide (1)..(171): Ceres Seq. ID no. 13591408
MKKRAFTEMNMTSSGSNSDQCESGVVSSGGDAEKVNDSPAAKSQVVGWPPVCSYRKKNSCKEASTTKVGLGYVKVSMDGVPYLRKMDLGSSQGYDDLAFALDKLFGFRGIGVALKDGDNCEYVTIYEDKDGDWMLAGDVPWGMFLESCKRLRIMKRSDATGFGLQPRGVDE

SEQ ID NO: 38107 - DNA, 1103 bp, Arabidopsis thaliana
  misc_feature (1)..(1103): Ceres Seq. ID no. 12328785
  misc_feature (1)..(1103): Ortholog of  Ceres SEQ ID NO 13504028 as cited in SEQ ID NO 56107
attcgaacaattaccgacacacaaaaagtttgaagagaaaaacaaaaaatgttgtcgagattgttcaaggcaggtgaaaaggttttgtcgaatctcgttagcaagaaagacatttacatggcgtcgaggaatcaggagaaatctcccaaagtgcaagagctttacgacctctgcaaagagactttcactggcaaagctccttctcctgcttccatggctatccaaaagctatgctctgtgttggactcagttagtcctgcagatgttgggcttgaagaggtatctcaagacgatgatcgaggctatggagtttctggggttagccgtttcaatagagtaggacgatgggcacaaccgataacattcttagacattcatgaatgtgatacttttacaatgtgtattttctgcttcccaacgtcttcagtgatcccattgcatgatcatccagagatggctgtgtttagtaaaatcctctatggatcacttcatgttaaagcttacgattgggtcgaacctccatgtattatcacacaagataaaggcgtccccggttctcttccaaggttggcgaaattggtgagtgacaaagttataacgcctcagtctgagataccggcgttgtacccaaagactggaggcaatctccattgcttcactgcgttgactccatgtgctgtgctcgacattctctcacctccttacaaagaaagtgttggcaggagttgcagttactacatggactatccgttttccactttcgcattggagaacggaatgaagaaggtggatgaaggaaaggaagacgaatacgcatggcttgtacagattgacacgcccgatgatcttcacatgcgtcccggatcatatactggtccaactatcagagtctagatatttgtggtttgttttgtagcaaagtagagcaactcttgtaacattccaagataagtttctggagaagatatcaatacgatttcagattaaagatgaactctttgtttagtccatgtccacttctcagttctcacacgcattcaagcaaatgaaactgcggaaaactacaaatagatcggcaatgagaaatgttaagatttcatttc

SEQ ID NO: 38108 - protein, 281 aa, Arabidopsis thaliana
  peptide (1)..(281): Ceres Seq. ID no. 12328786
MLSRLFKAGEKVLSNLVSKKDIYMASRNQEKSPKVQELYDLCKETFTGKAPSPASMAIQKLCSVLDSVSPADVGLEEVSQDDDRGYGVSGVSRFNRVGRWAQPITFLDIHECDTFTMCIFCFPTSSVIPLHDHPEMAVFSKILYGSLHVKAYDWVEPPCIITQDKGVPGSLPRLAKLVSDKVITPQSEIPALYPKTGGNLHCFTALTPCAVLDILSPPYKESVGRSCSYYMDYPFSTFALENGMKKVDEGKEDEYAWLVQIDTPDDLHMRPGSYTGPTIRV

SEQ ID NO: 38109 - protein, 258 aa, Arabidopsis thaliana
  peptide (1)..(258): Ceres Seq. ID no. 12328787
MASRNQEKSPKVQELYDLCKETFTGKAPSPASMAIQKLCSVLDSVSPADVGLEEVSQDDDRGYGVSGVSRFNRVGRWAQPITFLDIHECDTFTMCIFCFPTSSVIPLHDHPEMAVFSKILYGSLHVKAYDWVEPPCIITQDKGVPGSLPRLAKLVSDKVITPQSEIPALYPKTGGNLHCFTALTPCAVLDILSPPYKESVGRSCSYYMDYPFSTFALENGMKKVDEGKEDEYAWLVQIDTPDDLHMRPGSYTGPTIRV

SEQ ID NO: 38110 - protein, 226 aa, Arabidopsis thaliana
  peptide (1)..(226): Ceres Seq. ID no. 12328788
MAIQKLCSVLDSVSPADVGLEEVSQDDDRGYGVSGVSRFNRVGRWAQPITFLDIHECDTFTMCIFCFPTSSVIPLHDHPEMAVFSKILYGSLHVKAYDWVEPPCIITQDKGVPGSLPRLAKLVSDKVITPQSEIPALYPKTGGNLHCFTALTPCAVLDILSPPYKESVGRSCSYYMDYPFSTFALENGMKKVDEGKEDEYAWLVQIDTPDDLHMRPGSYTGPTIRV

SEQ ID NO: 38111 - DNA, 1278 bp, Arabidopsis thaliana
  misc_feature (1)..(1278): Ceres Seq. ID no. 12482452
  misc_feature (1)..(1278): Ortholog of  Ceres SEQ ID NO 14311568 as cited in SEQ ID NO 51732
  misc_feature (1)..(1278): Ortholog of  Ceres SEQ ID NO 14303877 as cited in SEQ ID NO 53500
  misc_feature (1)..(1278): Ortholog of  Ceres SEQ ID NO 15169781 as cited in SEQ ID NO 54829
  misc_feature (1)..(1278): Ortholog of  Ceres SEQ ID NO 15173757 as cited in SEQ ID NO 57537
  misc_feature (1)..(1278): Ortholog of  Ceres SEQ ID NO 13597743 as cited in SEQ ID NO 65452
  misc_feature (1)..(1278): Ortholog of  Ceres SEQ ID NO 13654231 as cited in SEQ ID NO 68285
aataaaatttggtttaaaattccaaaattctctcaaatctttaatatatattttccaataacaaaagatatatatctcctcaaattttctagggaatacagtatttgtgtgtttgagacagatttttgcagattctctcgttctgcattctctgttcttcttctgatgtatccatcaatcgaagacgatgatgatcttctcgctgctctttgttttgatcaaagcaatggagtagaagatccttatggatatatgcaaacaaatgaagataacatatttcaggattttgggtcttgtggtgtgaatctgatgcagccacaacaagaacaatttgattcttttaatggaaatcttgagcaagtttgtagtagctttagaggaggaaacaatggagttgtttatagtagtagcattggatcagcacaattggatttggctgcatcgtttagtggagttttgcagcaagagacacatcaagtctgtggctttagaggacaaaacgacgattctgcagtgcctcatttgcagcagcaacaaggacaggtgtttagtggtgtagtggaaatcaattcttcgtcatctgttggagctgttaaggaagagtttgaggaagaatgttcggggaagaggagacgaactggatcatgtagcaagccaggaaccaaagcctgtcgcgagaaactaagaagggaaaagctaaatgacaagttcatggacttgagctctgttttagagcctggcaggactccaaagacggataaatcagctatactcgacgatgcaatccgggttgtgaatcagcttagaggtgaagctcatgagcttcaagaaaccaaccaaaagcttctagaagagatcaagagtctaaaggcggataaaaacgagctacgagaggaaaagctggtgttgaaggcggagaaggagaagatggagcaacagttaaaatctatggtggttccatcaccaggtttcatgccctcccagcatccagcagctttccattcccataagatggcggtggcttacccttacggctactatcctccaaacatgccaatgtggtcacccttacctcctgctgaccgtgatacgtctcgtgatctcaaaaatcttcctcctgttgcttaatcttcttcatgttgattcatcattgatcattgttatcaatcccttaggaatttttgttccttcagatgattctttaatcagtagttttgcagtaaccatttggagattagagaattttatgatttgaataaaatgtcagtttcctggtgg

SEQ ID NO: 38112 - protein, 375 aa, Arabidopsis thaliana
  peptide (1)..(375): Ceres Seq. ID no. 12482453
NKIWFKIPKFSQIFNIYFPITKDIYLLKFSREYSICVFETDFCRFSRSAFSVLLLMYPSIEDDDDLLAALCFDQSNGVEDPYGYMQTNEDNIFQDFGSCGVNLMQPQQEQFDSFNGNLEQVCSSFRGGNNGVVYSSSIGSAQLDLAASFSGVLQQETHQVCGFRGQNDDSAVPHLQQQQGQVFSGVVEINSSSSVGAVKEEFEEECSGKRRRTGSCSKPGTKACREKLRREKLNDKFMDLSSVLEPGRTPKTDKSAILDDAIRVVNQLRGEAHELQETNQKLLEEIKSLKADKNELREEKLVLKAEKEKMEQQLKSMVVPSPGFMPSQHPAAFHSHKMAVAYPYGYYPPNMPMWSPLPPADRDTSRDLKNLPPVA

SEQ ID NO: 38113 - protein, 320 aa, Arabidopsis thaliana
  peptide (1)..(320): Ceres Seq. ID no. 12482454
MYPSIEDDDDLLAALCFDQSNGVEDPYGYMQTNEDNIFQDFGSCGVNLMQPQQEQFDSFNGNLEQVCSSFRGGNNGVVYSSSIGSAQLDLAASFSGVLQQETHQVCGFRGQNDDSAVPHLQQQQGQVFSGVVEINSSSSVGAVKEEFEEECSGKRRRTGSCSKPGTKACREKLRREKLNDKFMDLSSVLEPGRTPKTDKSAILDDAIRVVNQLRGEAHELQETNQKLLEEIKSLKADKNELREEKLVLKAEKEKMEQQLKSMVVPSPGFMPSQHPAAFHSHKMAVAYPYGYYPPNMPMWSPLPPADRDTSRDLKNLPPVA

SEQ ID NO: 38114 - protein, 291 aa, Arabidopsis thaliana
  peptide (1)..(291): Ceres Seq. ID no. 12482455
MQTNEDNIFQDFGSCGVNLMQPQQEQFDSFNGNLEQVCSSFRGGNNGVVYSSSIGSAQLDLAASFSGVLQQETHQVCGFRGQNDDSAVPHLQQQQGQVFSGVVEINSSSSVGAVKEEFEEECSGKRRRTGSCSKPGTKACREKLRREKLNDKFMDLSSVLEPGRTPKTDKSAILDDAIRVVNQLRGEAHELQETNQKLLEEIKSLKADKNELREEKLVLKAEKEKMEQQLKSMVVPSPGFMPSQHPAAFHSHKMAVAYPYGYYPPNMPMWSPLPPADRDTSRDLKNLPPVA

SEQ ID NO: 38115 - DNA, 1273 bp, Arabidopsis thaliana
  misc_feature (1)..(1273): Ceres Seq. ID no. 12326735
  misc_feature (1)..(1273): Ortholog of  Ceres SEQ ID NO 12636774 as cited in SEQ ID NO 372
  misc_feature (1)..(1273): Ortholog of  Ceres SEQ ID NO 15175492 as cited in SEQ ID NO 56277
  misc_feature (1)..(1273): Ortholog of  Ceres SEQ ID NO 13582350 as cited in SEQ ID NO 56734
  misc_feature (1)..(1273): Ortholog of  Ceres SEQ ID NO 12476493 as cited in SEQ ID NO 58163
  misc_feature (1)..(1273): Ortholog of  Ceres SEQ ID NO 14310807 as cited in SEQ ID NO 58696
  misc_feature (1)..(1273): Ortholog of  Ceres SEQ ID NO 12615466 as cited in SEQ ID NO 62761
  misc_feature (1)..(1273): Ortholog of  Ceres SEQ ID NO 13597295 as cited in SEQ ID NO 63743
  misc_feature (1)..(1273): Ortholog of  Ceres SEQ ID NO 12617090 as cited in SEQ ID NO 64005
  misc_feature (1)..(1273): Ortholog of  Ceres SEQ ID NO 15226458 as cited in SEQ ID NO 64042
  misc_feature (1)..(1273): Ortholog of  Ceres SEQ ID NO 13597439 as cited in SEQ ID NO 64081
  misc_feature (1)..(1273): Ortholog of  Ceres SEQ ID NO 13597233 as cited in SEQ ID NO 64370
  misc_feature (1)..(1273): Ortholog of  Ceres SEQ ID NO 13598327 as cited in SEQ ID NO 68040
  misc_feature (1)..(1273): Ortholog of  Ceres SEQ ID NO 13599438 as cited in SEQ ID NO 0
cttagagccttttaaaagtaaccaacgccatgaatatcttccaagactggcctgagcctatagtccgtgtccaatccttatctgaaagcaacctcggagccataccaaatcgctacgtcaagcctctatctcagcgtccaaacataacccctcacaacaaacacaaccctcagaccaccaccatccccatcattgacttaggtcgcctatacacggacgacctaactctacaagccaaaacgcttgatgaaatctcaaaggcttgtagagaattgggatttttccaagtggtgaaccacgggatgagtcctcagctcatggaccaagctaaagcaacatggagagaattctttaatctccccatggaactcaaaaatatgcatgctaattcgccgaaaacttacgagggatatggaagccgactaggcgtagaaaagggtgctattcttgattggagcgactactattatctccattaccagccttcgtctttgaaggattacaccaagtggccttccttgcctcttcattgccgagaaatattggaggattattgcaaggaaatggtgaaactatgcgagaacttgatgaaaatcttatccaaaaacttgggattacaagaagacagacttcaaaatgcatttggtggtaaagaggaatcaggtggatgtttaagggttaattattacccaaaatgccctcaaccggagctgactctcggtatctctccgcactctgatcccggcggtttgaccattctcttgccggacgaacaagtcgccagtcttcaggtccgtggatccgacgacgcttggatcacagtcgaaccagctcctcatgctttcatcgttaacatgggtgaccaaattcagatgctgagcaattcaatatacaaaagcgtagaacacagagtgatcgtgaaccctgaaaatgagaggttgtcattggcatttttctacaacccaaagggcaatgttcctatcgagccattgaaggagctagtgaccgtagattcacctgctctctactcctccaccacatacgatcgttaccgtcaattcattcgtacgcaaggcccacgtagcaaatgtcatattgacgaacttaaatcccctcgatagtgcgtacatttgatttgttaatagtgaactatgcgttcttgttgtataaataatgaacaatgcttctttttatctgttataagtactgtaatatttattgtgtttgttatgtgagcatgtttatattatgttttaggatatgggtttgatgc

SEQ ID NO: 38116 - protein, 363 aa, Arabidopsis thaliana
  peptide (1)..(363): Ceres Seq. ID no. 12326736
MNIFQDWPEPIVRVQSLSESNLGAIPNRYVKPLSQRPNITPHNKHNPQTTTIPIIDLGRLYTDDLTLQAKTLDEISKACRELGFFQVVNHGMSPQLMDQAKATWREFFNLPMELKNMHANSPKTYEGYGSRLGVEKGAILDWSDYYYLHYQPSSLKDYTKWPSLPLHCREILEDYCKEMVKLCENLMKILSKNLGLQEDRLQNAFGGKEESGGCLRVNYYPKCPQPELTLGISPHSDPGGLTILLPDEQVASLQVRGSDDAWITVEPAPHAFIVNMGDQIQMLSNSIYKSVEHRVIVNPENERLSLAFFYNPKGNVPIEPLKELVTVDSPALYSSTTYDRYRQFIRTQGPRSKCHIDELKSPR

SEQ ID NO: 38117 - protein, 272 aa, Arabidopsis thaliana
  peptide (1)..(272): Ceres Seq. ID no. 12326737
MSPQLMDQAKATWREFFNLPMELKNMHANSPKTYEGYGSRLGVEKGAILDWSDYYYLHYQPSSLKDYTKWPSLPLHCREILEDYCKEMVKLCENLMKILSKNLGLQEDRLQNAFGGKEESGGCLRVNYYPKCPQPELTLGISPHSDPGGLTILLPDEQVASLQVRGSDDAWITVEPAPHAFIVNMGDQIQMLSNSIYKSVEHRVIVNPENERLSLAFFYNPKGNVPIEPLKELVTVDSPALYSSTTYDRYRQFIRTQGPRSKCHIDELKSPR

SEQ ID NO: 38118 - protein, 267 aa, Arabidopsis thaliana
  peptide (1)..(267): Ceres Seq. ID no. 12326738
MDQAKATWREFFNLPMELKNMHANSPKTYEGYGSRLGVEKGAILDWSDYYYLHYQPSSLKDYTKWPSLPLHCREILEDYCKEMVKLCENLMKILSKNLGLQEDRLQNAFGGKEESGGCLRVNYYPKCPQPELTLGISPHSDPGGLTILLPDEQVASLQVRGSDDAWITVEPAPHAFIVNMGDQIQMLSNSIYKSVEHRVIVNPENERLSLAFFYNPKGNVPIEPLKELVTVDSPALYSSTTYDRYRQFIRTQGPRSKCHIDELKSPR

SEQ ID NO: 38119 - DNA, 845 bp, Arabidopsis thaliana
  misc_feature (1)..(845): Ceres Seq. ID no. 12579572
  misc_feature (1)..(845): Ortholog of  Ceres SEQ ID NO 13583408 as cited in SEQ ID NO 62616
acaccttttctccagagttccgacaagaagaagaacgccgagaacaggaagcttatcttcaaaagagccgagcaatactccaaggaatatgccgagaaggagaaggagttgatctcgttgaaacgcgaggccaagcttaagggaggtttctatgttgaccctgaagctaagctcttgttcatcatccgtatccgtggtatcaatgccattgaccctaagactaagaagattctccagctcttgcgtttgagacagattttcaatggtgttttccttaaagtcaacaaggctacgatgaacatgcttcgccgtgttgagccctatgtcacttacggattccctaacttgaagagtgtcaaggaattgatctacaagagaggttacggaaagcttaaccaccagaggatagctttgactgacaactctattgtagagcaggctcttggaaagcatggtatcatttgcactgaggatttgatccacgagattctaacagtaggacctcatttcaaggaagccaacaacttcctttggccattccagcttaaggcaccactaggtggcctcaagaagaagagaaatcactacgtggaaggtggtgatgccggaaaccgtgagaacttcatcaatgagcttatcaggaggatgaattagaatgttatcgttttcaatgtcaaacttctctgcgttttcattatgtgcctcctggattttgatcttctttctcaagttaaaagacattttgaatcttctcttttgttctctttggatcttaatttgtgctttgattactgcaagtgattctacatttctctttaataggattattaagaaactgtttcttc

SEQ ID NO: 38120 - protein, 217 aa, Arabidopsis thaliana
  peptide (1)..(217): Ceres Seq. ID no. 12579573
TPFLQSSDKKKNAENRKLIFKRAEQYSKEYAEKEKELISLKREAKLKGGFYVDPEAKLLFIIRIRGINAIDPKTKKILQLLRLRQIFNGVFLKVNKATMNMLRRVEPYVTYGFPNLKSVKELIYKRGYGKLNHQRIALTDNSIVEQALGKHGIICTEDLIHEILTVGPHFKEANNFLWPFQLKAPLGGLKKKRNHYVEGGDAGNRENFINELIRRMN

SEQ ID NO: 38121 - protein, 119 aa, Arabidopsis thaliana
  peptide (1)..(119): Ceres Seq. ID no. 12579574
MNMLRRVEPYVTYGFPNLKSVKELIYKRGYGKLNHQRIALTDNSIVEQALGKHGIICTEDLIHEILTVGPHFKEANNFLWPFQLKAPLGGLKKKRNHYVEGGDAGNRENFINELIRRMN

SEQ ID NO: 38122 - protein, 117 aa, Arabidopsis thaliana
  peptide (1)..(117): Ceres Seq. ID no. 12579575
MLRRVEPYVTYGFPNLKSVKELIYKRGYGKLNHQRIALTDNSIVEQALGKHGIICTEDLIHEILTVGPHFKEANNFLWPFQLKAPLGGLKKKRNHYVEGGDAGNRENFINELIRRMN

SEQ ID NO: 38123 - DNA, 836 bp, Arabidopsis thaliana
  misc_feature (1)..(836): Ceres Seq. ID no. 12562066
  misc_feature (1)..(836): Ortholog of  Ceres SEQ ID NO 12624653 as cited in SEQ ID NO 61262
  misc_feature (1)..(836): Ortholog of  Ceres SEQ ID NO 12579223 as cited in SEQ ID NO 0
  misc_feature (1)..(836): Ortholog of  Ceres SEQ ID NO 12635708 as cited in SEQ ID NO 0
aaaatcagcctcttcgttttctttctcctcctgtctgttgatttaaagacccaaatctgacgcttctctctctctttctggtatctgcgtttgattcggagaagaaaaaaaaaaaaaaggcaaagagagagcttcaatggagttagcttctttccttggtagagctctgtttgtttccgtatttcttctctccgcatggcaagagttcaatgattttggtgaagatggtggccgatcagctaaatctttgaaaccaaaattcaatgcctttgtaaaccatgtgacaactcacactggccagcaattgccaccagtcgatatgaagattcttgttgctgctgctatagccttgaagggtattgggggactattgtttgtctttggcagctcattgggagcttatctcttgcttctgcatcaagccgttgccaccccaattctgtatgatttctacaactacgatgttgacagaaaggaattcggccaactattttcaaaatttacacagagcttggctcttcttggaggactgctcttcttcattggaatgaaaaactcaaggaaacacggtaggcaactcaggaaaaaggctccaaaggcaaaagcaaactgaagaagccatatctttcatcggttttattcggtctgtattttattttcattttggaatccaggatgggtttaaagagtctatctgatgaggccattgaaaggcaaaatctctgcaaatcattttgcttacttcaagaagcttttatgacacttttttgtagaaatatttatggattattgtttcttagagacaccacttcaatgttaatgttccaacttatttc

SEQ ID NO: 38124 - protein, 158 aa, Arabidopsis thaliana; identical to SEQ ID NO: 26093
  peptide (1)..(158): Ceres Seq. ID no. 12562067

SEQ ID NO: 38125 - protein, 97 aa, Arabidopsis thaliana; identical to SEQ ID NO: 26094
  peptide (1)..(97): Ceres Seq. ID no. 12562068

SEQ ID NO: 38126 - DNA, 2318 bp, Arabidopsis thaliana
  misc_feature (1)..(2318): Ceres Seq. ID no. 12328608
  misc_feature (1)..(2318): Ortholog of  Ceres SEQ ID NO 15225222 as cited in SEQ ID NO 53759
attttttggcttcaatttttgcgttttctctgcaactcgccgtcaagggtagaagaattaggggttcctgttcttaactgcttgaagatgacgtcttatggagatagactgaagtcgacctccattaatggagttaagttatacaatgtttcttctgctcccaatgttcctacttggcttaatcctaagaagcaacgagctctccgcaaaaaccctcattatatgcaaagagtggagctgattcaggagttgaagtttgagactgccactactagaatcaaagcgactccagacggagagtatctgattgcttcaggcatatatccaccacaggtaaaagtttatgagctaaatcagcttgctttgaagtttgagaggcatttggactcggaaatagttgatttcgagatattggatgatgacttctcaaagcttgccttcttatgtgctgatcgttctattaatttacacgccaaatacgggaaacaccacactttacgaattccaaggatggggagagatatgacatatgattcctggtcttgtgatcttctttgcgctgcttcctcacctgatctatatagaatcaatttggagcagggaagatttctttctcctctcagcactcaatccccagcgcttaatgtcgtttctcgaagcaacctccatggattagttgcttgtggtggtgaggatggtgctgtggaattttttgatatgagaatgaaatcatctgctgctagaattaacgcggtcacacatggtggtgatgctgctgcggaggttactgctatagagtttgatgacagtgaaggtcttcaagtagctgtcgggagtagcgcgggaaaggtattcatatacgacttgcgtacttcaactcccataagagtgaaggatcacatgtacgagagcccaattttgaatattaagtggcaacggactcttaatactcaacaacctaagttgattactaccgacaaacacattgttagaatatgggatccaaacacgggagaaggtatgaccagcattgaaccgactcaaggaggaataaacgacatttgtgtgttccgtggaagcggacttatgcttcttgctttagactctagcctaatcccatcttacttcatacctgaactcggtcctgcccccaaatggtgttctcctcttgaaaatctaacggaagagttggaggaaagtgcacagacaactatttatgataattacaaatttttggcaatggaagatctggagaagttgcagctaactcatttgattggaacagatcttttgaaagcatctatgcatggatattttattaattaccatttgtacaaaaaggctttagcagtgattgaaccttttgcatttgatgattacttagaacgtaggaagcaagagaagttagaagagcagcgtacgcagagaatcacaaaaaagagacggttgccaaaggttaaccgagaccttgcagcaaggcttcatggggacgaatcagaggaggaaaataaaactgccgaggatggggaggccaccaagaaagtgctgaaaaagaagaaacccatacttactgacgagcatttcgtagatggtcggtttggttcgatgttccaaaatccggacttccaaattgataaggactcatatgaatatggtgtcctacaccctgttgcttcttcgaagaagcaaccttctctgttagatgaacactttgaagctgtatcagatgatgacgagaacagtgattctgatgcatcacagccttcagatgacgaggccgacgatggagacgcaactaggccaagcaagaaagcgagaactccgaagttgtatgaagtgaaagatgagcggcatgccgcagcttatcacaaccgcacttcactggctaaagaagatagtcttcctatgggcgagcgtgtcaaggctatagagaaccggcgtggcaactttggaggctcgaaagatatcaaattcggtcctggaggatcacgggagttttctttcaaggcgagagggtcatcaaagtacaaagaagatagagacgatgagtatgaagatgggcaaagaaacaagaggagaggagttcagtctcttggactgaaatcaacaaatattagaggcggtttcagaggtagaggaggtggtggttttagagggagaggaggcggcggttcccggggaaaaggtggccgtggtggtgggcgtggaagaggccggcaatgataaatgtagcttttcaggggctttattagatttgaaaaatgtgtcacctactattgagaatcttgaaacttaattgatcacatatacaattttgg

SEQ ID NO: 38127 - protein, 740 aa, Arabidopsis thaliana
  peptide (1)..(740): Ceres Seq. ID no. 12328609
IFWLQFLRFLCNSPSRVEELGVPVLNCLKMTSYGDRLKSTSINGVKLYNVSSAPNVPTWLNPKKQRALRKNPHYMQRVELIQELKFETATTRIKATPDGEYLIASGIYPPQVKVYELNQLALKFERHLDSEIVDFEILDDDFSKLAFLCADRSINLHAKYGKHHTLRIPRMGRDMTYDSWSCDLLCAASSPDLYRINLEQGRFLSPLSTQSPALNVVSRSNLHGLVACGGEDGAVEFFDMRMKSSAARINAVTHGGDAAAEVTAIEFDDSEGLQVAVGSSAGKVFIYDLRTSTPIRVKDHMYESPILNIKWQRTLNTQQPKLITTDKHIVRIWDPNTGEGMTSIEPTQGGINDICVFRGSGLMLLALDSSLIPSYFIPELGPAPKWCSPLENLTEELEESAQTTIYDNYKFLAMEDLEKLQLTHLIGTDLLKASMHGYFINYHLYKKALAVIEPFAFDDYLERRKQEKLEEQRTQRITKKRRLPKVNRDLAARLHGDESEEENKTAEDGEATKKVLKKKKPILTDEHFVDGRFGSMFQNPDFQIDKDSYEYGVLHPVASSKKQPSLLDEHFEAVSDDDENSDSDASQPSDDEADDGDATRPSKKARTPKLYEVKDERHAAAYHNRTSLAKEDSLPMGERVKAIENRRGNFGGSKDIKFGPGGSREFSFKARGSSKYKEDRDDEYEDGQRNKRRGVQSLGLKSTNIRGGFRGRGGGGFRGRGGGGSRGKGGRGGGRGRGRQ

SEQ ID NO: 38128 - protein, 711 aa, Arabidopsis thaliana
  peptide (1)..(711): Ceres Seq. ID no. 12328610
MTSYGDRLKSTSINGVKLYNVSSAPNVPTWLNPKKQRALRKNPHYMQRVELIQELKFETATTRIKATPDGEYLIASGIYPPQVKVYELNQLALKFERHLDSEIVDFEILDDDFSKLAFLCADRSINLHAKYGKHHTLRIPRMGRDMTYDSWSCDLLCAASSPDLYRINLEQGRFLSPLSTQSPALNVVSRSNLHGLVACGGEDGAVEFFDMRMKSSAARINAVTHGGDAAAEVTAIEFDDSEGLQVAVGSSAGKVFIYDLRTSTPIRVKDHMYESPILNIKWQRTLNTQQPKLITTDKHIVRIWDPNTGEGMTSIEPTQGGINDICVFRGSGLMLLALDSSLIPSYFIPELGPAPKWCSPLENLTEELEESAQTTIYDNYKFLAMEDLEKLQLTHLIGTDLLKASMHGYFINYHLYKKALAVIEPFAFDDYLERRKQEKLEEQRTQRITKKRRLPKVNRDLAARLHGDESEEENKTAEDGEATKKVLKKKKPILTDEHFVDGRFGSMFQNPDFQIDKDSYEYGVLHPVASSKKQPSLLDEHFEAVSDDDENSDSDASQPSDDEADDGDATRPSKKARTPKLYEVKDERHAAAYHNRTSLAKEDSLPMGERVKAIENRRGNFGGSKDIKFGPGGSREFSFKARGSSKYKEDRDDEYEDGQRNKRRGVQSLGLKSTNIRGGFRGRGGGGFRGRGGGGSRGKGGRGGGRGRGRQ

SEQ ID NO: 38129 - protein, 666 aa, Arabidopsis thaliana
  peptide (1)..(666): Ceres Seq. ID no. 12328611
MQRVELIQELKFETATTRIKATPDGEYLIASGIYPPQVKVYELNQLALKFERHLDSEIVDFEILDDDFSKLAFLCADRSINLHAKYGKHHTLRIPRMGRDMTYDSWSCDLLCAASSPDLYRINLEQGRFLSPLSTQSPALNVVSRSNLHGLVACGGEDGAVEFFDMRMKSSAARINAVTHGGDAAAEVTAIEFDDSEGLQVAVGSSAGKVFIYDLRTSTPIRVKDHMYESPILNIKWQRTLNTQQPKLITTDKHIVRIWDPNTGEGMTSIEPTQGGINDICVFRGSGLMLLALDSSLIPSYFIPELGPAPKWCSPLENLTEELEESAQTTIYDNYKFLAMEDLEKLQLTHLIGTDLLKASMHGYFINYHLYKKALAVIEPFAFDDYLERRKQEKLEEQRTQRITKKRRLPKVNRDLAARLHGDESEEENKTAEDGEATKKVLKKKKPILTDEHFVDGRFGSMFQNPDFQIDKDSYEYGVLHPVASSKKQPSLLDEHFEAVSDDDENSDSDASQPSDDEADDGDATRPSKKARTPKLYEVKDERHAAAYHNRTSLAKEDSLPMGERVKAIENRRGNFGGSKDIKFGPGGSREFSFKARGSSKYKEDRDDEYEDGQRNKRRGVQSLGLKSTNIRGGFRGRGGGGFRGRGGGGSRGKGGRGGGRGRGRQ

SEQ ID NO: 38130 - DNA, 1521 bp, Arabidopsis thaliana
  misc_feature (1)..(1521): Ceres Seq. ID no. 13494689
  misc_feature (1)..(1521): Ortholog of  Ceres SEQ ID NO 14304573 as cited in SEQ ID NO 53242
  misc_feature (1)..(1521): Ortholog of  Ceres SEQ ID NO 15171148 as cited in SEQ ID NO 58167
gagtttttcattcatctatcggttgtttccattctcaggtttcagtcgaaaattccctctctttcttttcgatttgatctgggtttcattgtacatagctcgatcttcaagtttcgtcatctgggtcttgtaaagttttagacttttagggttgttttacttgtgaagtttctctcttttctaatggattctctgggtaattgatcgattagggtttaagattttagcggtggggaaagctgtttggttctagaattctatcttgattaacgtcacttgcagctttctcacaggttttggaattgtactaggttttgattgataatcatagattggtagtgatttgggagtttcttgattgtgtaatcatggcggaggctattggtgctgtatctttggtgggtcatcgaccttcaattgtgaggattacagtgaagaatgaattgaaaacgcagaaatcacagagcattgttcgctttccggtgaaggtagattatagtgcgaaaggtgttctctctcatttgatgacgcagagtgtgaaaaagaatcgaatgtcggtgtttccgatcagggctcttgctatggaattgacgaaagagaagaagaaagacgatcggttaccgaaaacttggaattatcttgattctggtgctgatgataagcctagtttatggcctcctgagaacaaagctgataagccttcattgcataatcctttacttaggcaagagcggatgggttgtggttggttaggtgctatatttgagtgggaaggagtattgattgaagacaatcctgacttggataaccaatcatggcttactttagctcaagaagaagggaaatctcctcctccggcttttatgctcagacgtgtcgaagggatgaagaacgagcaggccatatctgaggttctgtgttggtcgagagatcctgttcaagtgagaaggatggctaagcgtaaagaagagatctttaaagctctacatggaggagtgtatagactaagagatgggtcgcaggaatttgtcaatgtcttgatgaataataagatccctatggctttggtatcgactcgtcctcgggaaacattggagaatgcagttggatcgataggtatcagaaagttcttcagtgtgatagttgcatcggaagatgtttacagaggtaaaccagatcctgagatgttcatttacgcagcacagcttcttgatttcataccggaacgttgcattgtatttggaaactcaaaccagaccatagaggcagctcacgatgggaggatgaaatgtgtggctgtggcgagtaaacacccgatttatgagcttggtgcagctgagctggtggtaagaagactagacgagttatcgattatcgatttgaagaaacttgctgataccgatttgacagagttcgaaccggaattggagatggaaaaggaagatgagcgtgagctgccttcatcggctgtagcagttgatgatttctgatggaagtgatcttctgtaatgttgtacagtt

SEQ ID NO: 38131 - protein, 373 aa, Arabidopsis thaliana
  peptide (1)..(373): Ceres Seq. ID no. 13494690
MAEAIGAVSLVGHRPSIVRITVKNELKTQKSQSIVRFPVKVDYSAKGVLSHLMTQSVKKNRMSVFPIRALAMELTKEKKKDDRLPKTWNYLDSGADDKPSLWPPENKADKPSLHNPLLRQERMGCGWLGAIFEWEGVLIEDNPDLDNQSWLTLAQEEGKSPPPAFMLRRVEGMKNEQAISEVLCWSRDPVQVRRMAKRKEEIFKALHGGVYRLRDGSQEFVNVLMNNKIPMALVSTRPRETLENAVGSIGIRKFFSVIVASEDVYRGKPDPEMFIYAAQLLDFIPERCIVFGNSNQTIEAAHDGRMKCVAVASKHPIYELGAAELVVRRLDELSIIDLKKLADTDLTEFEPELEMEKEDERELPSSAVAVDDF

SEQ ID NO: 38132 - protein, 321 aa, Arabidopsis thaliana
  peptide (1)..(321): Ceres Seq. ID no. 13494691
MTQSVKKNRMSVFPIRALAMELTKEKKKDDRLPKTWNYLDSGADDKPSLWPPENKADKPSLHNPLLRQERMGCGWLGAIFEWEGVLIEDNPDLDNQSWLTLAQEEGKSPPPAFMLRRVEGMKNEQAISEVLCWSRDPVQVRRMAKRKEEIFKALHGGVYRLRDGSQEFVNVLMNNKIPMALVSTRPRETLENAVGSIGIRKFFSVIVASEDVYRGKPDPEMFIYAAQLLDFIPERCIVFGNSNQTIEAAHDGRMKCVAVASKHPIYELGAAELVVRRLDELSIIDLKKLADTDLTEFEPELEMEKEDERELPSSAVAVDDF

SEQ ID NO: 38133 - protein, 312 aa, Arabidopsis thaliana
  peptide (1)..(312): Ceres Seq. ID no. 13494692
MSVFPIRALAMELTKEKKKDDRLPKTWNYLDSGADDKPSLWPPENKADKPSLHNPLLRQERMGCGWLGAIFEWEGVLIEDNPDLDNQSWLTLAQEEGKSPPPAFMLRRVEGMKNEQAISEVLCWSRDPVQVRRMAKRKEEIFKALHGGVYRLRDGSQEFVNVLMNNKIPMALVSTRPRETLENAVGSIGIRKFFSVIVASEDVYRGKPDPEMFIYAAQLLDFIPERCIVFGNSNQTIEAAHDGRMKCVAVASKHPIYELGAAELVVRRLDELSIIDLKKLADTDLTEFEPELEMEKEDERELPSSAVAVDDF

SEQ ID NO: 38134 - DNA, 1127 bp, Arabidopsis thaliana
  misc_feature (1)..(1127): Ceres Seq. ID no. 13488517
  misc_feature (1)..(1127): Ortholog of  Ceres SEQ ID NO 14307589 as cited in SEQ ID NO 20466
  misc_feature (1)..(1127): Ortholog of  Ceres SEQ ID NO 15225111 as cited in SEQ ID NO 58444
  misc_feature (1)..(1127): Ortholog of  Ceres SEQ ID NO 13661001 as cited in SEQ ID NO 67531
  misc_feature (1)..(1127): Ortholog of  Ceres SEQ ID NO 15178920 as cited in SEQ ID NO 0
atattttcattgattttgcatattaatgcatatgttttcataaaaaaagaaaaacgagtgtaaagttattgatagtttctgttacttattaatttttaaggttatgtgtattattaccaattggaggactatatagtcgcaagtctcaaccctataaaagaaaacattcttcgatcatcttcccgcctcgagtatctctctctctctctctcttctctgttttctttattgattgcatagacaaaaatacacacatacacaacagaaagaaagatggagacgacgatgaagaagaaagggagagtgaaagcgacaataacgtcacagaaagaagaagaaggaacagtgagaaaaggaccatggactatggaagaagatttcatcctctttaattacatccttaatcatggtgaaggtctttggaactctgtcgccaaagcctctggtctaaaacgtactggaaaaagttgtcggctccggtggctgaactatctccgaccagatgtgcggcgagggaacataaccgaagaagaacagcttttgatcattcagcttcatgctaagcttggaaacaggtggtcgaagattgcgaagcatcttccgggaagaacggacaacgagataaagaacttctggaggacaaagattcagagacacatgaaagtgtcatcggaaaatatgatgaatcatcaacatcattgttcgggaaactcacagagctcggggatgacgacgcaaggcagctccggcaaagccatagacacggctgagagcttctctcaggcgaagacgacgacgtttaatgtggtggaacaacagtcaaacgagaattactggaacgttgaagatctgtggcccgtccacttgcttaatggtgaccaccatgtgatttaagatatatatatagacctcctatacatttatatgccccagctgggtttttttgtatggtacgttatttggtttttctattgctgaaatgtcgttgcatttaatttacatacgaaaagtgcattaaatcattaaatcttcaatacatatggaggtggtgtttgagtaacttctggtcgttaaagcatatatactactgtactctttttttttctttcaaattgttgttgtttttg

SEQ ID NO: 38135 - protein, 206 aa, Arabidopsis thaliana
  peptide (1)..(206): Ceres Seq. ID no. 13488518
METTMKKKGRVKATITSQKEEEGTVRKGPWTMEEDFILFNYILNHGEGLWNSVAKASGLKRTGKSCRLRWLNYLRPDVRRGNITEEEQLLIIQLHAKLGNRWSKIAKHLPGRTDNEIKNFWRTKIQRHMKVSSENMMNHQHHCSGNSQSSGMTTQGSSGKAIDTAESFSQAKTTTFNVVEQQSNENYWNVEDLWPVHLLNGDHHVI

SEQ ID NO: 38136 - protein, 202 aa, Arabidopsis thaliana
  peptide (1)..(202): Ceres Seq. ID no. 13488519
MKKKGRVKATITSQKEEEGTVRKGPWTMEEDFILFNYILNHGEGLWNSVAKASGLKRTGKSCRLRWLNYLRPDVRRGNITEEEQLLIIQLHAKLGNRWSKIAKHLPGRTDNEIKNFWRTKIQRHMKVSSENMMNHQHHCSGNSQSSGMTTQGSSGKAIDTAESFSQAKTTTFNVVEQQSNENYWNVEDLWPVHLLNGDHHVI

SEQ ID NO: 38137 - protein, 175 aa, Arabidopsis thaliana
  peptide (1)..(175): Ceres Seq. ID no. 13488520
MEEDFILFNYILNHGEGLWNSVAKASGLKRTGKSCRLRWLNYLRPDVRRGNITEEEQLLIIQLHAKLGNRWSKIAKHLPGRTDNEIKNFWRTKIQRHMKVSSENMMNHQHHCSGNSQSSGMTTQGSSGKAIDTAESFSQAKTTTFNVVEQQSNENYWNVEDLWPVHLLNGDHHVI

SEQ ID NO: 38138 - DNA, 1604 bp, Arabidopsis thaliana
  misc_feature (1)..(1604): Ceres Seq. ID no. 13489191
  misc_feature (1)..(1604): Ortholog of  Ceres SEQ ID NO 14316049 as cited in SEQ ID NO 67036
  misc_feature (1)..(1604): Ortholog of  Ceres SEQ ID NO 14313252 as cited in SEQ ID NO 67134
atttttgtctcatttttttactcaaacgaacattttcgtggctccagagctacactcaaaagccattcagcggaaggggttaggatttttggcggcgagatctctctgtttctggtagcttagcaatggccttatcttctctcctcagatctgccgccacttccgccgcagctcctcgtgtcgagctttatccatcgtcatcgtacaatcattctcaggtcacgtcaagtcttggattcagtcatagcctgacctcgtctagattttctggtgctgcagtttcaaccggaaaatacagtgcgaagagggttcaacccatcaaggccacagctacggaagcacctcctgctgttcataggtcaaggagcagtggaaagacaaaggttgggatcaacggttttggtcgaattggaagattggtcctccgcatcgcaacctttagggatgatatcgaggttgtagcagtcaacgatccattcatagatgccaagtacatggcttacatgttcaagtatgattctactcatggaaattacaaaggaactatcaatgtaattgatgattcaactttggagatcaatggaaaacaagtcaaagttgtcagcaagagagacccagctgaaatcccgtgggctgatcttggagctgagtatgttgttgagtcttcaggggtattcaccaccgttggacaagcttcatcacatttgaagggtggtgctaagaaggtcatcatttctgcaccttcagcggacgcgcccatgtttgttgttggagtaaatgaaaagacatacctgcctaacatggatatagtctccaatgcaagttgtaccaccaattgtcttgcacctcttgccaaggtggtgcatgaggaatttggtattcttgaaggcttgatgacaacagtccacgcgaccacagctactcagaaaactgtggacggcccatcaatgaaggactggagaggaggccgaggcgcaagtcaaaacatcattcctagctcaacaggcgctgcaaaggctgttggtaaggtccttccggaactcaatggaaaactaacaggaatggccttccgtgtcccaacaccaaatgtctctgttgtggatttaacttgtcgacttgagaaggatgcatcgtatgaagacgtcaaggcagccataaagtttgcatcagaaggaccacttaggggcattcttggatatacagaagaagatgtcgtctctaatgattttcttggagattcaaggtcaagtatctttgatgctaatgctgggattggattaagcaagtccttcatgaaacttgtctcctggtatgacaacgaatggggttacagcaaccgagtccttgacctgatagaacacatggcgttagttgcagccagccgctaaaaccatatcccgccaacgttcgttaggtagtttttgttacattgggggttcgattactgaaccttccggttttggctccaagttttatgtaaaaccatacgatatctaataatatggggaagattttttttgttgtacgaagaaatattgttagcagctagtcgaaaccttttctatatataaaaattggtttccaaagattggaattttctggct

SEQ ID NO: 38139 - protein, 420 aa, Arabidopsis thaliana
  peptide (1)..(420): Ceres Seq. ID no. 13489192
MALSSLLRSAATSAAAPRVELYPSSSYNHSQVTSSLGFSHSLTSSRFSGAAVSTGKYSAKRVQPIKATATEAPPAVHRSRSSGKTKVGINGFGRIGRLVLRIATFRDDIEVVAVNDPFIDAKYMAYMFKYDSTHGNYKGTINVIDDSTLEINGKQVKVVSKRDPAEIPWADLGAEYVVESSGVFTTVGQASSHLKGGAKKVIISAPSADAPMFVVGVNEKTYLPNMDIVSNASCTTNCLAPLAKVVHEEFGILEGLMTTVHATTATQKTVDGPSMKDWRGGRGASQNIIPSSTGAAKAVGKVLPELNGKLTGMAFRVPTPNVSVVDLTCRLEKDASYEDVKAAIKFASEGPLRGILGYTEEDVVSNDFLGDSRSSIFDANAGIGLSKSFMKLVSWYDNEWGYSNRVLDLIEHMALVAASR

SEQ ID NO: 38140 - protein, 297 aa, Arabidopsis thaliana
  peptide (1)..(297): Ceres Seq. ID no. 13489193
MAYMFKYDSTHGNYKGTINVIDDSTLEINGKQVKVVSKRDPAEIPWADLGAEYVVESSGVFTTVGQASSHLKGGAKKVIISAPSADAPMFVVGVNEKTYLPNMDIVSNASCTTNCLAPLAKVVHEEFGILEGLMTTVHATTATQKTVDGPSMKDWRGGRGASQNIIPSSTGAAKAVGKVLPELNGKLTGMAFRVPTPNVSVVDLTCRLEKDASYEDVKAAIKFASEGPLRGILGYTEEDVVSNDFLGDSRSSIFDANAGIGLSKSFMKLVSWYDNEWGYSNRVLDLIEHMALVAASR

SEQ ID NO: 38141 - protein, 294 aa, Arabidopsis thaliana
  peptide (1)..(294): Ceres Seq. ID no. 13489194
MFKYDSTHGNYKGTINVIDDSTLEINGKQVKVVSKRDPAEIPWADLGAEYVVESSGVFTTVGQASSHLKGGAKKVIISAPSADAPMFVVGVNEKTYLPNMDIVSNASCTTNCLAPLAKVVHEEFGILEGLMTTVHATTATQKTVDGPSMKDWRGGRGASQNIIPSSTGAAKAVGKVLPELNGKLTGMAFRVPTPNVSVVDLTCRLEKDASYEDVKAAIKFASEGPLRGILGYTEEDVVSNDFLGDSRSSIFDANAGIGLSKSFMKLVSWYDNEWGYSNRVLDLIEHMALVAASR

SEQ ID NO: 38142 - DNA, 1539 bp, Arabidopsis thaliana
  misc_feature (1)..(1539): Ceres Seq. ID no. 12481869
  misc_feature (1)..(1539): Ortholog of  Ceres SEQ ID NO 14306569 as cited in SEQ ID NO 53008
  misc_feature (1)..(1539): Ortholog of  Ceres SEQ ID NO 14304855 as cited in SEQ ID NO 53974
atggacaatagcagaaccagacaaaacatgaatggttctgctaattggtcacaacaatccggaagaacatctacttcctctttggaagatcttgagataccaaagttcagatcttttgctccttcttcaatctctatctctccttctcttgtctctccttccacttgtttcagtccctctctttttctcgattcccctgcttttgtctcctcctctgctaacgttctagcttctccaaccacaggagctttaatcacaaacgtaactaaccagaaaggtataaatgaaggagacaagagcaacaacaacaactttaacttattcgatttctcattccacacacaatcatcaggagtttctgctccgaccacaactacaactacaactacaactacaacaacaacaaacagttctatctttcaatctcaggaacaacagaagaagaaccagtcagaacaatggagccaaaccgagactcgtccaaacaatcaagctgtatcttacaatggaagagagcaaaggaaaggagaggatggttacaattggagaaagtacggacaaaaacaggtgaaaggaagtgagaatcctcggagttactataagtgtactttccctaattgtccaacgaagaagaaagtggagagatctttggaaggtcagatcacagagattgtgtataaaggaagccacaaccatcctaaacctcagtctactagaagatcttcttcgtcttcttcgacttttcattcagctgtgtacaatgccagtttggatcataatcgtcaagcttcttctgatcagcctaattccaataatagctttcatcagtctgattcctttgggatgcaacaagaggataatactacttctgattctgttggtgacgatgagttcgaacaaggctcatcgattgtcagcagagacgaagaagattgtgggagtgaacctgaagcaaagagatggaaaggggacaatgaaacaaatggtgggaatggtggtggaagcaagacagtgagagagccgagaatcgtagtgcagacaacgagtgatattgacattcttgacgacggttacagatggagaaaatacggccagaaagtcgttaagggaaacccaaatccaagaagctactacaagtgcacaaccatcggttgtccagtgaggaaacatgtggagagagcatcacacgacatgagagcagtaatcacaacctacgaagggaaacacaaccacgatgttcctgcagctcgtggtagcggttacgccacaaacagagcaccacaggattcgtcttcagtcccgattagaccagctgctattgctggtcactccaactacactacttcttctcaagcaccatatacacttcagatgctgcacaacaacaacactaataccgggccttttggttacgccatgaacaacaataacaacaacagcaaccttcaaacgcaacaaaactttgttggtggtggattctctagagcaaaggaagaaccaaacgaggagacctcatttttcgattcgtttatgccctga

SEQ ID NO: 38143 - protein, 512 aa, Arabidopsis thaliana
  peptide (1)..(512): Ceres Seq. ID no. 12481870
MDNSRTRQNMNGSANWSQQSGRTSTSSLEDLEIPKFRSFAPSSISISPSLVSPSTCFSPSLFLDSPAFVSSSANVLASPTTGALITNVTNQKGINEGDKSNNNNFNLFDFSFHTQSSGVSAPTTTTTTTTTTTTTNSSIFQSQEQQKKNQSEQWSQTETRPNNQAVSYNGREQRKGEDGYNWRKYGQKQVKGSENPRSYYKCTFPNCPTKKKVERSLEGQITEIVYKGSHNHPKPQSTRRSSSSSSTFHSAVYNASLDHNRQASSDQPNSNNSFHQSDSFGMQQEDNTTSDSVGDDEFEQGSSIVSRDEEDCGSEPEAKRWKGDNETNGGNGGGSKTVREPRIVVQTTSDIDILDDGYRWRKYGQKVVKGNPNPRSYYKCTTIGCPVRKHVERASHDMRAVITTYEGKHNHDVPAARGSGYATNRAPQDSSSVPIRPAAIAGHSNYTTSSQAPYTLQMLHNNNTNTGPFGYAMNNNNNNSNLQTQQNFVGGGFSRAKEEPNEETSFFDSFMP

SEQ ID NO: 38144 - protein, 503 aa, Arabidopsis thaliana
  peptide (1)..(503): Ceres Seq. ID no. 12481871
MNGSANWSQQSGRTSTSSLEDLEIPKFRSFAPSSISISPSLVSPSTCFSPSLFLDSPAFVSSSANVLASPTTGALITNVTNQKGINEGDKSNNNNFNLFDFSFHTQSSGVSAPTTTTTTTTTTTTTNSSIFQSQEQQKKNQSEQWSQTETRPNNQAVSYNGREQRKGEDGYNWRKYGQKQVKGSENPRSYYKCTFPNCPTKKKVERSLEGQITEIVYKGSHNHPKPQSTRRSSSSSSTFHSAVYNASLDHNRQASSDQPNSNNSFHQSDSFGMQQEDNTTSDSVGDDEFEQGSSIVSRDEEDCGSEPEAKRWKGDNETNGGNGGGSKTVREPRIVVQTTSDIDILDDGYRWRKYGQKVVKGNPNPRSYYKCTTIGCPVRKHVERASHDMRAVITTYEGKHNHDVPAARGSGYATNRAPQDSSSVPIRPAAIAGHSNYTTSSQAPYTLQMLHNNNTNTGPFGYAMNNNNNNSNLQTQQNFVGGGFSRAKEEPNEETSFFDSFMP

SEQ ID NO: 38145 - DNA, 794 bp, Arabidopsis thaliana
  misc_feature (1)..(794): Ceres Seq. ID no. 12326724
  misc_feature (1)..(794): Ortholog of  Ceres SEQ ID NO 12627215 as cited in SEQ ID NO 60976
  misc_feature (1)..(794): Ortholog of  Ceres SEQ ID NO 13654980 as cited in SEQ ID NO 63094
  misc_feature (1)..(794): Ortholog of  Ceres SEQ ID NO 15174852 as cited in SEQ ID NO 67166
  misc_feature (1)..(794): Ortholog of  Ceres SEQ ID NO 12589584 as cited in SEQ ID NO 0
  misc_feature (1)..(794): Ortholog of  Ceres SEQ ID NO 12635657 as cited in SEQ ID NO 0
  misc_feature (1)..(794): Ortholog of  Ceres SEQ ID NO 12635879 as cited in SEQ ID NO 0
  misc_feature (1)..(794): Ortholog of  Ceres SEQ ID NO 13599649 as cited in SEQ ID NO 0
cccaaattacaaagacgaaggagtaatggcaattacggcgactagattggtctcactgactctcttatggattgtcgtcctcttcgtcacacttgctctcattcagatcaaattgactgatgttgcagatcctagtgtcaatgagaagattcttgatgctaagctcaatcaggtgggagaggatttagaaggagttacacacaaagtttactttgacattcagatcaatggttcaccagcagggcgcattctcatcggcctttttggaaatatagttcctaaaactgcagagaactttcggtcactttgcacgggagagaaaggagttggaaacatggggaaacctctttatttcaaaggaagtagcttccataggatcattcctggcttcatgattcagggtggagattttacacgaggcgatggacgaggtggagagtcgatatatggagataaatttgcagatgagaactttaaactcaaacacactgggccaggatttttatcaatggcaaactcgggaccagactccaacggttcacagttcttcatcacaacagtcaccacgagttggttggacggacatcacgttgtgtttgggaaggtattgtctggcatggaagtagtgcgcaagatcgaagcccagggacaagacagtggagtgcccaaagctaatgttattatttttgctagtggagaagtttctttgtaatatcgtcttcaagttttttcttcatccgaatgaacaagagaccaagattcacaaaaacaaagaaaatcaatcaaattctttg

SEQ ID NO: 38146 - protein, 236 aa, Arabidopsis thaliana
  peptide (1)..(236): Ceres Seq. ID no. 12326725
PNYKDEGVMAITATRLVSLTLLWIVVLFVTLALIQIKLTDVADPSVNEKILDAKLNQVGEDLEGVTHKVYFDIQINGSPAGRILIGLFGNIVPKTAENFRSLCTGEKGVGNMGKPLYFKGSSFHRIIPGFMIQGGDFTRGDGRGGESIYGDKFADENFKLKHTGPGFLSMANSGPDSNGSQFFITTVTTSWLDGHHVVFGKVLSGMEVVRKIEAQGQDSGVPKANVIIFASGEVSL

SEQ ID NO: 38147 - protein, 228 aa, Arabidopsis thaliana
  peptide (1)..(228): Ceres Seq. ID no. 12326726
MAITATRLVSLTLLWIVVLFVTLALIQIKLTDVADPSVNEKILDAKLNQVGEDLEGVTHKVYFDIQINGSPAGRILIGLFGNIVPKTAENFRSLCTGEKGVGNMGKPLYFKGSSFHRIIPGFMIQGGDFTRGDGRGGESIYGDKFADENFKLKHTGPGFLSMANSGPDSNGSQFFITTVTTSWLDGHHVVFGKVLSGMEVVRKIEAQGQDSGVPKANVIIFASGEVSL

SEQ ID NO: 38148 - protein, 125 aa, Arabidopsis thaliana
  peptide (1)..(125): Ceres Seq. ID no. 12326727
MGKPLYFKGSSFHRIIPGFMIQGGDFTRGDGRGGESIYGDKFADENFKLKHTGPGFLSMANSGPDSNGSQFFITTVTTSWLDGHHVVFGKVLSGMEVVRKIEAQGQDSGVPKANVIIFASGEVSL

SEQ ID NO: 38149 - DNA, 900 bp, Arabidopsis thaliana
  misc_feature (1)..(900): Ceres Seq. ID no. 12330525
  misc_feature (1)..(900): Ortholog of  Ceres SEQ ID NO 13595704 as cited in SEQ ID NO 51001
  misc_feature (1)..(900): Ortholog of  Ceres SEQ ID NO 13638279 as cited in SEQ ID NO 57674
  misc_feature (1)..(900): Ortholog of  Ceres SEQ ID NO 15177534 as cited in SEQ ID NO 0
aaagctaaattagaaacctgacgatctctctctctctctctctctcgatcggataatatttgagctttgtggttggaggatctgagttagtcatgttcatgatcgattggttctatggcgttctcgcttcgttagggttatggcagaaagaggctaagatcttgtttctgggactcgataatgctggtaaaaccactctgcttcacatgttgaaagacgagagattggtacagcatcagcctacgcagcatccaacttctgaagaactcagcattgggaaaatcaagtttaaggcttttgatttgggtggtcaccagattgctcgcagggtctggaaggattactatgctaaggtggacgctgtggtctacctagttgatgcttacgacaaagagagatttgcagaatcaaaaaaggaacttgatgcacttctctcagacgaatccctagccagcgttccattcctcattctaggaaacaagatagacataccgtatgctgcatcagaggacgagctccgttaccatctcggcctctccaacttcactacaggaaagggtaaagtgaatctaacggattcgaacgttaggccattggaggttttcatgtgcagcattgtcaggaaaatgggttacggagaaggtttcaaatgggtttctcaatacatcaagtaagacaaacacacgctgtgttattattaagccgtaagcttgcttctataaatcctgttttttgtatcgtcttgcttcgttttttcctctctttaattgtgttgtaagaaaatgtcttaaaccgtacctagctttttctcgtttgtctgatcctcgactggtttgttcttgtagtgaattttttacacgtttcgtaatttattcaaataagggaagaaaaaaagattag

SEQ ID NO: 38150 - protein, 193 aa, Arabidopsis thaliana
  peptide (1)..(193): Ceres Seq. ID no. 12330526
MFMIDWFYGVLASLGLWQKEAKILFLGLDNAGKTTLLHMLKDERLVQHQPTQHPTSEELSIGKIKFKAFDLGGHQIARRVWKDYYAKVDAVVYLVDAYDKERFAESKKELDALLSDESLASVPFLILGNKIDIPYAASEDELRYHLGLSNFTTGKGKVNLTDSNVRPLEVFMCSIVRKMGYGEGFKWVSQYIK

SEQ ID NO: 38151 - protein, 191 aa, Arabidopsis thaliana
  peptide (1)..(191): Ceres Seq. ID no. 12330527
MIDWFYGVLASLGLWQKEAKILFLGLDNAGKTTLLHMLKDERLVQHQPTQHPTSEELSIGKIKFKAFDLGGHQIARRVWKDYYAKVDAVVYLVDAYDKERFAESKKELDALLSDESLASVPFLILGNKIDIPYAASEDELRYHLGLSNFTTGKGKVNLTDSNVRPLEVFMCSIVRKMGYGEGFKWVSQYIK

SEQ ID NO: 38152 - protein, 155 aa, Arabidopsis thaliana
  peptide (1)..(155): Ceres Seq. ID no. 12330528
MLKDERLVQHQPTQHPTSEELSIGKIKFKAFDLGGHQIARRVWKDYYAKVDAVVYLVDAYDKERFAESKKELDALLSDESLASVPFLILGNKIDIPYAASEDELRYHLGLSNFTTGKGKVNLTDSNVRPLEVFMCSIVRKMGYGEGFKWVSQYIK

SEQ ID NO: 38153 - DNA, 1040 bp, Arabidopsis thaliana
  misc_feature (1)..(1040): Ceres Seq. ID no. 12329774
  misc_feature (1)..(1040): Ortholog of  Ceres SEQ ID NO 13597809 as cited in SEQ ID NO 64598
  misc_feature (1)..(1040): Ortholog of  Ceres SEQ ID NO 12617960 as cited in SEQ ID NO 69051
  misc_feature (1)..(1040): Ortholog of  Ceres SEQ ID NO 13589401 as cited in SEQ ID NO 0
  misc_feature (1)..(1040): Ortholog of  Ceres SEQ ID NO 15179361 as cited in SEQ ID NO 0
tttttcgttttcttctccgtttctcgctcatcgcttactgaaaccagaaacaagtttagggtttttgcggaggtttcaaagttaacaatggcggaagagcacaagcacgaggaatcgatcatggagaagatctctgagaagatccatggtcacgatgactcttcttcttcttcttccgattcggatgacgataagaactctgcgtctctcaaaaccaagatttatcgtcttttcggaagagaacagcctcttcacaagcttttcggtggcggaaaacctgccgacattttcctgtggaggaacaagaaagtatcaggaggagtattgggtgctgcaactgtttcctggatcttattcgagttacttgagtacaatcttctcacactcttcggccacatttcaattcttgctctcgcagtattgtttttgtggtctagtgctactaccttcattcacaagtcacctcctcatatccctgaagtttacatccccgaggatgttattcttcagcttgcttctggattaaggattgaaatcaatcgtggattttactgttcttagggacattgcatcaggatagatcttaagaagtttctgttggtgattgctggtttatgggttttgtccaaagttggtagctcctgcaacttcttgaccttaatctacatcgcaactgtacttctcttcacgattcccgtgctttacgagaagtatgaagataaagtagatgactttggtgaaaaggcgatgagggagatgaagaagcaatacgtggagttcgacgtgaaggttttgagtaaggtgatgagcaaaattcctaaaggagccttagcctttatcaagaagaaagattagagagtgtaagtttctctcatcatcattatccgagattattcaagattgatatataaatctcgaagcattgtttttttggctgttggttaataaccctttattctctcaaatatctgctatatggattttattcgggttttaaccaaattttttagcaatattgaatctgattgaaatttgaattc

SEQ ID NO: 38154 - protein, 186 aa, Arabidopsis thaliana
  peptide (1)..(186): Ceres Seq. ID no. 12329775
FFVFFSVSRSSLTETRNKFRVFAEVSKLTMAEEHKHEESIMEKISEKIHGHDDSSSSSSDSDDDKNSASLKTKIYRLFGREQPLHKLFGGGKPADIFLWRNKKVSGGVLGAATVSWILFELLEYNLLTLFGHISILALAVLFLWSSATTFIHKSPPHIPEVYIPEDVILQLASGLRIEINRGFYCS

SEQ ID NO: 38155 - protein, 157 aa, Arabidopsis thaliana
  peptide (1)..(157): Ceres Seq. ID no. 12329776
MAEEHKHEESIMEKISEKIHGHDDSSSSSSDSDDDKNSASLKTKIYRLFGREQPLHKLFGGGKPADIFLWRNKKVSGGVLGAATVSWILFELLEYNLLTLFGHISILALAVLFLWSSATTFIHKSPPHIPEVYIPEDVILQLASGLRIEINRGFYCS

SEQ ID NO: 38156 - protein, 146 aa, Arabidopsis thaliana
  peptide (1)..(146): Ceres Seq. ID no. 12329777
MEKISEKIHGHDDSSSSSSDSDDDKNSASLKTKIYRLFGREQPLHKLFGGGKPADIFLWRNKKVSGGVLGAATVSWILFELLEYNLLTLFGHISILALAVLFLWSSATTFIHKSPPHIPEVYIPEDVILQLASGLRIEINRGFYCS

SEQ ID NO: 38157 - DNA, 1013 bp, Arabidopsis thaliana
  misc_feature (1)..(1013): Ceres Seq. ID no. 13575559
  misc_feature (1)..(1013): Ortholog of  Ceres SEQ ID NO 14312266 as cited in SEQ ID NO 59225
  misc_feature (1)..(1013): Ortholog of  Ceres SEQ ID NO 13597620 as cited in SEQ ID NO 65383
atgagaatctatttttccatatgctctccacactcccaccaaacaaatcccaagaatcaacaaaagaaaaaacattcaccttctcttacgcgactctcgccggaaacagatcgctccgccgtgaactcggaagccatggggtcacttttgcagggttttactaaatcactcgccatgactttcctctccgagattggtgacaaaacgttcttcgctgctgctattttggcgatgcggtatcctaggaggcttgtattagctggttgtttatcagctttgattgtcatgactatattatctgctacacttggttgggctgctccaaatctgatctctcggaaatggactcatcatataacaacattcttgttctttggctttgggttatggtctttgtgggatggttttaaagaaggaggaggttctgaagaattggcagaagttgaagcagaactggattctgatttgaagaagactaatgatcaatcgaaaaacagtaagattgaagatgaacagaaaaagcagaaaagaccattccttactgcattcttctctcccatttttctcaaggcgttttcgattaacttctttggtgaatggggtgacaagagtcagcttgcgaccattggtttggctgcagatgaaaatccactcggcgtggtccttggcggaattgtggcacaaacattgtgtaccacagctgctgtgcttggtggcaagagcttagcatctcaaatatccgaacgaattgtggctctttccggtggaatgcttttcattatcttcggcattcagtcgcttcttactccggttgatgcttgatacatctatatggtatcccatcaatgtcttgaaactgcaggtttcttgggtttgaatgcttttttgggcgagatgaaaccgaaacacgtcactcccttacaattgcttagatacatttacattagtgattacagaatcagaaagattcatctgtaacaccatttgacttcaataaagttttgtttatttgc

SEQ ID NO: 38158 - protein, 273 aa, Arabidopsis thaliana
  peptide (1)..(273): Ceres Seq. ID no. 13575560
MRIYFSICSPHSHQTNPKNQQKKKHSPSLTRLSPETDRSAVNSEAMGSLLQGFTKSLAMTFLSEIGDKTFFAAAILAMRYPRRLVLAGCLSALIVMTILSATLGWAAPNLISRKWTHHITTFLFFGFGLWSLWDGFKEGGGSEELAEVEAELDSDLKKTNDQSKNSKIEDEQKKQKRPFLTAFFSPIFLKAFSINFFGEWGDKSQLATIGLAADENPLGVVLGGIVAQTLCTTAAVLGGKSLASQISERIVALSGGMLFIIFGIQSLLTPVDA

SEQ ID NO: 38159 - protein, 228 aa, Arabidopsis thaliana
  peptide (1)..(228): Ceres Seq. ID no. 13575561
MGSLLQGFTKSLAMTFLSEIGDKTFFAAAILAMRYPRRLVLAGCLSALIVMTILSATLGWAAPNLISRKWTHHITTFLFFGFGLWSLWDGFKEGGGSEELAEVEAELDSDLKKTNDQSKNSKIEDEQKKQKRPFLTAFFSPIFLKAFSINFFGEWGDKSQLATIGLAADENPLGVVLGGIVAQTLCTTAAVLGGKSLASQISERIVALSGGMLFIIFGIQSLLTPVDA

SEQ ID NO: 38160 - protein, 215 aa, Arabidopsis thaliana
  peptide (1)..(215): Ceres Seq. ID no. 13575562
MTFLSEIGDKTFFAAAILAMRYPRRLVLAGCLSALIVMTILSATLGWAAPNLISRKWTHHITTFLFFGFGLWSLWDGFKEGGGSEELAEVEAELDSDLKKTNDQSKNSKIEDEQKKQKRPFLTAFFSPIFLKAFSINFFGEWGDKSQLATIGLAADENPLGVVLGGIVAQTLCTTAAVLGGKSLASQISERIVALSGGMLFIIFGIQSLLTPVDA

SEQ ID NO: 38161 - DNA, 786 bp, Arabidopsis thaliana
  misc_feature (1)..(786): Ceres Seq. ID no. 12561786
  misc_feature (1)..(786): Ortholog of  Ceres SEQ ID NO 13587131 as cited in SEQ ID NO 331
  misc_feature (1)..(786): Ortholog of  Ceres SEQ ID NO 13661176 as cited in SEQ ID NO 61114
gtgaagtctcttatatataagtatcgagagaattagggttttctagtctagtgtttccgggagcagcctgagcaggaggaagaagacgaagaagaagaggagcagctactaccatggttctcaagacggagctttgtcgtttcagtggacagaagatttacccaggaagaggaattaggtttatccgatctgattctcaggttttcttgtttcttaactcaaaatgtaagaggtacttccataacaagttgaagccatccaagcttgcatggactgccatgtacagaaagcaacacaagaaggatgcagcacaagaggctgtgaagagaaggagacgtgccaccaagaagccatactcaaggtccattgttggtgctaccttggaagtaattcagaagaagagagctgagaagcctgaagttcgtgatgcagccagggaagctgctctgcgtgagatcaaggaaagaatcaaaaagaccaaagatgaaaagaaggctaagaaggtggaatttgcttctaagcaacagaaggtcaaggctaatttccccaaagctgctgctgcatccaagggtcctaaggtgggaggtggtggtggcaaacgctgaagagcttaaagccatcttttctcactctgcgtcttttctgctagtagctacttttagtagttgatgttcatttctgaatatttgcaaaacataaaccttgttatttcgtttttgtctctcacttttgctactcttataatatcagacttgagaattttgctgcttatgaactttatttcac

SEQ ID NO: 38162 - protein, 163 aa, Arabidopsis thaliana
  peptide (1)..(163): Ceres Seq. ID no. 12561787
MVLKTELCRFSGQKIYPGRGIRFIRSDSQVFLFLNSKCKRYFHNKLKPSKLAWTAMYRKQHKKDAAQEAVKRRRRATKKPYSRSIVGATLEVIQKKRAEKPEVRDAAREAALREIKERIKKTKDEKKAKKVEFASKQQKVKANFPKAAAASKGPKVGGGGGKR

SEQ ID NO: 38163 - protein, 108 aa, Arabidopsis thaliana
  peptide (1)..(108): Ceres Seq. ID no. 12561788
MYRKQHKKDAAQEAVKRRRRATKKPYSRSIVGATLEVIQKKRAEKPEVRDAAREAALREIKERIKKTKDEKKAKKVEFASKQQKVKANFPKAAAASKGPKVGGGGGKR

SEQ ID NO: 38164 - DNA, 1729 bp, Arabidopsis thaliana
  misc_feature (1)..(1729): Ceres Seq. ID no. 12371173
  misc_feature (1)..(1729): Ortholog of  Ceres SEQ ID NO 13660287 as cited in SEQ ID NO 67316
aacaacaccaaaagaaaagggaaaaaaaaaacagaggaactaataaacggaccatgagctccacagagacatacgagccgttattgacacgactccactcggattctcagataactgaacggtcttcgccagagatagaggagtttctccgccgtcgtggatccacagtgacaccacggtggtggctaaagctggcagtgtgggagtcaaagcttctatggacactctctggagcctctatagtggtctctgttctgaattacatgctcagcttcgtcaccgtcatgttcaccggtcatctcggttctcttcagctcgccggcgcttccatcgccaccgtcggaatccaaggcctagcttacggtatcatgttaggaatggcgagcgcggtccaaacagtgtgtggtcaagcgtacggagcgagacagtactcatcaatgggaataatctgccaacgagccatggtcttgcaccttgcagctgcagtcttcctcacgttcctctactggtactcgggtccaatccttaaaacaatgggccaatccgtagccatagcacacgagggtcagatctttgcacgtggaatgattccacaaatttacgcatttgccctcgcttgcccgatgcagaggtttcttcaggctcagaacatagtgaaccctttggcttacatgtccttaggagttttcttgctccacacgttactcacgtggctggttaccaacgtgctggatttcggcttgcttggggcggctctgattctcagtttctcatggtggctgctagtagctgtgaatggtatgtatatcttgatgagcccgaattgtaaggagacatggacagggttttcaacgagggcatttagagggatatggccttacttcaagctcacggtagcttcagcagttatgctatgtttggagatatggtacaaccaagggctagtgattatctctggtttactctccaatccgacaatttctctagacgctatttcgatttgcatgtattacttgaattgggatatgcagttcatgcttggtctaagtgcagcaatcagtgtgcgagtgagcaatgagctaggagcgggaaatccacgagtggctatgttatcagtagtggttgtcaacatcacgactgttctcatcagctcagttctctgtgtcatcgtgcttgtgttccgcgttggccttagcaaagccttcaccagcgatgcagaagttatagcagccgtctctgacctctttcctcttctcgccgtttccattttcttaaacggaatccagccaattctctctggggttgctattgggagtgggtggcaagcagtggtggcttatgtgaatcttgttacgtactatgtcattggtcttcctattggctgtgtccttggcttcaaaaccagtcttggagttgctgggatctggtgggggatgattgcaggagtcatacttcaaaccctaactttgattgttcttacacttaaaactaattggacttccgaggtagaaaatgcagctcagagagtaaagacttcggcaactgagaatcaagagatggctaacgcaggtgtttaagataacagcaacagtgactctgttttttttcccctcttttggtgaaaagagatataagatgaaataagtaaccttttgattcttatgaagttatttgaggattcgttaactacagagaaaaataatggacgacctacttagttctcttctgc

SEQ ID NO: 38165 - protein, 524 aa, Arabidopsis thaliana
  peptide (1)..(524): Ceres Seq. ID no. 12371174
QHQKKREKKNRGTNKRTMSSTETYEPLLTRLHSDSQITERSSPEIEEFLRRRGSTVTPRWWLKLAVWESKLLWTLSGASIVVSVLNYMLSFVTVMFTGHLGSLQLAGASIATVGIQGLAYGIMLGMASAVQTVCGQAYGARQYSSMGIICQRAMVLHLAAAVFLTFLYWYSGPILKTMGQSVAIAHEGQIFARGMIPQIYAFALACPMQRFLQAQNIVNPLAYMSLGVFLLHTLLTWLVTNVLDFGLLGAALILSFSWWLLVAVNGMYILMSPNCKETWTGFSTRAFRGIWPYFKLTVASAVMLCLEIWYNQGLVIISGLLSNPTISLDAISICMYYLNWDMQFMLGLSAAISVRVSNELGAGNPRVAMLSVVVVNITTVLISSVLCVIVLVFRVGLSKAFTSDAEVIAAVSDLFPLLAVSIFLNGIQPILSGVAIGSGWQAVVAYVNLVTYYVIGLPIGCVLGFKTSLGVAGIWWGMIAGVILQTLTLIVLTLKTNWTSEVENAAQRVKTSATENQEMANAGV

SEQ ID NO: 38166 - protein, 507 aa, Arabidopsis thaliana
  peptide (1)..(507): Ceres Seq. ID no. 12371175
MSSTETYEPLLTRLHSDSQITERSSPEIEEFLRRRGSTVTPRWWLKLAVWESKLLWTLSGASIVVSVLNYMLSFVTVMFTGHLGSLQLAGASIATVGIQGLAYGIMLGMASAVQTVCGQAYGARQYSSMGIICQRAMVLHLAAAVFLTFLYWYSGPILKTMGQSVAIAHEGQIFARGMIPQIYAFALACPMQRFLQAQNIVNPLAYMSLGVFLLHTLLTWLVTNVLDFGLLGAALILSFSWWLLVAVNGMYILMSPNCKETWTGFSTRAFRGIWPYFKLTVASAVMLCLEIWYNQGLVIISGLLSNPTISLDAISICMYYLNWDMQFMLGLSAAISVRVSNELGAGNPRVAMLSVVVVNITTVLISSVLCVIVLVFRVGLSKAFTSDAEVIAAVSDLFPLLAVSIFLNGIQPILSGVAIGSGWQAVVAYVNLVTYYVIGLPIGCVLGFKTSLGVAGIWWGMIAGVILQTLTLIVLTLKTNWTSEVENAAQRVKTSATENQEMANAGV

SEQ ID NO: 38167 - protein, 437 aa, Arabidopsis thaliana
  peptide (1)..(437): Ceres Seq. ID no. 12371176
MLSFVTVMFTGHLGSLQLAGASIATVGIQGLAYGIMLGMASAVQTVCGQAYGARQYSSMGIICQRAMVLHLAAAVFLTFLYWYSGPILKTMGQSVAIAHEGQIFARGMIPQIYAFALACPMQRFLQAQNIVNPLAYMSLGVFLLHTLLTWLVTNVLDFGLLGAALILSFSWWLLVAVNGMYILMSPNCKETWTGFSTRAFRGIWPYFKLTVASAVMLCLEIWYNQGLVIISGLLSNPTISLDAISICMYYLNWDMQFMLGLSAAISVRVSNELGAGNPRVAMLSVVVVNITTVLISSVLCVIVLVFRVGLSKAFTSDAEVIAAVSDLFPLLAVSIFLNGIQPILSGVAIGSGWQAVVAYVNLVTYYVIGLPIGCVLGFKTSLGVAGIWWGMIAGVILQTLTLIVLTLKTNWTSEVENAAQRVKTSATENQEMANAGV

SEQ ID NO: 38168 - DNA, 1302 bp, Arabidopsis thaliana
  misc_feature (1)..(1302): Ceres Seq. ID no. 12604854
  misc_feature (1)..(1302): Ortholog of  Ceres SEQ ID NO 13495070 as cited in SEQ ID NO 53216
  misc_feature (1)..(1302): Ortholog of  Ceres SEQ ID NO 15176717 as cited in SEQ ID NO 0
  misc_feature (1)..(1302): Ortholog of  Ceres SEQ ID NO 15179618 as cited in SEQ ID NO 0
gtgaacttaacgtctctctctattcctctgcttctctctttctccctgtgaaaaaatggactcggtggctctctactgcaccgctggtctcattgccggcgccgtctactggttcatatgcgtcctaggtccagcagaacgaaaaggcaaacgagcctctgatctctccggcggctcaatctccgcagaaaaagtcaaagacaactataaccaatactggtctttcttccgcaaaccaaaagagatcgaatcagccgagaaagtacctgacttcgtcgacacgttctacaatcttgtcactgatatctacgagtggggatggggacaatctttccatttctctcctcatgtccctggaaaatccgacaaagacgccacaagaatccacgaagaaatggccgtcgatctcatcaaagtgaaaccgggacaaaagattcttgacgctggttgcggcgtgggtgggccgatgagagccatcgcggcccattccaaggcccaagtcactggaatcactatcaacgagtaccaagtgcaacgagccaagcttcacaacaagaaagctggacttgattctctctgcaacgtcgtttgtggtaactttttaaagatgccgttcgatgaaaacacgtttgacggagcttactcgatcgaagctacgtgtcacgctcctaagctcgaagaagtatactcggagatcttcagagtgatgaaaccaggatctttgttcgtgtcctacgaatgggtcaccactgaaaaatacagagacgatgacgaagaacacaaggacgtgattcaagggatcgagagaggagacgcacttcctggactaagaagctacgctgatatagccgtgacggcgaagaaagttgggtttgaggtagtgaaggagaaagatttggctaaaccaccgtctaaaccgtggtggaaccggttaaagatgggaaggattgcttattggagaaaccatgttgtggttgtgattctttctgctattggggttgctcctaaaggaactgttgatgttcataagatgttgtttaagactgctgattatttgaccagaggtggtgagactggaatcttctctccgatgcatatgattctctgtagaaaaccagagaaagcttctgaatgaatgattgagaatcttcttccttgttctcgtttttcttcttctttctttctaagttcatgttttgccccttaagaatctctttgtcgtcgtattaatgttatcactttgttgtttattgtatttttttttttcaatttgatttgtttaaattgatgatggatcactgg

SEQ ID NO: 38169 - protein, 359 aa, Arabidopsis thaliana
  peptide (1)..(359): Ceres Seq. ID no. 12604855
MDSVALYCTAGLIAGAVYWFICVLGPAERKGKRASDLSGGSISAEKVKDNYNQYWSFFRKPKEIESAEKVPDFVDTFYNLVTDIYEWGWGQSFHFSPHVPGKSDKDATRIHEEMAVDLIKVKPGQKILDAGCGVGGPMRAIAAHSKAQVTGITINEYQVQRAKLHNKKAGLDSLCNVVCGNFLKMPFDENTFDGAYSIEATCHAPKLEEVYSEIFRVMKPGSLFVSYEWVTTEKYRDDDEEHKDVIQGIERGDALPGLRSYADIAVTAKKVGFEVVKEKDLAKPPSKPWWNRLKMGRIAYWRNHVVVVILSAIGVAPKGTVDVHKMLFKTADYLTRGGETGIFSPMHMILCRKPEKASE

SEQ ID NO: 38170 - protein, 246 aa, Arabidopsis thaliana
  peptide (1)..(246): Ceres Seq. ID no. 12604856
MAVDLIKVKPGQKILDAGCGVGGPMRAIAAHSKAQVTGITINEYQVQRAKLHNKKAGLDSLCNVVCGNFLKMPFDENTFDGAYSIEATCHAPKLEEVYSEIFRVMKPGSLFVSYEWVTTEKYRDDDEEHKDVIQGIERGDALPGLRSYADIAVTAKKVGFEVVKEKDLAKPPSKPWWNRLKMGRIAYWRNHVVVVILSAIGVAPKGTVDVHKMLFKTADYLTRGGETGIFSPMHMILCRKPEKASE

SEQ ID NO: 38171 - protein, 222 aa, Arabidopsis thaliana
  peptide (1)..(222): Ceres Seq. ID no. 12604857
MRAIAAHSKAQVTGITINEYQVQRAKLHNKKAGLDSLCNVVCGNFLKMPFDENTFDGAYSIEATCHAPKLEEVYSEIFRVMKPGSLFVSYEWVTTEKYRDDDEEHKDVIQGIERGDALPGLRSYADIAVTAKKVGFEVVKEKDLAKPPSKPWWNRLKMGRIAYWRNHVVVVILSAIGVAPKGTVDVHKMLFKTADYLTRGGETGIFSPMHMILCRKPEKASE

SEQ ID NO: 38172 - DNA, 718 bp, Arabidopsis thaliana
  misc_feature (1)..(718): Ceres Seq. ID no. 12337883
  misc_feature (1)..(718): Ortholog of  Ceres SEQ ID NO 15176099 as cited in SEQ ID NO 59451
cttcgtctctgtctccaaaatcgaatcaaaatctctaaagtttcaatttttttgttctgttctttttttttttttaaagaatggcttcaatttctgcaactttgccttcgccattgttactcacacagagaaaatccaatctcacatcgattcaaaaactcccattttctctaactcgaggtacgaatgatctttctccattatctcttactcgaaaccctagcagcatcagtctgatggtgaaagctagtggagaaagctcagattcatcgactgatctcgacgttgttagtacgattcagaatgtttgggataagtctgaagataggttaggtcttattggtttgggttttgctggtattgtagctctttgggcatcattgaatctcatcacggcaattgacaaatttgcccgttatctcgagcggattcgaactagttggtatcttgttctccacgtggttcacatatcgatatctcttgttcaaaccggacagacaggagctttcgaaaattgtcaagaaatcagtagcggatatacttggccagtgaaccttgtgtgtgtgataatacttcatctttggaagatgatttgtttgcaagtttgtaaaattacatgacagggtggttgttgtttctagtccaataatgtcatgcatttgaaacctgtaaatactttattgttggtttttggttgtgagcaaaatcaatcttttct

SEQ ID NO: 38173 - protein, 179 aa, Arabidopsis thaliana
  peptide (1)..(179): Ceres Seq. ID no. 12337884
MASISATLPSPLLLTQRKSNLTSIQKLPFSLTRGTNDLSPLSLTRNPSSISLMVKASGESSDSSTDLDVVSTIQNVWDKSEDRLGLIGLGFAGIVALWASLNLITAIDKFARYLERIRTSWYLVLHVVHISISLVQTGQTGAFENCQEISSGYTWPVNLVCVIILHLWKMICLQVCKIT

SEQ ID NO: 38174 - protein, 127 aa, Arabidopsis thaliana
  peptide (1)..(127): Ceres Seq. ID no. 12337885
MVKASGESSDSSTDLDVVSTIQNVWDKSEDRLGLIGLGFAGIVALWASLNLITAIDKFARYLERIRTSWYLVLHVVHISISLVQTGQTGAFENCQEISSGYTWPVNLVCVIILHLWKMICLQVCKIT

SEQ ID NO: 38175 - DNA, 1390 bp, Arabidopsis thaliana
  misc_feature (1)..(1390): Ceres Seq. ID no. 12329134
  misc_feature (1)..(1390): Ortholog of  Ceres SEQ ID NO 13597805 as cited in SEQ ID NO 64186
gcctaggatctgttcttcccaaaacgactcatgccgtccattcgattcggaatatagttgtagaggagatttcatttctaatcaatttcttcggtgatgagttccaccgcggcatcttccaccgtcggaggaggcggatcgtctgagatttccggtgtcaaaaaaacctccaagcgaccaaaatattctaggtttactcagcaagagcttccagcgtgcaagccaattcttactccaagatgggtgatcttgacatttcttgtcgctggggttgtcttcattccccttggagtgatctgcttatttgcttctcagggagtagtcgagattgttgatcgatatgacacagactgtattccaacatcttctagaaacaacatggtcgcttacatacagggtgaaggagataagatctgtaagagaacaataacggtgacaaaagctatgaagcatcctgtctatgtatactaccaacttgagaatttctaccaaaaccatagacggtatgtgaaaagtcgaaacgatgcacaactaagaagtccaaaagaagagcatgatgtgaagacctgtgcacctgaggataatgtgggtggagaaccaattgtgccatgtggtcttgttgcttggagtttgttcaacgatacttatagcttttcaagaaatagccaacaacttcttgtgaataagaaaggtatctcatggaagagtgacagagaaaacaagtttgggaaaaatgtcttccctaaaaattttcagaaaggagcaccaataggcggtggaactcttaatatttctaaaccgttgagtgagcaagaagacctcatagtctggatgcgaaccgcggctttgccaacgtttaggaagctgtatgggaagattgagacagacctacacgcgggtgataccataacggtcttgttgcagaacaactacaacacttacagcttcaatgggcagaagaagctagtgctgtcaacaactagctggctcggcggaaggaatgatttcctcgggattgcttatctgactgtaggcagtatttgcttgttcttggctgttacatttgccgtattgtatctagttaagccaaggcaactcggagacccctcgtacctttcgtggaacagaagtgctggaggtttacagtaatagagcccttcgagcatcaggcgttgatccctccatcgtcaaacggcgtggttttggcttagctaacaaaagagaaaaaacgaaaataagtatatagttcgtttataattttgatattgttgaaaacaaacgtttgtgttttgtcctgttgttgttaagatactagccagtaaatggtgtttagaaaataatgtaaatgaattacagttggaaattgcaaaataagcagagaattttgtcc

SEQ ID NO: 38176 - protein, 350 aa, Arabidopsis thaliana
  peptide (1)..(350): Ceres Seq. ID no. 12329135
MSSTAASSTVGGGGSSEISGVKKTSKRPKYSRFTQQELPACKPILTPRWVILTFLVAGVVFIPLGVICLFASQGVVEIVDRYDTDCIPTSSRNNMVAYIQGEGDKICKRTITVTKAMKHPVYVYYQLENFYQNHRRYVKSRNDAQLRSPKEEHDVKTCAPEDNVGGEPIVPCGLVAWSLFNDTYSFSRNSQQLLVNKKGISWKSDRENKFGKNVFPKNFQKGAPIGGGTLNISKPLSEQEDLIVWMRTAALPTFRKLYGKIETDLHAGDTITVLLQNNYNTYSFNGQKKLVLSTTSWLGGRNDFLGIAYLTVGSICLFLAVTFAVLYLVKPRQLGDPSYLSWNRSAGGLQ

SEQ ID NO: 38177 - protein, 256 aa, Arabidopsis thaliana
  peptide (1)..(256): Ceres Seq. ID no. 12329136
MVAYIQGEGDKICKRTITVTKAMKHPVYVYYQLENFYQNHRRYVKSRNDAQLRSPKEEHDVKTCAPEDNVGGEPIVPCGLVAWSLFNDTYSFSRNSQQLLVNKKGISWKSDRENKFGKNVFPKNFQKGAPIGGGTLNISKPLSEQEDLIVWMRTAALPTFRKLYGKIETDLHAGDTITVLLQNNYNTYSFNGQKKLVLSTTSWLGGRNDFLGIAYLTVGSICLFLAVTFAVLYLVKPRQLGDPSYLSWNRSAGGLQ

SEQ ID NO: 38178 - protein, 234 aa, Arabidopsis thaliana
  peptide (1)..(234): Ceres Seq. ID no. 12329137
MKHPVYVYYQLENFYQNHRRYVKSRNDAQLRSPKEEHDVKTCAPEDNVGGEPIVPCGLVAWSLFNDTYSFSRNSQQLLVNKKGISWKSDRENKFGKNVFPKNFQKGAPIGGGTLNISKPLSEQEDLIVWMRTAALPTFRKLYGKIETDLHAGDTITVLLQNNYNTYSFNGQKKLVLSTTSWLGGRNDFLGIAYLTVGSICLFLAVTFAVLYLVKPRQLGDPSYLSWNRSAGGLQ

SEQ ID NO: 38179 - DNA, 1284 bp, Arabidopsis thaliana
  misc_feature (1)..(1284): Ceres Seq. ID no. 12579452
  misc_feature (1)..(1284): Ortholog of  Ceres SEQ ID NO 13596891 as cited in SEQ ID NO 62868
  misc_feature (1)..(1284): Ortholog of  Ceres SEQ ID NO 12617235 as cited in SEQ ID NO 63990
  misc_feature (1)..(1284): Ortholog of  Ceres SEQ ID NO 13655371 as cited in SEQ ID NO 68945
aagaataaaagaagtaacggaatatattgaactcatcagaagctgaatcggagaagaagaattaacgatgacggcgacgaacaagcaggtggtattgaaaaactacgtgagtggtttccctaaggaatccgatttcgatttcaaaaccaccaccgtcgaatttaaacttccgggagggtctaactcagttctggtgaagaatctctacttgtcatgcgatccttacatgaggattcgcatggggaaacctgatccttccactgctgctcttgctcaagcttacgctcccggcaagccaatctttgggtatggagtgtctagagttatagaatctgggcatccagattacaagaaaggtgacttactctgggggatagttggatgggaggagtatagtgttattactccaatgactcacatgcatttcaagatccaacataccgatattccattatcttactacactggacttctcggtatgcctggtatgactgcctatgctgggttttatgaagtttgttctccaaaggaaggagagacagtttatgtgtcagctgcatctggtgctgttggtcagcttgtgggacaatttgctaagatgatgggctgttatgttgttggaagcgccggaagtacagagaaggttgatcttctgaagaccaagtttgggtttgatgatgcatttaactacaaggaagaaccagaccttagtgctgccctcaaaaggtgtttccctacaggcattgacatatactttgaaaacgtaggaggcaaaatgctagacgcagtgctattaaacatgaacccacacggacgtatcgctgtgtgtggaatgatctcacagtacaatcttgaaaaccaagaaggtgtacacaacctatccaacataatctacaaaagaatccgcattcaaggctttgcagtgtttgatttctacgagaaatactcaaagttcttggattttgtgcttccgcacattaaagaagggaagatcacgtacgtggaagatgtagctgatgggcttgagaaaggtcctgaagctcttgtgggactcttccatggtaagaacgttggaaaacaagttgttgttattgctcgtgagtgaatatatatatctatgggagtaatgttgtatgtatccaaaagattttgtatgggtgttcgaatccaagcctgaggttttggtttataaatactagattactagtaattcaagtaattttttaatatgtatcaatttgttcgttcgttatggttttgaatcattttctgtgtgacttgttt

SEQ ID NO: 38180 - protein, 345 aa, Arabidopsis thaliana
  peptide (1)..(345): Ceres Seq. ID no. 12579453
MTATNKQVVLKNYVSGFPKESDFDFKTTTVEFKLPGGSNSVLVKNLYLSCDPYMRIRMGKPDPSTAALAQAYAPGKPIFGYGVSRVIESGHPDYKKGDLLWGIVGWEEYSVITPMTHMHFKIQHTDIPLSYYTGLLGMPGMTAYAGFYEVCSPKEGETVYVSAASGAVGQLVGQFAKMMGCYVVGSAGSTEKVDLLKTKFGFDDAFNYKEEPDLSAALKRCFPTGIDIYFENVGGKMLDAVLLNMNPHGRIAVCGMISQYNLENQEGVHNLSNIIYKRIRIQGFAVFDFYEKYSKFLDFVLPHIKEGKITYVEDVADGLEKGPEALVGLFHGKNVGKQVVVIARE

SEQ ID NO: 38181 - protein, 292 aa, Arabidopsis thaliana
  peptide (1)..(292): Ceres Seq. ID no. 12579454
MRIRMGKPDPSTAALAQAYAPGKPIFGYGVSRVIESGHPDYKKGDLLWGIVGWEEYSVITPMTHMHFKIQHTDIPLSYYTGLLGMPGMTAYAGFYEVCSPKEGETVYVSAASGAVGQLVGQFAKMMGCYVVGSAGSTEKVDLLKTKFGFDDAFNYKEEPDLSAALKRCFPTGIDIYFENVGGKMLDAVLLNMNPHGRIAVCGMISQYNLENQEGVHNLSNIIYKRIRIQGFAVFDFYEKYSKFLDFVLPHIKEGKITYVEDVADGLEKGPEALVGLFHGKNVGKQVVVIARE

SEQ ID NO: 38182 - protein, 288 aa, Arabidopsis thaliana
  peptide (1)..(288): Ceres Seq. ID no. 12579455
MGKPDPSTAALAQAYAPGKPIFGYGVSRVIESGHPDYKKGDLLWGIVGWEEYSVITPMTHMHFKIQHTDIPLSYYTGLLGMPGMTAYAGFYEVCSPKEGETVYVSAASGAVGQLVGQFAKMMGCYVVGSAGSTEKVDLLKTKFGFDDAFNYKEEPDLSAALKRCFPTGIDIYFENVGGKMLDAVLLNMNPHGRIAVCGMISQYNLENQEGVHNLSNIIYKRIRIQGFAVFDFYEKYSKFLDFVLPHIKEGKITYVEDVADGLEKGPEALVGLFHGKNVGKQVVVIARE

SEQ ID NO: 38183 - DNA, 1458 bp, Arabidopsis thaliana
  misc_feature (1)..(1458): Ceres Seq. ID no. 13602851
  misc_feature (1)..(1458): Ortholog of  Ceres SEQ ID NO 13598741 as cited in SEQ ID NO 62749
  misc_feature (1)..(1458): Ortholog of  Ceres SEQ ID NO 12587535 as cited in SEQ ID NO 64020
  misc_feature (1)..(1458): Ortholog of  Ceres SEQ ID NO 12586366 as cited in SEQ ID NO 68983
aaagtattattccgaatgtaaatagtggaacaaaaagaacagctgggaggattttgtttaaaaggacactacacttcccagctttccctcactgcccgaaaagaacactgcagaaacactttcctctgttcacagagaaagagagagatgatgctttacagcaacaatagttggagatcgaattccattttaatacttctacttggtctctccattgtggccgccgcagactccgccggcaaaacttcaccggtcgaagacggcttggtggttaacggcgactttgagacaccgccgtcaaacggcttccctgatgacgcaatcatcgaggacacctccgagatcccgagctggcgatccgatggtacggtggagctaatcaagtccggtcaaaaacaaggcgggatgatcttgatcgtgcctgagggccgtcacgctgttagattaggaaacgatgcagagatcagccaagaacttacggtggagaaaggctctatctactccgtcacgttcagtgcagcccgcacatgtgcacaactcgagtcgctgaatgtttcggtagcttcttctgatgaacctatcgcatcgcaaaccattgacttgcaaacggtgtacagcgttcaaggatgggatccatatgcatgggcgtttgaagcggttgtggatcgcgtccggttggtttttaagaaccctggcatggaggatgatcctacttgtggacctatcattgacgacattgccgttaagaagctctttactcctgataaacccaaaggcaatgcagtgattaatggagattttgaagaaggtccatggatgtttaggaacactaccttaggtgttctgcttccaacaaacctcgatgaagaaatatcgtctcttcctggatggaccgtcgaatcgaaccgagcagtacggtttattgactcagaccatttctcggtccccgaggggaagcgagctttggaacttttatcgggcaaagaaggcataatttctcaaatggttgagacaaaggcgaacattccgtacaagatgtctttctctttgggacacgcaggggacaagtgtaaggaacctttggctgtaatggcttttgctggagatcaagcacagaactttcattatatggcgcaagcaaactcgagtttcgaaagatcggagttgaacttcactgcgaaagctgaacgtacgaggatcgccttctacagcatttattacaatacgaggacggacgatatgacttcattgtgtggacctgtgattgatgacgttaaggtttggttctccgggtctagtagaattggatttagttttccgctttttattcttctttctttggttttcatctagattgttccggttcagaaattgtattggtagaccgggaattaagacgggattccacgttgtatgatgtatcgttgtatgatggatcggttcaaggtacaagaaatg

SEQ ID NO: 38184 - protein, 401 aa, Arabidopsis thaliana
  peptide (1)..(401): Ceres Seq. ID no. 13602852
MMLYSNNSWRSNSILILLLGLSIVAAADSAGKTSPVEDGLVVNGDFETPPSNGFPDDAIIEDTSEIPSWRSDGTVELIKSGQKQGGMILIVPEGRHAVRLGNDAEISQELTVEKGSIYSVTFSAARTCAQLESLNVSVASSDEPIASQTIDLQTVYSVQGWDPYAWAFEAVVDRVRLVFKNPGMEDDPTCGPIIDDIAVKKLFTPDKPKGNAVINGDFEEGPWMFRNTTLGVLLPTNLDEEISSLPGWTVESNRAVRFIDSDHFSVPEGKRALELLSGKEGIISQMVETKANIPYKMSFSLGHAGDKCKEPLAVMAFAGDQAQNFHYMAQANSSFERSELNFTAKAERTRIAFYSIYYNTRTDDMTSLCGPVIDDVKVWFSGSSRIGFSFPLFILLSLVFI

SEQ ID NO: 38185 - protein, 400 aa, Arabidopsis thaliana
  peptide (1)..(400): Ceres Seq. ID no. 13602853
MLYSNNSWRSNSILILLLGLSIVAAADSAGKTSPVEDGLVVNGDFETPPSNGFPDDAIIEDTSEIPSWRSDGTVELIKSGQKQGGMILIVPEGRHAVRLGNDAEISQELTVEKGSIYSVTFSAARTCAQLESLNVSVASSDEPIASQTIDLQTVYSVQGWDPYAWAFEAVVDRVRLVFKNPGMEDDPTCGPIIDDIAVKKLFTPDKPKGNAVINGDFEEGPWMFRNTTLGVLLPTNLDEEISSLPGWTVESNRAVRFIDSDHFSVPEGKRALELLSGKEGIISQMVETKANIPYKMSFSLGHAGDKCKEPLAVMAFAGDQAQNFHYMAQANSSFERSELNFTAKAERTRIAFYSIYYNTRTDDMTSLCGPVIDDVKVWFSGSSRIGFSFPLFILLSLVFI

SEQ ID NO: 38186 - protein, 315 aa, Arabidopsis thaliana
  peptide (1)..(315): Ceres Seq. ID no. 13602854
MILIVPEGRHAVRLGNDAEISQELTVEKGSIYSVTFSAARTCAQLESLNVSVASSDEPIASQTIDLQTVYSVQGWDPYAWAFEAVVDRVRLVFKNPGMEDDPTCGPIIDDIAVKKLFTPDKPKGNAVINGDFEEGPWMFRNTTLGVLLPTNLDEEISSLPGWTVESNRAVRFIDSDHFSVPEGKRALELLSGKEGIISQMVETKANIPYKMSFSLGHAGDKCKEPLAVMAFAGDQAQNFHYMAQANSSFERSELNFTAKAERTRIAFYSIYYNTRTDDMTSLCGPVIDDVKVWFSGSSRIGFSFPLFILLSLVFI

SEQ ID NO: 38187 - DNA, 2400 bp, Arabidopsis thaliana
  misc_feature (1)..(2400): Ceres Seq. ID no. 12330240
  misc_feature (1)..(2400): Ortholog of  Ceres SEQ ID NO 13600216 as cited in SEQ ID NO 569
acgtctgagaaaacaactcattcaaagtttgaaaactcatgggctcgctggagccgacccaggaacggcaaaaatctagaagcgccaagttttcttcaactctttaacgtcgttgttgtcttcgtcaccaagtaaaccctagatccacaatttcaacggaaatttcattcttcttcttcttcctcgcgaatctgttttttttttgatattcgattctactttccctttccatcaaaaaacatttcgtcgacgatttcacgcgatgtccttctccgattctggatcgtcctcttatggcggagattacaagaatttcagacaaatcaccagagaaagattactttgtgaaatgcttaggccagaaagaaatggaagctctaaattaacttggaaggtacttgtaatggacaagttcactgtgaagataatgtcatctgcttgcaaaatgtctgagatcacacaaggaggcatttctttggttgaggttataactaaacataggcaacctatgacagcaatggaagtcatatactttattcaaccgaccgaagagaatgtcactgcgtttttatcagatatgactggaaaatcaccactttacaagaaggcttttgttttctttagttctcctgtttcgagaagcttagttaatgtcattaagaaggacatgagagcaatgaaacgaattgggggattgaaagagatgaacttggagtatattagcatggacatccagggctttgttacaaataatgaaaatgctttagaagagcttttctgtgacgacgaaaaccatcaaagagcagatgcttgcttaaatgtggtagctaaaagaattgctacagttttggcctcactaaaggaatatccctttgttcgctaccgcggagccaaagctcttgatgccacaacaatgacaacttaccgagagttgattcctacaaagcttgctgctagtgtatggaattgtcttgcaagatacaaacagacaatcgaagattttcctcagactgaaacatgcgaactacttatcttggatcgatccatagaccagatcgcacctctcattcatgagtggacatatgatgcgatgtgccacgatttgcttaatatggaaggaaataaatacacacacgaggttccgagtaaaactggtgataaacctgagaagaaagaggttcttctagatgaggaagattccatttgggtggagcttcgtgatgctcatattgcagatgcaagtgaaagattgcatgaaaagatgacaaacttcgtgtcgaagaacaaagctgcgcaattgaaacacagttcaaaagactttggtgacctttcatcaaaagacttgcagaagatggttcacgctttgcctcagtacagtgagcaaattgacaagctttctctacatgttgagatcgctagaacgataaacagaactatcatggaacaaggtctaagagatctcgggcagctcgagcaggaccttgtttttggggatgctggaagaaaggacgttatcaaatttctgagcaccaaccatattataagccacgaaagcaagctgaggttaattatgattgttgctgcaatatatcccaagaagttcgaaggtgaaaagggacgtaagatgatggagctagcaaaattgtcgggcgatgatgtagtagctgtgaacaatatgagattacttggaccagtacatacggagtgcaaaaagagcacaacaggatcttttcctctcaagtttgatgtccttaagacgaagcgagctgctcgaagagaccgagttggtgaaactcaaacatggcaactgtctcgtttttacccgattgttgaggaacttgttgagaaacttagcaaaggtcatttgccaaaacaagattacccttgtatgaatgaaccaaagccaaccttttattctggctctctgtctccatcagcgagtccggtattgcctcattcaagacgaacaccaacatgggcaagacgccatctttctgatgatggatatttcagtgactcggttctaggacgagcatctagtgggttcaagagaaagggacagcggattttcgtgttcatagtaggaggagcaacgagatcagagttaagggtttgccacaaacttacggagaagctcgacagagaagtgatcttaggctcctccagcttccttgatcccctaactttcctcactaaaatgaaacaactaaacgaagaagaggaaatctcacttgatgatattgtcatttgattagcaacttggtatcgaattttgttttggtaataaaatgatgggacggacatatgttccctatgtaaataaatacaatttatttgttcctttggtttgactaactaacggggttgctttatttaattgaatacttcatggttcttact

SEQ ID NO: 38188 - protein, 662 aa, Arabidopsis thaliana
  peptide (1)..(662): Ceres Seq. ID no. 12330241
MSFSDSGSSSYGGDYKNFRQITRERLLCEMLRPERNGSSKLTWKVLVMDKFTVKIMSSACKMSEITQGGISLVEVITKHRQPMTAMEVIYFIQPTEENVTAFLSDMTGKSPLYKKAFVFFSSPVSRSLVNVIKKDMRAMKRIGGLKEMNLEYISMDIQGFVTNNENALEELFCDDENHQRADACLNVVAKRIATVLASLKEYPFVRYRGAKALDATTMTTYRELIPTKLAASVWNCLARYKQTIEDFPQTETCELLILDRSIDQIAPLIHEWTYDAMCHDLLNMEGNKYTHEVPSKTGDKPEKKEVLLDEEDSIWVELRDAHIADASERLHEKMTNFVSKNKAAQLKHSSKDFGDLSSKDLQKMVHALPQYSEQIDKLSLHVEIARTINRTIMEQGLRDLGQLEQDLVFGDAGRKDVIKFLSTNHIISHESKLRLIMIVAAIYPKKFEGEKGRKMMELAKLSGDDVVAVNNMRLLGPVHTECKKSTTGSFPLKFDVLKTKRAARRDRVGETQTWQLSRFYPIVEELVEKLSKGHLPKQDYPCMNEPKPTFYSGSLSPSASPVLPHSRRTPTWARRHLSDDGYFSDSVLGRASSGFKRKGQRIFVFIVGGATRSELRVCHKLTEKLDREVILGSSSFLDPLTFLTKMKQLNEEEEISLDDIVI

SEQ ID NO: 38189 - protein, 633 aa, Arabidopsis thaliana
  peptide (1)..(633): Ceres Seq. ID no. 12330242
MLRPERNGSSKLTWKVLVMDKFTVKIMSSACKMSEITQGGISLVEVITKHRQPMTAMEVIYFIQPTEENVTAFLSDMTGKSPLYKKAFVFFSSPVSRSLVNVIKKDMRAMKRIGGLKEMNLEYISMDIQGFVTNNENALEELFCDDENHQRADACLNVVAKRIATVLASLKEYPFVRYRGAKALDATTMTTYRELIPTKLAASVWNCLARYKQTIEDFPQTETCELLILDRSIDQIAPLIHEWTYDAMCHDLLNMEGNKYTHEVPSKTGDKPEKKEVLLDEEDSIWVELRDAHIADASERLHEKMTNFVSKNKAAQLKHSSKDFGDLSSKDLQKMVHALPQYSEQIDKLSLHVEIARTINRTIMEQGLRDLGQLEQDLVFGDAGRKDVIKFLSTNHIISHESKLRLIMIVAAIYPKKFEGEKGRKMMELAKLSGDDVVAVNNMRLLGPVHTECKKSTTGSFPLKFDVLKTKRAARRDRVGETQTWQLSRFYPIVEELVEKLSKGHLPKQDYPCMNEPKPTFYSGSLSPSASPVLPHSRRTPTWARRHLSDDGYFSDSVLGRASSGFKRKGQRIFVFIVGGATRSELRVCHKLTEKLDREVILGSSSFLDPLTFLTKMKQLNEEEEISLDDIVI

SEQ ID NO: 38190 - protein, 615 aa, Arabidopsis thaliana
  peptide (1)..(615): Ceres Seq. ID no. 12330243
MDKFTVKIMSSACKMSEITQGGISLVEVITKHRQPMTAMEVIYFIQPTEENVTAFLSDMTGKSPLYKKAFVFFSSPVSRSLVNVIKKDMRAMKRIGGLKEMNLEYISMDIQGFVTNNENALEELFCDDENHQRADACLNVVAKRIATVLASLKEYPFVRYRGAKALDATTMTTYRELIPTKLAASVWNCLARYKQTIEDFPQTETCELLILDRSIDQIAPLIHEWTYDAMCHDLLNMEGNKYTHEVPSKTGDKPEKKEVLLDEEDSIWVELRDAHIADASERLHEKMTNFVSKNKAAQLKHSSKDFGDLSSKDLQKMVHALPQYSEQIDKLSLHVEIARTINRTIMEQGLRDLGQLEQDLVFGDAGRKDVIKFLSTNHIISHESKLRLIMIVAAIYPKKFEGEKGRKMMELAKLSGDDVVAVNNMRLLGPVHTECKKSTTGSFPLKFDVLKTKRAARRDRVGETQTWQLSRFYPIVEELVEKLSKGHLPKQDYPCMNEPKPTFYSGSLSPSASPVLPHSRRTPTWARRHLSDDGYFSDSVLGRASSGFKRKGQRIFVFIVGGATRSELRVCHKLTEKLDREVILGSSSFLDPLTFLTKMKQLNEEEEISLDDIVI

SEQ ID NO: 38191 - DNA, 1905 bp, Arabidopsis thaliana
  misc_feature (1)..(1905): Ceres Seq. ID no. 12328270
  misc_feature (1)..(1905): Ortholog of  Ceres SEQ ID NO 15169264 as cited in SEQ ID NO 55026
  misc_feature (1)..(1905): Ortholog of  Ceres SEQ ID NO 15224709 as cited in SEQ ID NO 68627
ccaacacatttacttttcttcttcttctctctctacgccatagctatggttttaccagagcttctcgtgattctagcagaatgggttctttaccgtcttcttgctaattcatgttacagagctgctagaaagctcagaggctatggtttccagttaaaaaatctcctaagcctctccaaaacacaatctctacacaacaattctcagcatcatcttcataaccatcatcaacaaaatcaccctaaccaaacccttcaagattctctagaccctctgttcccaagccttacaaaataccaagaacttcttctagacaaaaacagagcatgctctgtttcgtctgatcattatcgtgatacctttttctgcgatatcgatggtgttttattaagacaacattcgagcaaacatttccacacgttcttcccttacttcatgctcgtggcttttgaaggaggatcgatcatcagagcgatccttctcttgctctcctgttctttcctttggactctgcaacaagaaaccaaactcagagttctctctttcataaccttctctggtcttagagtcaaagacatggacaacgtttctagatcggttctaccaaaattcttcctcgagaacttgaatatccaagtttacgacatctgggctcgaactgagtactccaaagttgtgttcacgagcttgccgcaagtgctggtggagaggttcctcagagaacatctcaacgctgatgatgtgattgggactaaactgcaagaaataaaagtcatgggaaggaaattctacacaggcctagcttctggttctggtttcgtcctgaaacataaatcagctgaagactactttcttgatagcaagaagaagcctgcacttggaattggaagctcttcaagcccacaagatcacatcttcatctccatttgcaaagaagcttatttttggaatgaagaagagtccatgagcaagaacaacgcattgcctagagaaagatacccaaagccactgatattccacgacgggagattggctttcttgccaacaccattagctacattagctatgttcatatggctccctatcggatttttactcgctgtcttcaggatctcggtaggagtctttcttccttaccatgtagccaatttcttggcttctatgtccggtgttaggatcactttcaagacccataatttgaataacggtcgtccagagaaaggtaatagtggagtcttgtatgtatgcaaccataggaccctcctcgacccagttttcctcaccacttcgctgggcaagcccttgaccgcggttacttacagcctaagcaagttctccgagttcatagcacctctcaagacggttagccttaaaagagataggaagaaagacggtgaggcaatgcagagactattaagcaaaggagatctagtggtttgtccggagggaaccacatgtagagagccttatctactaaggttcagtcctttgttcgctgagttaactgaagacattgttcccgtggctgtagatgctcgagtgagcatgttctatgggacaactgcgagcgggctcaagtgtttagaccctatcttcttcctcatgaaccctaggccggtttattgtcttgagattttaaagaagttgccaaaagagatgacttgtgcaggaggcaagtcaagctttgaagttgcgaatttcatacagggagaacttgctagggttttgggatttgaatgcactaatctcacaaggagggataagtacttggttcttgctggaaatgaaggcattgtcagataaactattccgaattttcattagtttttttgtttgtttgaaaagctaaatattattgttatttcaggacttagatgtttaattctatatggttgattcattggc

SEQ ID NO: 38192 - protein, 600 aa, Arabidopsis thaliana
  peptide (1)..(600): Ceres Seq. ID no. 12328271
PTHLLFFFFSLYAIAMVLPELLVILAEWVLYRLLANSCYRAARKLRGYGFQLKNLLSLSKTQSLHNNSQHHLHNHHQQNHPNQTLQDSLDPLFPSLTKYQELLLDKNRACSVSSDHYRDTFFCDIDGVLLRQHSSKHFHTFFPYFMLVAFEGGSIIRAILLLLSCSFLWTLQQETKLRVLSFITFSGLRVKDMDNVSRSVLPKFFLENLNIQVYDIWARTEYSKVVFTSLPQVLVERFLREHLNADDVIGTKLQEIKVMGRKFYTGLASGSGFVLKHKSAEDYFLDSKKKPALGIGSSSSPQDHIFISICKEAYFWNEEESMSKNNALPRERYPKPLIFHDGRLAFLPTPLATLAMFIWLPIGFLLAVFRISVGVFLPYHVANFLASMSGVRITFKTHNLNNGRPEKGNSGVLYVCNHRTLLDPVFLTTSLGKPLTAVTYSLSKFSEFIAPLKTVSLKRDRKKDGEAMQRLLSKGDLVVCPEGTTCREPYLLRFSPLFAELTEDIVPVAVDARVSMFYGTTASGLKCLDPIFFLMNPRPVYCLEILKKLPKEMTCAGGKSSFEVANFIQGELARVLGFECTNLTRRDKYLVLAGNEGIVR

SEQ ID NO: 38193 - protein, 585 aa, Arabidopsis thaliana
  peptide (1)..(585): Ceres Seq. ID no. 12328272
MVLPELLVILAEWVLYRLLANSCYRAARKLRGYGFQLKNLLSLSKTQSLHNNSQHHLHNHHQQNHPNQTLQDSLDPLFPSLTKYQELLLDKNRACSVSSDHYRDTFFCDIDGVLLRQHSSKHFHTFFPYFMLVAFEGGSIIRAILLLLSCSFLWTLQQETKLRVLSFITFSGLRVKDMDNVSRSVLPKFFLENLNIQVYDIWARTEYSKVVFTSLPQVLVERFLREHLNADDVIGTKLQEIKVMGRKFYTGLASGSGFVLKHKSAEDYFLDSKKKPALGIGSSSSPQDHIFISICKEAYFWNEEESMSKNNALPRERYPKPLIFHDGRLAFLPTPLATLAMFIWLPIGFLLAVFRISVGVFLPYHVANFLASMSGVRITFKTHNLNNGRPEKGNSGVLYVCNHRTLLDPVFLTTSLGKPLTAVTYSLSKFSEFIAPLKTVSLKRDRKKDGEAMQRLLSKGDLVVCPEGTTCREPYLLRFSPLFAELTEDIVPVAVDARVSMFYGTTASGLKCLDPIFFLMNPRPVYCLEILKKLPKEMTCAGGKSSFEVANFIQGELARVLGFECTNLTRRDKYLVLAGNEGIVR

SEQ ID NO: 38194 - protein, 455 aa, Arabidopsis thaliana
  peptide (1)..(455): Ceres Seq. ID no. 12328273
MLVAFEGGSIIRAILLLLSCSFLWTLQQETKLRVLSFITFSGLRVKDMDNVSRSVLPKFFLENLNIQVYDIWARTEYSKVVFTSLPQVLVERFLREHLNADDVIGTKLQEIKVMGRKFYTGLASGSGFVLKHKSAEDYFLDSKKKPALGIGSSSSPQDHIFISICKEAYFWNEEESMSKNNALPRERYPKPLIFHDGRLAFLPTPLATLAMFIWLPIGFLLAVFRISVGVFLPYHVANFLASMSGVRITFKTHNLNNGRPEKGNSGVLYVCNHRTLLDPVFLTTSLGKPLTAVTYSLSKFSEFIAPLKTVSLKRDRKKDGEAMQRLLSKGDLVVCPEGTTCREPYLLRFSPLFAELTEDIVPVAVDARVSMFYGTTASGLKCLDPIFFLMNPRPVYCLEILKKLPKEMTCAGGKSSFEVANFIQGELARVLGFECTNLTRRDKYLVLAGNEGIVR

SEQ ID NO: 38195 - DNA, 2450 bp, Arabidopsis thaliana
  misc_feature (1)..(2450): Ceres Seq. ID no. 12329669
  misc_feature (1)..(2450): Ortholog of  Ceres SEQ ID NO 13598023 as cited in SEQ ID NO 66487
ataagtcataaggacgacaccattacgcaacttagtcctcttacctctctctctctcgactctgttccaagaaattcctctacttaatacagctgattctacagattcctgctacgaaatttctgggtctgggttgatctttgtctcaccagtcaacccaattcaggactttgataaaggtggaaatggtggctttattagcttctcagagctgctgctatggcggtgagaccgcaagagtcaccaaagctattggtttcagtagctctttggagaatcatttcactggggaagccactcagtgttatggcagcaagtctaagagatttcgtattgagatgagacagtcggaattgccctctaaggttggaatcaatggacgttcagtcaaaatggttcctgcgagtgaggtggtgaagaggaaagatggtgtgaatggatcggctgggaaaggtgttaatggagcgagtttggttagtagtagaaacattaatggtgcggcgtcaactttggttaaggcaccaaagaaaacaacagaatcgtaccttcctccaccggttgaaggagttagggttcttccttctgatgaaggttttagctgggctgatgagaattatagctcacttcaacgcagtattgatgtttggtcatttgttatttccctgaggattcgtatcttgttcgataattcgaaatgggcttatgttggaggattcacagaagaaaaacagaaaagcagaagaagagaaacagcttcatggttgagagagagtgtattgcagcttggtccaacgtttatcaaactgggacagttgtcttcaactaggtcagacttgtttccgcgcgaattcgtggatgagctttccaagttgcaggacagagtccccgctttttctccagagaaagcaaagcgcttcattgaggctgaacttggggctcctattagtgtaatgtataaagaatttgaagagcaacccatagctgcagctagccttggtcaggtacacagagctgttttgcacaatggcgagaaagtggtagtaaaagtacaaagacccggactaaagaaacttttcgatattgatctacgaaatctgaagctgattgccgagtatttccagaaaagtgaatcatttggtacaaacgattgggttggtatctatgaagaatgtgccttaattttgtatcaagagattgactacataaacgaagctaagaacgctgacagattccggagagacttccggaatataaactgggtccgcgtacctttggtttattgggattactctgccatgaaggtcttgactttggagtatgtaccaggtgttaagatcaacaacttggacgccttagctgcacggggttttaaccgttctagaatcgcatcacgggccattgaagcttatcttatacagatactcaaaaccggcttctttcatgcggatccgcacccaggaaaccttgcaattgatgtagatgaatcaatcatctactatgacttcggcatgatgggagagatcaaaacatttactcggaagagattacttgatctcttctattctgtttatgaaaaagatgcaaaaaaggtcatgcaaaaccttatagaccttgaagcacttcaacccactggagatctttcatcggtaaggagatctgttcagtttttcttggacaacctattaagccaatcaccagatcagcaacagactttggcagctattggagaggatctgtttgcaatttcccaggatcagccattccgtttcccatcaactttcacctttgtcatccgagcattttccacacttgagggtattggttacatccttgatccagaattttcctttgtgaaggttgcggctccttatgcgcaggaactcctggatctaaaacaaaggcaacgctcgggaactcagcttgtccaagaaataagaaagcaggctgatgatgccaggtcttctactctgtctatgccatatcgagtgcagcgaatagaagagtttgtgaaagaactcgattcaggcgatctgaaactccgtgttcgggttcttgagtcggaaagagcagcccggaaagcgacaatactgcagatggcgacgatgtatacagttcttggaggaactctacttaatattggggttacatttagcaaccaaggaagtcagcttgttgccaatggatccttcattggagcagggatattcatgttattggtactgaggtctatgcaaagggtaaataagcttgataaatttgagaagatgatatgatgatgactggtggtctggtggatagtttattcttttaaagctccaaatatcagatatagaatttgtgatgtataggtatagcatgtatctttagctcccatacacaatatttataaattgtataaaaactgtttctaaggaaaggaaagtcaaagatataatatgagactgagtttc

SEQ ID NO: 38196 - protein, 695 aa, Arabidopsis thaliana
  peptide (1)..(695): Ceres Seq. ID no. 12329670
MVALLASQSCCYGGETARVTKAIGFSSSLENHFTGEATQCYGSKSKRFRIEMRQSELPSKVGINGRSVKMVPASEVVKRKDGVNGSAGKGVNGASLVSSRNINGAASTLVKAPKKTTESYLPPPVEGVRVLPSDEGFSWADENYSSLQRSIDVWSFVISLRIRILFDNSKWAYVGGFTEEKQKSRRRETASWLRESVLQLGPTFIKLGQLSSTRSDLFPREFVDELSKLQDRVPAFSPEKAKRFIEAELGAPISVMYKEFEEQPIAAASLGQVHRAVLHNGEKVVVKVQRPGLKKLFDIDLRNLKLIAEYFQKSESFGTNDWVGIYEECALILYQEIDYINEAKNADRFRRDFRNINWVRVPLVYWDYSAMKVLTLEYVPGVKINNLDALAARGFNRSRIASRAIEAYLIQILKTGFFHADPHPGNLAIDVDESIIYYDFGMMGEIKTFTRKRLLDLFYSVYEKDAKKVMQNLIDLEALQPTGDLSSVRRSVQFFLDNLLSQSPDQQQTLAAIGEDLFAISQDQPFRFPSTFTFVIRAFSTLEGIGYILDPEFSFVKVAAPYAQELLDLKQRQRSGTQLVQEIRKQADDARSSTLSMPYRVQRIEEFVKELDSGDLKLRVRVLESERAARKATILQMATMYTVLGGTLLNIGVTFSNQGSQLVANGSFIGAGIFMLLVLRSMQRVNKLDKFEKMI

SEQ ID NO: 38197 - protein, 644 aa, Arabidopsis thaliana
  peptide (1)..(644): Ceres Seq. ID no. 12329671
MRQSELPSKVGINGRSVKMVPASEVVKRKDGVNGSAGKGVNGASLVSSRNINGAASTLVKAPKKTTESYLPPPVEGVRVLPSDEGFSWADENYSSLQRSIDVWSFVISLRIRILFDNSKWAYVGGFTEEKQKSRRRETASWLRESVLQLGPTFIKLGQLSSTRSDLFPREFVDELSKLQDRVPAFSPEKAKRFIEAELGAPISVMYKEFEEQPIAAASLGQVHRAVLHNGEKVVVKVQRPGLKKLFDIDLRNLKLIAEYFQKSESFGTNDWVGIYEECALILYQEIDYINEAKNADRFRRDFRNINWVRVPLVYWDYSAMKVLTLEYVPGVKINNLDALAARGFNRSRIASRAIEAYLIQILKTGFFHADPHPGNLAIDVDESIIYYDFGMMGEIKTFTRKRLLDLFYSVYEKDAKKVMQNLIDLEALQPTGDLSSVRRSVQFFLDNLLSQSPDQQQTLAAIGEDLFAISQDQPFRFPSTFTFVIRAFSTLEGIGYILDPEFSFVKVAAPYAQELLDLKQRQRSGTQLVQEIRKQADDARSSTLSMPYRVQRIEEFVKELDSGDLKLRVRVLESERAARKATILQMATMYTVLGGTLLNIGVTFSNQGSQLVANGSFIGAGIFMLLVLRSMQRVNKLDKFEKMI

SEQ ID NO: 38198 - protein, 626 aa, Arabidopsis thaliana
  peptide (1)..(626): Ceres Seq. ID no. 12329672
MVPASEVVKRKDGVNGSAGKGVNGASLVSSRNINGAASTLVKAPKKTTESYLPPPVEGVRVLPSDEGFSWADENYSSLQRSIDVWSFVISLRIRILFDNSKWAYVGGFTEEKQKSRRRETASWLRESVLQLGPTFIKLGQLSSTRSDLFPREFVDELSKLQDRVPAFSPEKAKRFIEAELGAPISVMYKEFEEQPIAAASLGQVHRAVLHNGEKVVVKVQRPGLKKLFDIDLRNLKLIAEYFQKSESFGTNDWVGIYEECALILYQEIDYINEAKNADRFRRDFRNINWVRVPLVYWDYSAMKVLTLEYVPGVKINNLDALAARGFNRSRIASRAIEAYLIQILKTGFFHADPHPGNLAIDVDESIIYYDFGMMGEIKTFTRKRLLDLFYSVYEKDAKKVMQNLIDLEALQPTGDLSSVRRSVQFFLDNLLSQSPDQQQTLAAIGEDLFAISQDQPFRFPSTFTFVIRAFSTLEGIGYILDPEFSFVKVAAPYAQELLDLKQRQRSGTQLVQEIRKQADDARSSTLSMPYRVQRIEEFVKELDSGDLKLRVRVLESERAARKATILQMATMYTVLGGTLLNIGVTFSNQGSQLVANGSFIGAGIFMLLVLRSMQRVNKLDKFEKMI

SEQ ID NO: 38199 - DNA, 1202 bp, Arabidopsis thaliana
  misc_feature (1)..(1202): Ceres Seq. ID no. 13576721
  misc_feature (1)..(1202): Ortholog of  Ceres SEQ ID NO 14313170 as cited in SEQ ID NO 20674
  misc_feature (1)..(1202): Ortholog of  Ceres SEQ ID NO 15179015 as cited in SEQ ID NO 0
  misc_feature (1)..(1202): Ortholog of  Ceres SEQ ID NO 15179613 as cited in SEQ ID NO 0
acatgaaccataactttctctaacatcactctcctttacacaaccccaaaaatagacctcacctctctcgtcttctctattctctccgctccttaatttccaattccaaccttctctgttttgccttgatggaaaagatagctccggagctcttcctcgtcgccggtaacccggactctttcgtcgtcgacgacctcctcgacttctctaacgacgacggcgaagttgacgacggcttaaacactcttcccgattcttcaacactctccaccggcactctcaccgacagttccaactcctcctcgcttttcaccgacggcactggcttctccgacctatatattccgaatgacgatatagcagaattagaatggttatcaaattttgtggaagaatcattcgcaggagaagaccaagacaagcttcacttattttccggtttaaaaaaccctcaaaccaccgggtcgaccctgacccacttaattaaacccgaacccgaacttgatcatcaattcatcgacatcgatgaatccaacgtcgccgttcctgccaaggccagaagcaagagatcacgttctgcagcctccacgtgggcttcccgtcttttatccttagccgattccgacgaaaccaatcccaagaagaaacaacgaagagtgaaagaacaagacttcgccggagatatggacgtggattgcggagaaagcggaggaggacgacgttgtttgcactgcgcgacggagaagacgccgcaatggaggacgggacctatgggtccgaagacgctttgtaacgcttgcggagtgaggtacaaatcagggaggctcgtgccggagtatagaccggcgtcgagtccgacgttcgtgatggcgaggcactcgaactctcaccggaaagtgatggagctccggcgacagaaggagatgagagacgagcatttgctgagtcagcttaggtgtgagaatctactgatggatatcagatccaacggtgaagatttcttaatgcataataatactaaccacgtggctcctgattttagacacttaatctagttttctatttccacgtggataatttcgcaataatttgttcgtttcgtttagctttatttttttttttttcctttttaacatttgtttttcattttctgcagactacttctagtactattgatatatttgatagcttttgtttttgct

SEQ ID NO: 38200 - protein, 308 aa, Arabidopsis thaliana
  peptide (1)..(308): Ceres Seq. ID no. 13576722
MEKIAPELFLVAGNPDSFVVDDLLDFSNDDGEVDDGLNTLPDSSTLSTGTLTDSSNSSSLFTDGTGFSDLYIPNDDIAELEWLSNFVEESFAGEDQDKLHLFSGLKNPQTTGSTLTHLIKPEPELDHQFIDIDESNVAVPAKARSKRSRSAASTWASRLLSLADSDETNPKKKQRRVKEQDFAGDMDVDCGESGGGRRCLHCATEKTPQWRTGPMGPKTLCNACGVRYKSGRLVPEYRPASSPTFVMARHSNSHRKVMELRRQKEMRDEHLLSQLRCENLLMDIRSNGEDFLMHNNTNHVAPDFRHLI

SEQ ID NO: 38201 - DNA, 1661 bp, Arabidopsis thaliana
  misc_feature (1)..(1661): Ceres Seq. ID no. 12326924
  misc_feature (1)..(1661): Ortholog of  Ceres SEQ ID NO 13596816 as cited in SEQ ID NO 62287
aatcaaacccaaaagcccaaaacccagaaaagaaaaatctctcttttgaaaattctccttttgcaaatcattcaagtgaagcagaatcatctccttcttcttcttctccagcttcatcaatctcttctaaactttttgcgtttacctgaaaaactgttttgatcggaagaatctgattgcttcgatgtcgctgtcgaatcagattcccgtttactctcgatgaccctctgcatcttcttccactttttttccccagttttctgataacttttctcagatgagaagttctacgttacttcttctcaagttcttcttcttcttcttcaatctgacttcgcttgagtatcaagttgatggagcatttgttggaacatatgggataaattatggaaggatagctgacaacataccatctccggagaaagtagttttacttctaaagcaagctaaaattcggaatgtgcgtatatacgatgtagatcacactgttcttgaagcttttagtggaactggtttagaccttgttgttggacttcctaatgggtttttaaaagagatgagttcaaatgctgatcatgctttcacttgggttaaagaaaatatccagtctttcttacccaagactcggattcgcggtatcgctataggtaacgaagttcttggaggcggtgattctgagctcgcgggagctttacttggtgctgctaaaaatgtgtacaatgcgttgaagaaaatgaatctggaggacactgtgcagatcactacggctcattcacaggctgtgttttctgattcctacccgccttcgtcttgtgtgtttaaagagaatgttgttcagttcatgaagccattgttggagttttttcagcagattgggtctcctttttgtttgaatgcttacccttttttggcgtacacttataatccgaaggagattgatatcaactatgctcttttcaagccaacggaagggatatatgacccgaaaaccgatttgcattacgataacatgcttgatgctcagattgatgctgcttacatggcgttgcaagatgctgggtttaagaagatggaggttatgatcactgaaactgggtgggcttctaaaggggattcagatgaacctgcagcaacaccagagaacgcaagaacgtataactataacctcaggaagaggcttgctaagaagaaagggacacctcttagaccaaaaacggtgcttaaagcctatatctttgcattgttcaatgaaaactcaaaaccgggcaagagttctgagacacactttggactttttaaacctgatggaaccatatcatatgacattggattcaacagtctaaagtctgattctcccaagtcactcatttcatcatcaaagtcagctcgttactatgtggcattggtcatctctgtctcggctttcctcttgatgatataaatgcggaaatggtgtgagctttgacgatcctcggatttggtcgtacattcgtagcactataatatatattactagggttgggacgctaacgaaatggtaggagcacaaatttactgcaattctcatatatgtagccaagagatatccagaaaagatatcaccagacactatcatatatacacatcttatgtaaaacaaatctaatacataaatttgggcc

SEQ ID NO: 38202 - protein, 387 aa, Arabidopsis thaliana
  peptide (1)..(387): Ceres Seq. ID no. 12326925
MRSSTLLLLKFFFFFFNLTSLEYQVDGAFVGTYGINYGRIADNIPSPEKVVLLLKQAKIRNVRIYDVDHTVLEAFSGTGLDLVVGLPNGFLKEMSSNADHAFTWVKENIQSFLPKTRIRGIAIGNEVLGGGDSELAGALLGAAKNVYNALKKMNLEDTVQITTAHSQAVFSDSYPPSSCVFKENVVQFMKPLLEFFQQIGSPFCLNAYPFLAYTYNPKEIDINYALFKPTEGIYDPKTDLHYDNMLDAQIDAAYMALQDAGFKKMEVMITETGWASKGDSDEPAATPENARTYNYNLRKRLAKKKGTPLRPKTVLKAYIFALFNENSKPGKSSETHFGLFKPDGTISYDIGFNSLKSDSPKSLISSSKSARYYVALVISVSAFLLMI

SEQ ID NO: 38203 - protein, 294 aa, Arabidopsis thaliana
  peptide (1)..(294): Ceres Seq. ID no. 12326926
MSSNADHAFTWVKENIQSFLPKTRIRGIAIGNEVLGGGDSELAGALLGAAKNVYNALKKMNLEDTVQITTAHSQAVFSDSYPPSSCVFKENVVQFMKPLLEFFQQIGSPFCLNAYPFLAYTYNPKEIDINYALFKPTEGIYDPKTDLHYDNMLDAQIDAAYMALQDAGFKKMEVMITETGWASKGDSDEPAATPENARTYNYNLRKRLAKKKGTPLRPKTVLKAYIFALFNENSKPGKSSETHFGLFKPDGTISYDIGFNSLKSDSPKSLISSSKSARYYVALVISVSAFLLMI

SEQ ID NO: 38204 - protein, 235 aa, Arabidopsis thaliana
  peptide (1)..(235): Ceres Seq. ID no. 12326927
MNLEDTVQITTAHSQAVFSDSYPPSSCVFKENVVQFMKPLLEFFQQIGSPFCLNAYPFLAYTYNPKEIDINYALFKPTEGIYDPKTDLHYDNMLDAQIDAAYMALQDAGFKKMEVMITETGWASKGDSDEPAATPENARTYNYNLRKRLAKKKGTPLRPKTVLKAYIFALFNENSKPGKSSETHFGLFKPDGTISYDIGFNSLKSDSPKSLISSSKSARYYVALVISVSAFLLMI

SEQ ID NO: 38205 - DNA, 909 bp, Arabidopsis thaliana
  misc_feature (1)..(909): Ceres Seq. ID no. 12578703
  misc_feature (1)..(909): Ortholog of  Ceres SEQ ID NO 13638849 as cited in SEQ ID NO 52046
  misc_feature (1)..(909): Ortholog of  Ceres SEQ ID NO 13599613 as cited in SEQ ID NO 0
aactttataacgctattctcaaacaagcaaagaaccttaaccaaaaagaaaacgtctacggagacatatggagaggaaacatcacttcgtgttagttcacaacgcttatcatggagcctggatctggtacaagctcaagcccctccttgaatcagccggccaccgcgttactgctgtcgaactcgccgcctccgggatcgacccacgaccaatccaggccgttgaaaccgtcgacgaatactccaaaccgttgatcgaaaccctcaaatctcttccagagaacgaagaggtaattctggttggattcagcttcggaggcatcaacatcgctctcgccgccgacatatttccggcgaagattaaggttcttgtgttcctcaacgccttcttgcccgacacaacccacgtgccttctcacgttctggacaagtatatggagatgcctggaggtttgggagattgtgagttttcatctcatgaaacaagaaatgggacgatgagtttattgaagatgggaccaaaattcatgaaggcacgtctttaccaaaattgtcccatagaggattacgagctggcaaaaatgttgcataggcaagggtcatttttcacagaggatctatcaaagaaagaaaagtttagcgaggaaggatatggttcggtgcaacgagtttacgtaatgagtagtgaagacaaagccatcccctgcgatttcattcgttggatgattgataatttcaacgtctcgaaagtctacgagatcgatggcggagatcacatggtgatgctctccaaaccccaaaaactctttgactctctctctgctattgccaccgattatatgtaataatcttaaagtctgttttacttttttctcatcgttactaataaaacaaacccctttttccgggc

SEQ ID NO: 38206 - protein, 258 aa, Arabidopsis thaliana; identical to SEQ ID NO: 34831
  peptide (1)..(258): Ceres Seq. ID no. 12578704

SEQ ID NO: 38207 - protein, 136 aa, Arabidopsis thaliana; identical to SEQ ID NO: 34832
  peptide (1)..(136): Ceres Seq. ID no. 12578705

SEQ ID NO: 38208 - protein, 134 aa, Arabidopsis thaliana; identical to SEQ ID NO: 34833
  peptide (1)..(134): Ceres Seq. ID no. 12578706

SEQ ID NO: 38209 - DNA, 815 bp, Arabidopsis thaliana
  misc_feature (1)..(815): Ceres Seq. ID no. 12396747
  misc_feature (1)..(815): Ortholog of  Ceres SEQ ID NO 13638658 as cited in SEQ ID NO 51921
  misc_feature (1)..(815): Ortholog of  Ceres SEQ ID NO 14306522 as cited in SEQ ID NO 53365
  misc_feature (1)..(815): Ortholog of  Ceres SEQ ID NO 15175175 as cited in SEQ ID NO 0
agaatcagccgacgtttcctcttcaccactttcctctgtttctctgtttcgctctctctacaaaatttctccatgaacatacttaacaagctaggtataggatcaagtagacaaaccaacatggatccttctccaatcgcacaagtaatcgacgacgaagctccggcgccgggaaaccagtttgctcaattcggcgccggttgtttctggagcgtggaattagcgtaccagagagttccaggagtgactcaaacagaggttggttattctcaagggatcactcacgatccttcttacaaagatgtttgttcaggtaccacgaatcatgccgagattgttcgtgttcaatatgatccaaaagagtgtagttaccagtcgctgcttgatttgttctggtctaagcatgatcccaccactttgaatcggcagggaaatgatgtgggaacccaataccgttcagggatatatttctacaacccggagcaagagaaactagcacgcgagtcactggagcggcaccagcaacaagttgacaggaaggttgtgacagagatcttaccggctaagaaattttatagagctgaggaacatcaccagcaatacttgtctaaatgagggaggtttggtcttaagcaatcaacggaaaaaggctgcaacgacccaatccgctgctacgggtaaaagccttgcttctaaccgaaagcagaggatgcttccacttatctatgatagattatagcaattatcgttgaaaaataaagaagccgaggctacttatgtaacttgttcttgttcataaaactttttaagtgttc

SEQ ID NO: 38210 - protein, 204 aa, Arabidopsis thaliana
  peptide (1)..(204): Ceres Seq. ID no. 12396748
RISRRFLFTTFLCFSVSLSLQNFSMNILNKLGIGSSRQTNMDPSPIAQVIDDEAPAPGNQFAQFGAGCFWSVELAYQRVPGVTQTEVGYSQGITHDPSYKDVCSGTTNHAEIVRVQYDPKECSYQSLLDLFWSKHDPTTLNRQGNDVGTQYRSGIYFYNPEQEKLARESLERHQQQVDRKVVTEILPAKKFYRAEEHHQQYLSK

SEQ ID NO: 38211 - protein, 180 aa, Arabidopsis thaliana
  peptide (1)..(180): Ceres Seq. ID no. 12396749
MNILNKLGIGSSRQTNMDPSPIAQVIDDEAPAPGNQFAQFGAGCFWSVELAYQRVPGVTQTEVGYSQGITHDPSYKDVCSGTTNHAEIVRVQYDPKECSYQSLLDLFWSKHDPTTLNRQGNDVGTQYRSGIYFYNPEQEKLARESLERHQQQVDRKVVTEILPAKKFYRAEEHHQQYLSK

SEQ ID NO: 38212 - protein, 164 aa, Arabidopsis thaliana
  peptide (1)..(164): Ceres Seq. ID no. 12396750
MDPSPIAQVIDDEAPAPGNQFAQFGAGCFWSVELAYQRVPGVTQTEVGYSQGITHDPSYKDVCSGTTNHAEIVRVQYDPKECSYQSLLDLFWSKHDPTTLNRQGNDVGTQYRSGIYFYNPEQEKLARESLERHQQQVDRKVVTEILPAKKFYRAEEHHQQYLSK

SEQ ID NO: 38213 - DNA, 1843 bp, Arabidopsis thaliana; identical to SEQ ID NO: 23227
  misc_feature (1)..(1843): Ceres Seq. ID no. 13489341
  misc_feature (1)..(1843): Ortholog of  Ceres SEQ ID NO 14313897 as cited in SEQ ID NO 59695
  misc_feature (1)..(1843): Ortholog of  Ceres SEQ ID NO 13660049 as cited in SEQ ID NO 67010

SEQ ID NO: 38214 - protein, 421 aa, Arabidopsis thaliana; identical to SEQ ID NO: 23228
  peptide (1)..(421): Ceres Seq. ID no. 13489342

SEQ ID NO: 38215 - protein, 372 aa, Arabidopsis thaliana; identical to SEQ ID NO: 23229
  peptide (1)..(372): Ceres Seq. ID no. 13489343

SEQ ID NO: 38216 - protein, 363 aa, Arabidopsis thaliana; identical to SEQ ID NO: 23230
  peptide (1)..(363): Ceres Seq. ID no. 13489344

SEQ ID NO: 38217 - DNA, 1008 bp, Arabidopsis thaliana
  misc_feature (1)..(1008): Ceres Seq. ID no. 12602576
  misc_feature (1)..(1008): Ortholog of  Ceres SEQ ID NO 15173118 as cited in SEQ ID NO 62952
  misc_feature (1)..(1008): Ortholog of  Ceres SEQ ID NO 15180067 as cited in SEQ ID NO 0
aaaacgtcaacgaaaaatatccgatcgccggcgttctggtctatcattgtttgctttccttgaagatcccgaaacccaaaaaatgtcacaaggatggttttcgatgggcgggagtagcaccgtagatcagcagcagcaatcgggttcgtctctgcttgcggattggaattcttacgcagcctctagagatttcgaggaaagcggcggaagcttcggctttgatatcgaatccgccgttagatctgccaatgacactgtttcgggcaccttcagtgtggtttcaaaaggagttagagatattccagggagcttgcagtcagcaacaagtagtatgccttcaggaaaagcgctcatgtatttcggtttacttctcgcaagtggtgttttcttcatcttcattgccttcacaatgtttcttccagtcatggtgcttatgccacagaaatttgccatttgtttcacccttggatgtggattcatcattggatccttcttcgcacttcgtggccctaaaaatcagctcgcacacatgtcttcgatggagaggcttccttcaaccctaggtttcattgctaccatggttggtaccatatacgtatcaatggttctccacagctacattctctcggtgctcttctcagtgttacaggttcttgcgctggtttactactgtatatcctacttccctggtggatcatcaggcatgaggttcctcagttctgctctcacctcatctgcgctaagagttttcgggagataagctttcgtagccaatctgggagagagaacaatacttgtcggtgtacaaagaaagatgtcgaagcgttttttggtatactctttaacatagatttgatgaaatccctcgaaaagataaatgatcgtgaaggaaatgtttagtgaagaacccaattgatgttcttttttttttagttgctggtgattcccgaaccaaaacgaaaaaatccattgtaccaagaaaatgtcaaaatgagtttcctaattccc

SEQ ID NO: 38218 - protein, 252 aa, Arabidopsis thaliana
  peptide (1)..(252): Ceres Seq. ID no. 12602577
KRQRKISDRRRSGLSLFAFLEDPETQKMSQGWFSMGGSSTVDQQQQSGSSLLADWNSYAASRDFEESGGSFGFDIESAVRSANDTVSGTFSVVSKGVRDIPGSLQSATSSMPSGKALMYFGLLLASGVFFIFIAFTMFLPVMVLMPQKFAICFTLGCGFIIGSFFALRGPKNQLAHMSSMERLPSTLGFIATMVGTIYVSMVLHSYILSVLFSVLQVLALVYYCISYFPGGSSGMRFLSSALTSSALRVFGR

SEQ ID NO: 38219 - protein, 225 aa, Arabidopsis thaliana
  peptide (1)..(225): Ceres Seq. ID no. 12602578
MSQGWFSMGGSSTVDQQQQSGSSLLADWNSYAASRDFEESGGSFGFDIESAVRSANDTVSGTFSVVSKGVRDIPGSLQSATSSMPSGKALMYFGLLLASGVFFIFIAFTMFLPVMVLMPQKFAICFTLGCGFIIGSFFALRGPKNQLAHMSSMERLPSTLGFIATMVGTIYVSMVLHSYILSVLFSVLQVLALVYYCISYFPGGSSGMRFLSSALTSSALRVFGR

SEQ ID NO: 38220 - protein, 218 aa, Arabidopsis thaliana
  peptide (1)..(218): Ceres Seq. ID no. 12602579
MGGSSTVDQQQQSGSSLLADWNSYAASRDFEESGGSFGFDIESAVRSANDTVSGTFSVVSKGVRDIPGSLQSATSSMPSGKALMYFGLLLASGVFFIFIAFTMFLPVMVLMPQKFAICFTLGCGFIIGSFFALRGPKNQLAHMSSMERLPSTLGFIATMVGTIYVSMVLHSYILSVLFSVLQVLALVYYCISYFPGGSSGMRFLSSALTSSALRVFGR

SEQ ID NO: 38221 - DNA, 2399 bp, Arabidopsis thaliana
  misc_feature (1)..(2399): Ceres Seq. ID no. 13488340
  misc_feature (1)..(2399): Ortholog of  Ceres SEQ ID NO 13654989 as cited in SEQ ID NO 63117
  misc_feature (1)..(2399): Ortholog of  Ceres SEQ ID NO 13584744 as cited in SEQ ID NO 69137
aggagattagcgaaaactcaaaacaggaacaaagttaaaagagtgagagagaaagaaagagagaagatgaaggtacaggagggtttgttcgtggtggctgttttctaccttgcttatacgcagctagtcaaggggcaacctcgcaaggagtgccaaactagatgtggcaatgtcgcagttgagtacccttttggtacttctccaggttgttactatcccggagatgaaagtttcaatcttacttgcaacgagcaagagaagctcttctttggcaacatgccagtcatcaacatgtctctcagcggccagcttcgtgttcggctagttagatccagagtttgctacgatagtcaaggaaaacagactgactacattgcccggcggaccaccctgggtaatttcactctctctgaacttaacagatttactgtagtaggttgtaacagttacgcatttctccgcacatctggagttgaaaaatactcaactggatgcatatcaatatgtgattctgccacaacgaaaaacggatcatgttctggtgaaggttgctgccagatccctgtccctagaggatactcttttgtcagagtaaaaccacatagctttcacaaccatcctactgtgcatctgtttaatccttgcacctacgcctttctcgttgaagatggtatgtttgacttccatgctttggaagatctcaacaatctgcgaaatgttactacgttccctgtagtactagattggtctatcggagacaagacttgcaaacaagtagaatacaggggcgtgtgtggtggtaacagcacatgtttcgattctactggtggaaccgggtataactgcaaatgtttagaaggttttgaggggaatccataccttccaaacggttgtcaagacatcaatgaatgtattagtagtagacataactgttcggagcatagtacctgtgaaaacacgaaggggagcttcaactgtaactgcccatctggttaccgcaaagattcccttaatagctgtactcgtaaagtcaggcctgaatactttagatggactcaaatttttcttggaaccaccatcggcttctcggttatcatgcttgggattagctgtctacaacagaaaattaagcaccggaagaacacagagctccgacaaaaattcttcgagcaaaatggtggaggcatgttgatacagcgagtctcgggagcagggccatcaaatgttgatgtcaaaatcttcactgagaaaggaatgaaggaagcaactaatggttaccatgagagcagaatcctgggtcagggaggccaaggaacagtgtacaaagggatattgccggacaactccatagttgctataaagaaagctcggcttggaaaccgtagccaagtagagcagttcatcaacgaagtgctagtgctttcacaaatcaaccataggaacgtggtcaaggtcttggggtgttgtttagagacagaagtccccttgttggtctatgagttcattaacagtggtacccttttcgatcacttgcacggttccttgtatgattcttcacttacatgggagcaccgtctgaggatagcaacagaagtagcaggaagtcttgcatatcttcactcttctgcttctattccaatcatccaccgagatatcaagactgctaatattctcctggataaaaacttaactgcaaaagcagctgactttggtgcatcaagattgataccgatggataaagagcagctcacaacaatagtgcaaggcactctaggttacctagacccagaatattacaacacagggttgttaaacgaaaagagcgatgtttatagttttggggtcgtcctaatggaactgctctcaggtcaaaaggcattgtgtttcgaaagaccacattgcccaaaaaatctagtgagttgttttgcttctgccacaaagaataataggttccatgaaattattgatgggcaagtgatgaatgaggataaccagagagagatccaggaagctgcaagaattgctgcagagtgtacaaggctaatgggagaggaaaggccaaggatgaaagaagtagctgcagagttagaggccttgagagttaaaacaactaaatataagtggtcggatcagtatcgtgagacaggggagattgaacacttgctcggcgttcaaatcttgtcagcacaaggcgaaaccagtagcagcattggctatgacagcatcagaaatgtaacaacattggacattgaagctggccgttgatattaatgctctgacaaaatcacatgtatatcttttgtttgtaaaaaaagaaagtcatttccttgttgcttcatcaataatgctttgacagatttgtttgtacatcatcaataatcatgttcatattttccttt

SEQ ID NO: 38222 - protein, 754 aa, Arabidopsis thaliana
  peptide (1)..(754): Ceres Seq. ID no. 13488341
RRLAKTQNRNKVKRVREKEREKMKVQEGLFVVAVFYLAYTQLVKGQPRKECQTRCGNVAVEYPFGTSPGCYYPGDESFNLTCNEQEKLFFGNMPVINMSLSGQLRVRLVRSRVCYDSQGKQTDYIARRTTLGNFTLSELNRFTVVGCNSYAFLRTSGVEKYSTGCISICDSATTKNGSCSGEGCCQIPVPRGYSFVRVKPHSFHNHPTVHLFNPCTYAFLVEDGMFDFHALEDLNNLRNVTTFPVVLDWSIGDKTCKQVEYRGVCGGNSTCFDSTGGTGYNCKCLEGFEGNPYLPNGCQDINECISSRHNCSEHSTCENTKGSFNCNCPSGYRKDSLNSCTRKVRPEYFRWTQIFLGTTIGFSVIMLGISCLQQKIKHRKNTELRQKFFEQNGGGMLIQRVSGAGPSNVDVKIFTEKGMKEATNGYHESRILGQGGQGTVYKGILPDNSIVAIKKARLGNRSQVEQFINEVLVLSQINHRNVVKVLGCCLETEVPLLVYEFINSGTLFDHLHGSLYDSSLTWEHRLRIATEVAGSLAYLHSSASIPIIHRDIKTANILLDKNLTAKAADFGASRLIPMDKEQLTTIVQGTLGYLDPEYYNTGLLNEKSDVYSFGVVLMELLSGQKALCFERPHCPKNLVSCFASATKNNRFHEIIDGQVMNEDNQREIQEAARIAAECTRLMGEERPRMKEVAAELEALRVKTTKYKWSDQYRETGEIEHLLGVQILSAQGETSSSIGYDSIRNVTTLDIEAGR

SEQ ID NO: 38223 - protein, 732 aa, Arabidopsis thaliana
  peptide (1)..(732): Ceres Seq. ID no. 13488342
MKVQEGLFVVAVFYLAYTQLVKGQPRKECQTRCGNVAVEYPFGTSPGCYYPGDESFNLTCNEQEKLFFGNMPVINMSLSGQLRVRLVRSRVCYDSQGKQTDYIARRTTLGNFTLSELNRFTVVGCNSYAFLRTSGVEKYSTGCISICDSATTKNGSCSGEGCCQIPVPRGYSFVRVKPHSFHNHPTVHLFNPCTYAFLVEDGMFDFHALEDLNNLRNVTTFPVVLDWSIGDKTCKQVEYRGVCGGNSTCFDSTGGTGYNCKCLEGFEGNPYLPNGCQDINECISSRHNCSEHSTCENTKGSFNCNCPSGYRKDSLNSCTRKVRPEYFRWTQIFLGTTIGFSVIMLGISCLQQKIKHRKNTELRQKFFEQNGGGMLIQRVSGAGPSNVDVKIFTEKGMKEATNGYHESRILGQGGQGTVYKGILPDNSIVAIKKARLGNRSQVEQFINEVLVLSQINHRNVVKVLGCCLETEVPLLVYEFINSGTLFDHLHGSLYDSSLTWEHRLRIATEVAGSLAYLHSSASIPIIHRDIKTANILLDKNLTAKAADFGASRLIPMDKEQLTTIVQGTLGYLDPEYYNTGLLNEKSDVYSFGVVLMELLSGQKALCFERPHCPKNLVSCFASATKNNRFHEIIDGQVMNEDNQREIQEAARIAAECTRLMGEERPRMKEVAAELEALRVKTTKYKWSDQYRETGEIEHLLGVQILSAQGETSSSIGYDSIRNVTTLDIEAGR

SEQ ID NO: 38224 - protein, 662 aa, Arabidopsis thaliana
  peptide (1)..(662): Ceres Seq. ID no. 13488343
MPVINMSLSGQLRVRLVRSRVCYDSQGKQTDYIARRTTLGNFTLSELNRFTVVGCNSYAFLRTSGVEKYSTGCISICDSATTKNGSCSGEGCCQIPVPRGYSFVRVKPHSFHNHPTVHLFNPCTYAFLVEDGMFDFHALEDLNNLRNVTTFPVVLDWSIGDKTCKQVEYRGVCGGNSTCFDSTGGTGYNCKCLEGFEGNPYLPNGCQDINECISSRHNCSEHSTCENTKGSFNCNCPSGYRKDSLNSCTRKVRPEYFRWTQIFLGTTIGFSVIMLGISCLQQKIKHRKNTELRQKFFEQNGGGMLIQRVSGAGPSNVDVKIFTEKGMKEATNGYHESRILGQGGQGTVYKGILPDNSIVAIKKARLGNRSQVEQFINEVLVLSQINHRNVVKVLGCCLETEVPLLVYEFINSGTLFDHLHGSLYDSSLTWEHRLRIATEVAGSLAYLHSSASIPIIHRDIKTANILLDKNLTAKAADFGASRLIPMDKEQLTTIVQGTLGYLDPEYYNTGLLNEKSDVYSFGVVLMELLSGQKALCFERPHCPKNLVSCFASATKNNRFHEIIDGQVMNEDNQREIQEAARIAAECTRLMGEERPRMKEVAAELEALRVKTTKYKWSDQYRETGEIEHLLGVQILSAQGETSSSIGYDSIRNVTTLDIEAGR

SEQ ID NO: 38225 - DNA, 1335 bp, Arabidopsis thaliana
  misc_feature (1)..(1335): Ceres Seq. ID no. 13615780
  misc_feature (1)..(1335): Ortholog of  Ceres SEQ ID NO 15227099 as cited in SEQ ID NO 53558
  misc_feature (1)..(1335): Ortholog of  Ceres SEQ ID NO 14314563 as cited in SEQ ID NO 59349
  misc_feature (1)..(1335): Ortholog of  Ceres SEQ ID NO 12616360 as cited in SEQ ID NO 63543
actctttactctttcttccgtttgctcgaaccatctagtctaagagaaagaaaaaatactaaagagaaagaagaagaggacttgaatacggaagcttgagagaatgaaagcgatcgtgatctcggagccaggtaagccggaggttctgcaactccgtgatgtggcagacccagaagttaaagacgatgaggttctcatcagagttctcgctactgctttgaatcgtgcagatactctccaaagacttggcctttataatccaccacctggctcaagcccttaccttggtctcgaatgttctgggaccattgaatccgtcggtaaaggcgtctctcgatggaaagtcggagaccaggtgtgtgctcttctttctggaggaggttatgcagagaaagtttctgttcctgctggacaaattttcccaattcccgctggtatctctctaaaggatgcagcggctttccctgaagtggcatgcactgtttggtctactgtcttcatgatgggccgtctctctgttggtgaatcattcttgattcatggaggttcaagtgggattgggacatttgctattcagatagctaaacatctgggagtgagagtatttgtcacagctgggagtgatgaaaagctagctgcgtgcaaagaactcggggctgatgtttgtataaattacaaaaccgaggattttgttgcaaaggtaaaagcggaaaccgatgggaaaggagtggatgttatcttggactgcattggggcaccgtatttgcagaaaaatctcgacagcttaaactttgatggaaggttatgtattatcggtttaatgggaggagccaatgcagaaataaaactaagtagtctgcttccaaagcgtctcactgtcttaggagctgcattaagaccaagaagccctgaaaacaaagcagttgttgtaagggaagtcgagaagaatgtctggccagcgatagaagcagggaaggtaaaaccagtgatttacaagtatttaccattgtcacaagcagcagaaggtcatagccttatggagagtagcaaccatattggtaagattctccttgagacttgattctctgcaaagggagaaatgttcagagacaagagtcatggtcaataatcaataaaatctggtcgattctgttcatagatatctctttacaagagttctgtttgttggcttttatgtatctctgatttggtcaaaaagacactgtaactatggaacatatatagtatcaaataagctgttgtataccaaacattgatttcgaagtagaatatgattttgtaagaagtttttatttattttgggcttaaaaagtg

SEQ ID NO: 38226 - protein, 325 aa, Arabidopsis thaliana; identical to SEQ ID NO: 26964
  peptide (1)..(325): Ceres Seq. ID no. 13615781

SEQ ID NO: 38227 - protein, 193 aa, Arabidopsis thaliana; identical to SEQ ID NO: 26965
  peptide (1)..(193): Ceres Seq. ID no. 13615782

SEQ ID NO: 38228 - protein, 192 aa, Arabidopsis thaliana; identical to SEQ ID NO: 26966
  peptide (1)..(192): Ceres Seq. ID no. 13615783

SEQ ID NO: 38229 - DNA, 715 bp, Arabidopsis thaliana
  misc_feature (1)..(715): Ceres Seq. ID no. 13495872
  misc_feature (1)..(715): Ortholog of  Ceres SEQ ID NO 15176321 as cited in SEQ ID NO 52814
  misc_feature (1)..(715): Ortholog of  Ceres SEQ ID NO 12563124 as cited in SEQ ID NO 57104
  misc_feature (1)..(715): Ortholog of  Ceres SEQ ID NO 13598373 as cited in SEQ ID NO 62185
  misc_feature (1)..(715): Ortholog of  Ceres SEQ ID NO 12584664 as cited in SEQ ID NO 62232
  misc_feature (1)..(715): Ortholog of  Ceres SEQ ID NO 15226273 as cited in SEQ ID NO 64934
  misc_feature (1)..(715): Ortholog of  Ceres SEQ ID NO 12617639 as cited in SEQ ID NO 65219
aacacatctcactgctcactactctcactgtaatcccttagatcttcttttcaaatttcaatggcgtccggtgatgttgagtatcggtgcttcgttggaggtctagcatgggccactgatgacagagctcttgagactgccttcgctcaatacggcgacgttattgattccaagatcattaacgatcgtgagactggaagatcaaggggattcggattcgtcaccttcaaggatgagaaagccatgaaggatgcgattgagggaatgaacggacaagatctcgatggccgtagcatcactgttaacgaggctcagtcacgaggaagcggtggcggcggaggccaccgtggaggtggtggcggtggtggaggttactccggtggaggtggtagctacggaggtggcggcggtagacgcgagggtggaggaggatacagcggcggcggcggttactcctcaagaggtggtggtggcggaagctacggtggtggaagacgtgagggaggaggaggatacggtggtggtgaaggaggaggttacggaggaagcggtggtggtggaggatggtaattcctttaattaggtttgggattaccaatgaatgttctctctctcgcttgttatgcttctactttgttttgtgtgttctctattttgttctggttctgctttagatttgatgtaacagttcgtgattaggtattttggtatctgg

SEQ ID NO: 38230 - protein, 169 aa, Arabidopsis thaliana
  peptide (1)..(169): Ceres Seq. ID no. 13495873
MASGDVEYRCFVGGLAWATDDRALETAFAQYGDVIDSKIINDRETGRSRGFGFVTFKDEKAMKDAIEGMNGQDLDGRSITVNEAQSRGSGGGGGHRGGGGGGGGYSGGGGSYGGGGGRREGGGGYSGGGGYSSRGGGGGSYGGGRREGGGGYGGGEGGGYGGSGGGGGW

SEQ ID NO: 38231 - protein, 108 aa, Arabidopsis thaliana
  peptide (1)..(108): Ceres Seq. ID no. 13495874
MKDAIEGMNGQDLDGRSITVNEAQSRGSGGGGGHRGGGGGGGGYSGGGGSYGGGGGRREGGGGYSGGGGYSSRGGGGGSYGGGRREGGGGYGGGEGGGYGGSGGGGGW

SEQ ID NO: 38232 - protein, 101 aa, Arabidopsis thaliana
  peptide (1)..(101): Ceres Seq. ID no. 13495875
MNGQDLDGRSITVNEAQSRGSGGGGGHRGGGGGGGGYSGGGGSYGGGGGRREGGGGYSGGGGYSSRGGGGGSYGGGRREGGGGYGGGEGGGYGGSGGGGGW

SEQ ID NO: 38233 - DNA, 2057 bp, Arabidopsis thaliana
  misc_feature (1)..(2057): Ceres Seq. ID no. 12323113
  misc_feature (1)..(2057): Ortholog of  Ceres SEQ ID NO 15176309 as cited in SEQ ID NO 52886
  misc_feature (1)..(2057): Ortholog of  Ceres SEQ ID NO 15171175 as cited in SEQ ID NO 57476
acgttccgacaagacccaaatagacacagcacacaagacccaaatcgaagataggattcgcgtttatgttggtgtccgtaacctaaaaagacattctagagtgattgagatcgagagaaggaaagagagagtgagagagaaatctgggtttcttgaagctgttgtgaggatcttgttatgggtggttttattacaaaggcttgagctttttatcttcaaaccccagttttcaaacagagagaagtttttgggttaatctagtgagaatttaaagaaaatatatatagaagatggttgcaagaaccccacagaagcagaggaaagtggcgatggtggtgcctcctctcaactcagatcttctcaaggaaacgatcaacaaggttgataaatgtatggaaagactgcaagagctacagtacacaattgcaggaggaaccaaagttgtctctggtgtgaaccttagccctcgaagcactagaatttacttgaagactagtcttagatgcaagcaagaaactttaaggatcaagaatgctactaataagaaatctccagtagggaagtttcctgcttcctcaccaggagattggaggaaaatgtcactcccagcaatgctactaggagagactgtaaatgaaatcttacaagcctcacaggtcacaagagacattgtggacgccatagcaccaaagaagagtagaaagtccaggagattaacaatgtcacaagaagacgatggccctaaaacacccgagacacaacaaaaatcccgggaacagaatcctgaaactgtcagtagcaatatcaaagcaagaaggaagaaagagaagcagaacagacgatcagaatcagattctcctccatctctacaaagggcacgctcaagaattgcgttcagaaccatctctccacaagtaaagggaaataatggtgagaatagttttcggcatttggccaacagggtttcaccaaagcacaaaccttgggttaaaaaggcggttctttttccgaaccctctatttatttccggtaccgctacacaacaagcaaagttcagtagaacaatgtctccggtcatagccagaaatgagatatccagcatcaagaacaataaagaaacgccttacaagttcttaatcaaatctcctcccacatcagcatctaagtttcaggtcaagatcaggagcccacctaaggtcttggtttctcctacaagaaatggcagtaactcggttcggaagtcacctagaggctccaggtctccgacaagaactgttaacttaggaaagaagtcagcgtcgatttctcctattagaaatacgggaaagaggtctccaaagctatcaactgctgctaagctcagaagatcatttactcctacgagaaatggcagtaacttggctcgtaagtcgtctatttctccgaaaagagtcacacttcaagcatttctttctccaacaagaaatggtaacttttgtaagaagtcacccaaagcttcgatttctccaactagggtgtgcaacaagtcgcagaagctgtcaacggctgcaaagttcaggaggtcattttcgccatcgagactagctatgagggctgatgagatcactatgttccatggctcaaaagcaccatcgttaagcatttatcgttacacagaaagaatccataggtatgctcagtgtagccctgtgtgtttcgttgcagcttttgcctacatccttagatatctacagagaccagaggctaccagtacggctcgtcgtctcacatcactcaacgttcatcgccttctcatcaccagtctcttggtcgcagcaaaattcttggaacgccagtgttataacaacgcatattatgcaaaaatcggaggagtgagcactgaagagatgaataggctggagagaacgttcttggttgatgttgatttcaggctatatattacaacggagactttcgagaaacactgtctcatgttgcagaaagaaacggtgccttgtgattcaagaaaacttagaacagttcttggagagatagcttgtagctgccaagcgatttga

SEQ ID NO: 38234 - protein, 588 aa, Arabidopsis thaliana
  peptide (1)..(588): Ceres Seq. ID no. 12323114
MVARTPQKQRKVAMVVPPLNSDLLKETINKVDKCMERLQELQYTIAGGTKVVSGVNLSPRSTRIYLKTSLRCKQETLRIKNATNKKSPVGKFPASSPGDWRKMSLPAMLLGETVNEILQASQVTRDIVDAIAPKKSRKSRRLTMSQEDDGPKTPETQQKSREQNPETVSSNIKARRKKEKQNRRSESDSPPSLQRARSRIAFRTISPQVKGNNGENSFRHLANRVSPKHKPWVKKAVLFPNPLFISGTATQQAKFSRTMSPVIARNEISSIKNNKETPYKFLIKSPPTSASKFQVKIRSPPKVLVSPTRNGSNSVRKSPRGSRSPTRTVNLGKKSASISPIRNTGKRSPKLSTAAKLRRSFTPTRNGSNLARKSSISPKRVTLQAFLSPTRNGNFCKKSPKASISPTRVCNKSQKLSTAAKFRRSFSPSRLAMRADEITMFHGSKAPSLSIYRYTERIHRYAQCSPVCFVAAFAYILRYLQRPEATSTARRLTSLNVHRLLITSLLVAAKFLERQCYNNAYYAKIGGVSTEEMNRLERTFLVDVDFRLYITTETFEKHCLMLQKETVPCDSRKLRTVLGEIACSCQAI

SEQ ID NO: 38235 - protein, 575 aa, Arabidopsis thaliana
  peptide (1)..(575): Ceres Seq. ID no. 12323115
MVVPPLNSDLLKETINKVDKCMERLQELQYTIAGGTKVVSGVNLSPRSTRIYLKTSLRCKQETLRIKNATNKKSPVGKFPASSPGDWRKMSLPAMLLGETVNEILQASQVTRDIVDAIAPKKSRKSRRLTMSQEDDGPKTPETQQKSREQNPETVSSNIKARRKKEKQNRRSESDSPPSLQRARSRIAFRTISPQVKGNNGENSFRHLANRVSPKHKPWVKKAVLFPNPLFISGTATQQAKFSRTMSPVIARNEISSIKNNKETPYKFLIKSPPTSASKFQVKIRSPPKVLVSPTRNGSNSVRKSPRGSRSPTRTVNLGKKSASISPIRNTGKRSPKLSTAAKLRRSFTPTRNGSNLARKSSISPKRVTLQAFLSPTRNGNFCKKSPKASISPTRVCNKSQKLSTAAKFRRSFSPSRLAMRADEITMFHGSKAPSLSIYRYTERIHRYAQCSPVCFVAAFAYILRYLQRPEATSTARRLTSLNVHRLLITSLLVAAKFLERQCYNNAYYAKIGGVSTEEMNRLERTFLVDVDFRLYITTETFEKHCLMLQKETVPCDSRKLRTVLGEIACSCQAI

SEQ ID NO: 38236 - protein, 554 aa, Arabidopsis thaliana
  peptide (1)..(554): Ceres Seq. ID no. 12323116
MERLQELQYTIAGGTKVVSGVNLSPRSTRIYLKTSLRCKQETLRIKNATNKKSPVGKFPASSPGDWRKMSLPAMLLGETVNEILQASQVTRDIVDAIAPKKSRKSRRLTMSQEDDGPKTPETQQKSREQNPETVSSNIKARRKKEKQNRRSESDSPPSLQRARSRIAFRTISPQVKGNNGENSFRHLANRVSPKHKPWVKKAVLFPNPLFISGTATQQAKFSRTMSPVIARNEISSIKNNKETPYKFLIKSPPTSASKFQVKIRSPPKVLVSPTRNGSNSVRKSPRGSRSPTRTVNLGKKSASISPIRNTGKRSPKLSTAAKLRRSFTPTRNGSNLARKSSISPKRVTLQAFLSPTRNGNFCKKSPKASISPTRVCNKSQKLSTAAKFRRSFSPSRLAMRADEITMFHGSKAPSLSIYRYTERIHRYAQCSPVCFVAAFAYILRYLQRPEATSTARRLTSLNVHRLLITSLLVAAKFLERQCYNNAYYAKIGGVSTEEMNRLERTFLVDVDFRLYITTETFEKHCLMLQKETVPCDSRKLRTVLGEIACSCQAI

SEQ ID NO: 38237 - DNA, 1290 bp, Arabidopsis thaliana; identical to SEQ ID NO: 30749
  misc_feature (1)..(1290): Ceres Seq. ID no. 13576771
  misc_feature (1)..(1290): Ortholog of  Ceres SEQ ID NO 13597533 as cited in SEQ ID NO 64942

SEQ ID NO: 38238 - protein, 265 aa, Arabidopsis thaliana; identical to SEQ ID NO: 30750
  peptide (1)..(265): Ceres Seq. ID no. 13576772

SEQ ID NO: 38239 - protein, 259 aa, Arabidopsis thaliana; identical to SEQ ID NO: 30751
  peptide (1)..(259): Ceres Seq. ID no. 13576773

SEQ ID NO: 38240 - protein, 214 aa, Arabidopsis thaliana; identical to SEQ ID NO: 30752
  peptide (1)..(214): Ceres Seq. ID no. 13576774

SEQ ID NO: 38241 - DNA, 1301 bp, Arabidopsis thaliana
  misc_feature (1)..(1301): Ceres Seq. ID no. 13491623
  misc_feature (1)..(1301): Ortholog of  Ceres SEQ ID NO 14310880 as cited in SEQ ID NO 55342
  misc_feature (1)..(1301): Ortholog of  Ceres SEQ ID NO 14313451 as cited in SEQ ID NO 62474
aatatccaaaataacaaaacatctcttcacttctcatcacaccatgcatcatcatcatcatccatgcaatcgcaaacccttcacaaccatcttctccttcttccttctctatctcaatctccataaccaacaaattatcgaagctcgaaatccatctcaatttacgaccaacccatcccctgacgtctctataccggaaatcaaacgtcacctccaacagtacggttacctcccacaaaacaaagaatccgacgacgtttcgttcgaacaagctctcgttcgttaccagaaaaatctcggtctaccaataaccggtaaaccggattccgacacgttgtcacagattctattaccaagatgtgggttccctgatgacgtggaacccaaaacggcaccgtttcacacaggaaaaaaatacgtgtacttccccggacggcccaggtggacaagagacgtcccactgaaactcacgtacgccttctcgcaggagaacctaactccttacttagcaccaactgacatacggcgcgtgttccgacgcgctttcggcaagtgggcttcggtgatcccagtatccttcatcgaaacagaggattacgtcatcgccgacatcaagatcggattcttcaacggagatcacggcgacggagaaccgttcgacggcgttttaggtgttttagcacacactttctctccggaaaacggtaggcttcatctagacaaagcagagacgtgggccgtagatttcgatgaggaaaaatctagtgtggccgtcgatttggaatctgtggcggtgcacgagatcggtcacgtgcttggattaggacatagctcggtgaaagacgcggctatgtatccaactttaaagccaagaagtaagaaagtgaatttgaatatggacgacgtcgttggagtacagtctttgtacggaacaaaccctaatttcacgttaaatagtttacttgcgtcggaaacttcgacaaatctagccgatggttcgaggatacggtctcaaggaatgatctattcgactttgagtactgttatcgctctctgttttcttaattggtagttcgtagacttagataattttctttatacaagaaatccgaaaacgtatagaatcatacagacgcatgaatttgttgttcaaagtagtagtctaatcctatgtttctgtttagaataataccatgttcttttttagtttatattagattgggcttcaagttatacggcccaatagaatgctaatgtattaaacgaagaacccagttcagagcaacacaattcgttggcct

SEQ ID NO: 38242 - protein, 356 aa, Arabidopsis thaliana
  peptide (1)..(356): Ceres Seq. ID no. 13491624
ISKITKHLFTSHHTMHHHHHPCNRKPFTTIFSFFLLYLNLHNQQIIEARNPSQFTTNPSPDVSIPEIKRHLQQYGYLPQNKESDDVSFEQALVRYQKNLGLPITGKPDSDTLSQILLPRCGFPDDVEPKTAPFHTGKKYVYFPGRPRWTRDVPLKLTYAFSQENLTPYLAPTDIRRVFRRAFGKWASVIPVSFIETEDYVIADIKIGFFNGDHGDGEPFDGVLGVLAHTFSPENGRLHLDKAETWAVDFDEEKSSVAVDLESVAVHEIGHVLGLGHSSVKDAAMYPTLKPRSKKVNLNMDDVVGVQSLYGTNPNFTLNSLLASETSTNLADGSRIRSQGMIYSTLSTVIALCFLNW

SEQ ID NO: 38243 - protein, 342 aa, Arabidopsis thaliana
  peptide (1)..(342): Ceres Seq. ID no. 13491625
MHHHHHPCNRKPFTTIFSFFLLYLNLHNQQIIEARNPSQFTTNPSPDVSIPEIKRHLQQYGYLPQNKESDDVSFEQALVRYQKNLGLPITGKPDSDTLSQILLPRCGFPDDVEPKTAPFHTGKKYVYFPGRPRWTRDVPLKLTYAFSQENLTPYLAPTDIRRVFRRAFGKWASVIPVSFIETEDYVIADIKIGFFNGDHGDGEPFDGVLGVLAHTFSPENGRLHLDKAETWAVDFDEEKSSVAVDLESVAVHEIGHVLGLGHSSVKDAAMYPTLKPRSKKVNLNMDDVVGVQSLYGTNPNFTLNSLLASETSTNLADGSRIRSQGMIYSTLSTVIALCFLNW

SEQ ID NO: 38244 - DNA, 1017 bp, Arabidopsis thaliana
  misc_feature (1)..(1017): Ceres Seq. ID no. 12371487
  misc_feature (1)..(1017): Ortholog of  Ceres SEQ ID NO 13655724 as cited in SEQ ID NO 68973
aaactcccagatcttgtcgatttatttatttcctctccaaagcaaaagcttcttcgatcgtccttgtctcgttttcaattctaaatgttgtgtgcagaaaaatcatgactttggcttctccacgagtttcaaattcaaagacgactgtgttgttgtttcctcgaaaagtttcttcaattgcatttgctattggtggattaacttctttcgtcatcttcgcttctctgcttcttttcacttatcccattggttcctctgttactgactatttctacagaacagagaccactcaaaacgtccagtttcaccatagtatccatgatcctgatcgtaacccatctcctgtttctagctcagagtcaccaccagtattgacacaagatagtgatgataaagtgcttcccaaggattcgaatgatgttagattaggtgaagaaacaaactcagggaagtcttcaaatgtttccattgatgaagaagctacacaagatcatgtagaaacagaatgtgatttatatcatggtaactggttttatgatccgatgggaccgttgtatacaaacaactcttgtcctcttctgacacagatgcaaaactgtcagggtaatggaagacctgacaaggggtatgaaaactggagatggaaaccgtctcagtgtgatcttccacggtttgatgctaagaaatttcttgagctaatgagaggcaagacactagcttttataggcgattcagtagctcgtaatcagatggagtccatgatgtgtcttctttggcaggtagaaactccggttaaccgtgggaacaggaagatgcagagatggtatttcaggtcatcatcggtgatgatagctcggatgtggtcatcttggctggtccatcagttcaatgaaccgtttggttttgctacagatggtgtaactaaactcaagcttgaccaacccgatgagcgcataattgaagctcttccgaatttcgatgtggttgtactttcatcaggtcactggtttgcaaaac

SEQ ID NO: 38245 - protein, 338 aa, Arabidopsis thaliana
  peptide (1)..(338): Ceres Seq. ID no. 12371488
TPRSCRFIYFLSKAKASSIVLVSFSILNVVCRKIMTLASPRVSNSKTTVLLFPRKVSSIAFAIGGLTSFVIFASLLLFTYPIGSSVTDYFYRTETTQNVQFHHSIHDPDRNPSPVSSSESPPVLTQDSDDKVLPKDSNDVRLGEETNSGKSSNVSIDEEATQDHVETECDLYHGNWFYDPMGPLYTNNSCPLLTQMQNCQGNGRPDKGYENWRWKPSQCDLPRFDAKKFLELMRGKTLAFIGDSVARNQMESMMCLLWQVETPVNRGNRKMQRWYFRSSSVMIARMWSSWLVHQFNEPFGFATDGVTKLKLDQPDERIIEALPNFDVVVLSSGHWFAK

SEQ ID NO: 38246 - protein, 304 aa, Arabidopsis thaliana
  peptide (1)..(304): Ceres Seq. ID no. 12371489
MTLASPRVSNSKTTVLLFPRKVSSIAFAIGGLTSFVIFASLLLFTYPIGSSVTDYFYRTETTQNVQFHHSIHDPDRNPSPVSSSESPPVLTQDSDDKVLPKDSNDVRLGEETNSGKSSNVSIDEEATQDHVETECDLYHGNWFYDPMGPLYTNNSCPLLTQMQNCQGNGRPDKGYENWRWKPSQCDLPRFDAKKFLELMRGKTLAFIGDSVARNQMESMMCLLWQVETPVNRGNRKMQRWYFRSSSVMIARMWSSWLVHQFNEPFGFATDGVTKLKLDQPDERIIEALPNFDVVVLSSGHWFAK

SEQ ID NO: 38247 - DNA, 1073 bp, Arabidopsis thaliana
  misc_feature (1)..(1073): Ceres Seq. ID no. 12558213
  misc_feature (1)..(1073): Ortholog of  Ceres SEQ ID NO 14311509 as cited in SEQ ID NO 51398
  misc_feature (1)..(1073): Ortholog of  Ceres SEQ ID NO 14307702 as cited in SEQ ID NO 54703
  misc_feature (1)..(1073): Ortholog of  Ceres SEQ ID NO 15176361 as cited in SEQ ID NO 55438
atgctttagctatctttaaccctttttcccttctctctttctatttctccctcatacctttgtttattctgatgaagttgtgagcactgaaagaaaagaagagaggagaagagagatatgcacaagaagaattaaacttagggacacaaaacaacatgacttggtgcaatgaccgtagcgatgttcagaccgttgaaagaatcattccctccccgggggcggctgagtcccccgtagcctcacttccggtctcttgtcacaaaacttgcccttcttgtggccataacttcaagtttcacgaacaggctgggatccatgacttgccgggacttcctgctggagtaaaatttgatccgacggatcaagaggtcttggagcatcttgaaggcaaggtaagagatgacgcaaaaaagcttcatcctctcattgatgagtttatccgtaccatcgatggtgaaaacggcatttgttatacccatcctgaaaaattgccaggagtgaacaaggacgggacggtgcgtcatttcttccaccgaccgtcgaaggcatacacgacgggaacaagaaagcgacgtaaagtccacactgattctgacgtcggtggagagacacggtggcacaagacaggaaaaacacggccagttcttgctggaggaagagtgagaggctacaagaaaatcctagtgctctacacaaactacggcaaacaaaaaaaacccgagaagactaattgggtaatgcatcaatatcatcttggcactagcgaggaagagaaagaaggtgagctcgtcgtctccaaagtcttttaccagactcaaccacgtcaatgcggtggctccgttgctgctgcagccaccgctaaggaccgaccttacctccacggcctcggtggaggtggtggccgccaccttcattaccatcttcatcataacaacggtaacggtaagagcaacggcagtgggggaaccgccggagccggtgagtattatcacaatattccggctattatctcgttcaatcagaccgggatacagaaccacttggttcatgactctcaaccttttatcccttaa

SEQ ID NO: 38248 - protein, 305 aa, Arabidopsis thaliana
  peptide (1)..(305): Ceres Seq. ID no. 12558214
MTWCNDRSDVQTVERIIPSPGAAESPVASLPVSCHKTCPSCGHNFKFHEQAGIHDLPGLPAGVKFDPTDQEVLEHLEGKVRDDAKKLHPLIDEFIRTIDGENGICYTHPEKLPGVNKDGTVRHFFHRPSKAYTTGTRKRRKVHTDSDVGGETRWHKTGKTRPVLAGGRVRGYKKILVLYTNYGKQKKPEKTNWVMHQYHLGTSEEEKEGELVVSKVFYQTQPRQCGGSVAAAATAKDRPYLHGLGGGGGRHLHYHLHHNNGNGKSNGSGGTAGAGEYYHNIPAIISFNQTGIQNHLVHDSQPFIP

SEQ ID NO: 38249 - DNA, 1213 bp, Arabidopsis thaliana
  misc_feature (1)..(1213): Ceres Seq. ID no. 12327875
  misc_feature (1)..(1213): Ortholog of  Ceres SEQ ID NO 14311659 as cited in SEQ ID NO 51212
  misc_feature (1)..(1213): Ortholog of  Ceres SEQ ID NO 12635180 as cited in SEQ ID NO 0
attttcaaaacttatccgaccttatcttagcgaaacaaaatctctcctctgattattactactcaacttcgcattatcactcaaacaaacatattgacatctgagtcttgtcatcatggcaacttctctccaagccgccgcaacttttcttcaaccggcgaagattgccgcttctccttctcgtaatgtccatctccgatcaaaccaaaccgtgggcaagtcctttgggttagactcttcacaagctaggctcacgtgctctctccactctgacctcaaagacttcgctggaaaatgctccgacgccgccaagatcgccggttttgctctagccacctctgctctcgttgtctcgggggccggtgcggagggagcaccaaagaggctaacgtacgacgagatacagagcaagacttacatggaggtaaagggtaccggtacggcaaaccagtgtccaactatcgatggtggctctgagacattctcgttcaaagctggtaagtacacaggcaagaagttctgcttcgagcccacttccttcaccgtcaaggcagatagcgtcagcaagaatgcaccgccggatttccaaaacaccaagctcatgacccgtctcacttacacactcgatgagatcgaaggacccttcgaggttggttcagacggaagcgtgaagttcaaggaagaagatggtatcgattacgcagcagtcacagtccagcttccgggaggagaacgcgtgccgttcctcttcacggttaagcagctcgaggcttcagggaaacccgaaagcttcagtggcaagttcttagttccatcgtaccgtggctcgtcctttttggacccaaagggtcgtggtggatccactgggtacgataatgcagtggctttgcctgccggaggcagaggagacgaggaagagctatccaaggaaaacgtcaagaacacggcggcttccgtcggagagatcactttgaagatcacaaagagcaaaccggagacaggtgaagtgatcggagtgttcgagagtcttcagccatcggatactgacttgggtgctaaggtaccaaaagatgtgaagatccaaggggtttggtacggtcagattgagtgattcatataatttgttacttttgtaaaattgtattgaaacaacttctttctatcaatatatatatatatattaacgctcgataaataaatatttatatcagtg

SEQ ID NO: 38250 - protein, 331 aa, Arabidopsis thaliana
  peptide (1)..(331): Ceres Seq. ID no. 12327876
MATSLQAAATFLQPAKIAASPSRNVHLRSNQTVGKSFGLDSSQARLTCSLHSDLKDFAGKCSDAAKIAGFALATSALVVSGAGAEGAPKRLTYDEIQSKTYMEVKGTGTANQCPTIDGGSETFSFKAGKYTGKKFCFEPTSFTVKADSVSKNAPPDFQNTKLMTRLTYTLDEIEGPFEVGSDGSVKFKEEDGIDYAAVTVQLPGGERVPFLFTVKQLEASGKPESFSGKFLVPSYRGSSFLDPKGRGGSTGYDNAVALPAGGRGDEEELSKENVKNTAASVGEITLKITKSKPETGEVIGVFESLQPSDTDLGAKVPKDVKIQGVWYGQIE

SEQ ID NO: 38251 - protein, 230 aa, Arabidopsis thaliana
  peptide (1)..(230): Ceres Seq. ID no. 12327877
MEVKGTGTANQCPTIDGGSETFSFKAGKYTGKKFCFEPTSFTVKADSVSKNAPPDFQNTKLMTRLTYTLDEIEGPFEVGSDGSVKFKEEDGIDYAAVTVQLPGGERVPFLFTVKQLEASGKPESFSGKFLVPSYRGSSFLDPKGRGGSTGYDNAVALPAGGRGDEEELSKENVKNTAASVGEITLKITKSKPETGEVIGVFESLQPSDTDLGAKVPKDVKIQGVWYGQIE

SEQ ID NO: 38252 - protein, 169 aa, Arabidopsis thaliana
  peptide (1)..(169): Ceres Seq. ID no. 12327878
MTRLTYTLDEIEGPFEVGSDGSVKFKEEDGIDYAAVTVQLPGGERVPFLFTVKQLEASGKPESFSGKFLVPSYRGSSFLDPKGRGGSTGYDNAVALPAGGRGDEEELSKENVKNTAASVGEITLKITKSKPETGEVIGVFESLQPSDTDLGAKVPKDVKIQGVWYGQIE

SEQ ID NO: 38253 - DNA, 1141 bp, Arabidopsis thaliana
  misc_feature (1)..(1141): Ceres Seq. ID no. 12329869
  misc_feature (1)..(1141): Ortholog of  Ceres SEQ ID NO 14314343 as cited in SEQ ID NO 57301
aacaccacaattaacagatttattgtttttggaaataatcaaaacttaaaaactatcagaatgggaacgttcttaggacactttgtgcctggtctctcacttgctcttcttggtctttggcatctcttcaacaccataagatcttactgtcttaaaggccctgaagctttctctgcaaaattctggttccctttccctaaactcaaacatcttgagcttatcttgattctcttcttctccttcctctccatcactctcctcaccctagatttccctaatttcaacttctcctctctcaaaccagacaacctagaacatgcttccatgttcctccacctcattatctttgcgtgtttcgctctcttctgcgagctaaccctttgctcagatctcttctccggtctaatcggagttctttctgcctctgtcttcgctcaagaactcttccttcttcattttcattccactgatcattcaggtcttgaaggtcactaccatttccttctccaactcattgctttcgtctccttctcctcggcgctagcttctgcttcgttccctaaatccttctctgcggctctattcctcccgatatcggttatgtttcaaggatgctggttcttgaacatggggttcatgctttgggtcccagagtatgttcctagaggttgcgtgagtaacatgtcaacatctacagacaataatagaaggagtgtttatcatagtggtgcggtggcttgtgagtcccctggtgctgagattagggcaaaagcattggcgaatctgcagtttagttggatgttgtctgctatacttatcattacatgtgccttgtgccacaagtattccggtaaagttgtgttgcctaagattaggtcatcgttggagtacgagcgtctttgccggcaaggaagtgatcgttctgcaaccgtaacggtggaagcaccggccagttccgatcaacaatagattttccttactttaatttatcatctgaatatgatgtaatatgtacatatagtacactaataagtagccctaataatagttacataatttataagagggggcagagtgtaacgcactaatgatagtggaccctttcgcatgctttgtgaactaataaaaatttgcatatagc

SEQ ID NO: 38254 - protein, 322 aa, Arabidopsis thaliana
  peptide (1)..(322): Ceres Seq. ID no. 12329870
NTTINRFIVFGNNQNLKTIRMGTFLGHFVPGLSLALLGLWHLFNTIRSYCLKGPEAFSAKFWFPFPKLKHLELILILFFSFLSITLLTLDFPNFNFSSLKPDNLEHASMFLHLIIFACFALFCELTLCSDLFSGLIGVLSASVFAQELFLLHFHSTDHSGLEGHYHFLLQLIAFVSFSSALASASFPKSFSAALFLPISVMFQGCWFLNMGFMLWVPEYVPRGCVSNMSTSTDNNRRSVYHSGAVACESPGAEIRAKALANLQFSWMLSAILIITCALCHKYSGKVVLPKIRSSLEYERLCRQGSDRSATVTVEAPASSDQQ

SEQ ID NO: 38255 - protein, 302 aa, Arabidopsis thaliana
  peptide (1)..(302): Ceres Seq. ID no. 12329871
MGTFLGHFVPGLSLALLGLWHLFNTIRSYCLKGPEAFSAKFWFPFPKLKHLELILILFFSFLSITLLTLDFPNFNFSSLKPDNLEHASMFLHLIIFACFALFCELTLCSDLFSGLIGVLSASVFAQELFLLHFHSTDHSGLEGHYHFLLQLIAFVSFSSALASASFPKSFSAALFLPISVMFQGCWFLNMGFMLWVPEYVPRGCVSNMSTSTDNNRRSVYHSGAVACESPGAEIRAKALANLQFSWMLSAILIITCALCHKYSGKVVLPKIRSSLEYERLCRQGSDRSATVTVEAPASSDQQ

SEQ ID NO: 38256 - protein, 214 aa, Arabidopsis thaliana
  peptide (1)..(214): Ceres Seq. ID no. 12329872
MFLHLIIFACFALFCELTLCSDLFSGLIGVLSASVFAQELFLLHFHSTDHSGLEGHYHFLLQLIAFVSFSSALASASFPKSFSAALFLPISVMFQGCWFLNMGFMLWVPEYVPRGCVSNMSTSTDNNRRSVYHSGAVACESPGAEIRAKALANLQFSWMLSAILIITCALCHKYSGKVVLPKIRSSLEYERLCRQGSDRSATVTVEAPASSDQQ

SEQ ID NO: 38257 - DNA, 1290 bp, Arabidopsis thaliana
  misc_feature (1)..(1290): Ceres Seq. ID no. 12343441
  misc_feature (1)..(1290): Ortholog of  Ceres SEQ ID NO 14314300 as cited in SEQ ID NO 57386
  misc_feature (1)..(1290): Ortholog of  Ceres SEQ ID NO 14311993 as cited in SEQ ID NO 60371
  misc_feature (1)..(1290): Ortholog of  Ceres SEQ ID NO 13596509 as cited in SEQ ID NO 62004
  misc_feature (1)..(1290): Ortholog of  Ceres SEQ ID NO 13500385 as cited in SEQ ID NO 67583
agaaaaaaggatatcgacaatttcgcttttgctttcaaaatctcattctatcactttgtgccttttttagccatcgcgaaaaacctctgaatcgcatcccttgattttctgggtttgtgactttgtgtagtggaaattaggcttgttgtttgatttcgctacgagaaaatggacaagtacgagcttgttaaagacatcggtgctgggaattttggagtggcgaggctcatgagagtcaaaaactccaaggaacttgttgctatgaagtacatcgagcgtggccctaagattgatgagaacgtggcgagagagattattaaccacagatcacttcgtcatcccaatataatccggtttaaggaggtggttttgacaccaacgcacatcgccattgctatggaatatgccgctggcggtgagctatttgagcgtatatgtagtgctggaagattcagtgaggatgaggcaagatactttttccagcagcttatctcaggagtcagctattgccatgctatgcaaatatgccacagagatctgaagcttgaaaataccctcttggatggaagtcctgctccacgcctgaaaatctgtgattttggttattccaagtcctcattgttgcactctatgcccaaatcaactgttggaactccagcatatattgcacctgaggttctttctcgcggagagtatgatggcaagatggctgatgtatggtcttgtggtgtgactctttatgtcatgctggtgggagcatacccatttgaagaccaagaggatcccaaaaacttcaaaaaaacaatacaaagaataatggctgtcaagtacaagatcccggactatgtccatatctcacaagattgcaaacatctcctctcccgtatatttgtcaccaactcgaataagaggattactatagctgacatcaagaaacatccatggttcctaaagaacctgccaagggaacttacagaaatagctcaagctgcatacttcaggaaagagaacccgacattctcactccaaagcgtcgaagagataatgaagattgtggaagaggcaaaaactccagctcgtgtttctcggtcgattggagcatttgggtggggaggaggagaagatgccgagggcaaggaggaagatgcagaggaagaagttgaggaagtagaagaagaagaagacgaagaagatgagtatgataagacggtgaagcaagtgcatgctagcatgggagaagtccgagtcagttaaaaaaaaagattggttttcttttcacgaaagtattct

SEQ ID NO: 38258 - protein, 361 aa, Arabidopsis thaliana
  peptide (1)..(361): Ceres Seq. ID no. 12343442
MDKYELVKDIGAGNFGVARLMRVKNSKELVAMKYIERGPKIDENVAREIINHRSLRHPNIIRFKEVVLTPTHIAIAMEYAAGGELFERICSAGRFSEDEARYFFQQLISGVSYCHAMQICHRDLKLENTLLDGSPAPRLKICDFGYSKSSLLHSMPKSTVGTPAYIAPEVLSRGEYDGKMADVWSCGVTLYVMLVGAYPFEDQEDPKNFKKTIQRIMAVKYKIPDYVHISQDCKHLLSRIFVTNSNKRITIADIKKHPWFLKNLPRELTEIAQAAYFRKENPTFSLQSVEEIMKIVEEAKTPARVSRSIGAFGWGGGEDAEGKEEDAEEEVEEVEEEEDEEDEYDKTVKQVHASMGEVRVS

SEQ ID NO: 38259 - protein, 341 aa, Arabidopsis thaliana
  peptide (1)..(341): Ceres Seq. ID no. 12343443
MRVKNSKELVAMKYIERGPKIDENVAREIINHRSLRHPNIIRFKEVVLTPTHIAIAMEYAAGGELFERICSAGRFSEDEARYFFQQLISGVSYCHAMQICHRDLKLENTLLDGSPAPRLKICDFGYSKSSLLHSMPKSTVGTPAYIAPEVLSRGEYDGKMADVWSCGVTLYVMLVGAYPFEDQEDPKNFKKTIQRIMAVKYKIPDYVHISQDCKHLLSRIFVTNSNKRITIADIKKHPWFLKNLPRELTEIAQAAYFRKENPTFSLQSVEEIMKIVEEAKTPARVSRSIGAFGWGGGEDAEGKEEDAEEEVEEVEEEEDEEDEYDKTVKQVHASMGEVRVS

SEQ ID NO: 38260 - protein, 330 aa, Arabidopsis thaliana
  peptide (1)..(330): Ceres Seq. ID no. 12343444
MKYIERGPKIDENVAREIINHRSLRHPNIIRFKEVVLTPTHIAIAMEYAAGGELFERICSAGRFSEDEARYFFQQLISGVSYCHAMQICHRDLKLENTLLDGSPAPRLKICDFGYSKSSLLHSMPKSTVGTPAYIAPEVLSRGEYDGKMADVWSCGVTLYVMLVGAYPFEDQEDPKNFKKTIQRIMAVKYKIPDYVHISQDCKHLLSRIFVTNSNKRITIADIKKHPWFLKNLPRELTEIAQAAYFRKENPTFSLQSVEEIMKIVEEAKTPARVSRSIGAFGWGGGEDAEGKEEDAEEEVEEVEEEEDEEDEYDKTVKQVHASMGEVRVS

SEQ ID NO: 38261 - DNA, 1668 bp, Arabidopsis thaliana
  misc_feature (1)..(1668): Ceres Seq. ID no. 12575935
  misc_feature (1)..(1668): Ortholog of  Ceres SEQ ID NO 13599900 as cited in SEQ ID NO 531
  misc_feature (1)..(1668): Ortholog of  Ceres SEQ ID NO 13659971 as cited in SEQ ID NO 67565
  misc_feature (1)..(1668): Ortholog of  Ceres SEQ ID NO 13500385 as cited in SEQ ID NO 67583
aaaaccaggcagccactagaagaaggagagatattgagggagaagaatcacattgatagattcgccgccgatctagagccgttgattttcttaatcggaaaaagaaaatgagtggaagcagaaggaaggcgacgccggcgagtaggacgcgagtagggaattacgagatgggacgaactctcggagaaggaagcttcgctaaggtgaaatacgccaagaacaccgtcaccggagatcaagccgctatcaaaatcctcgaccgagaaaaggtcttccgtcacaaaatggtcgaacagcttaaaagagaaatatctacaatgaaactgattaaacatccaaatgtggttgaaatcattgaggttatggcgagcaaaacgaagatctatatcgttcttgagcttgtcaatggaggtgaactctttgataaaatcgcgcaacaagggaggcttaaggaggatgaagctcggagatattttcagcagctcatcaatgctgtggattactgccacagtcgaggtgtctaccacagagatctcaagcctgaaaatctgatccttgacgcaaatggggttttgaaagtctctgattttgggttaagcgccttctcacgacaagttcgggaagatggtttgcttcatacagcttgtggaacgccaaactacgttgcccctgaggttttgtcggacaaaggctatgacggtgcagcagcagatgtctggtcttgtggtgtcattctctttgtgcttatggctggttacttgccttttgatgagccgaatctcatgacattatacaaacgtatatgcaaggctgagtttagctgcccaccatggttctcgcaaggtgccaagagagtcatcaagcgtattctcgaacccaaccctattaccagaataagtattgcagagttgctcgaagatgaatggttcaagaaagggtacaagccgccatcatttgaccaagatgacgaggacataaccatagatgatgttgatgctgcttttagtaactccaaggaatgtcttgtaactgagaagaaggagaaacctgtatccatgaacgctttcgaacttatctctagctcaagcgagttcagtcttgaaaacttgttcgagaagcaagcgcaacttgtgaagaaagaaacgcggtttacttctcaacgatctgcgagtgaaataatgtcgaaaatggaagaaaccgcaaagccattaggctttaatgtccgtaaagacaactacaagataaaaatgaaaggagacaaaagtggtcgtaaaggtcagctctccgtagctacagaggtgtttgaagtggcgccatcattgcatgtggtagagcttaggaaaaccggtggtgataccctcgagtttcacaagttctacaaaaacttctcatctggattaaaggatgtagtctggaatactgatgcagccgctgaagaacaaaagcaataagaaataacaagttgttcaattcaaagtttttaatcaatgttgaacatgtataatgaatagtaaacattctggagttggcaatatacaagtattgctgacaaaagagccaaactagaactagaagtggtctatagaggtagatcaccataggttagtcaatagccacatatgtgatcatcctcaaactcggtttgaaacctataaatcaaagttcaaa

SEQ ID NO: 38262 - protein, 447 aa, Arabidopsis thaliana
  peptide (1)..(447): Ceres Seq. ID no. 12575936
MSGSRRKATPASRTRVGNYEMGRTLGEGSFAKVKYAKNTVTGDQAAIKILDREKVFRHKMVEQLKREISTMKLIKHPNVVEIIEVMASKTKIYIVLELVNGGELFDKIAQQGRLKEDEARRYFQQLINAVDYCHSRGVYHRDLKPENLILDANGVLKVSDFGLSAFSRQVREDGLLHTACGTPNYVAPEVLSDKGYDGAAADVWSCGVILFVLMAGYLPFDEPNLMTLYKRICKAEFSCPPWFSQGAKRVIKRILEPNPITRISIAELLEDEWFKKGYKPPSFDQDDEDITIDDVDAAFSNSKECLVTEKKEKPVSMNAFELISSSSEFSLENLFEKQAQLVKKETRFTSQRSASEIMSKMEETAKPLGFNVRKDNYKIKMKGDKSGRKGQLSVATEVFEVAPSLHVVELRKTGGDTLEFHKFYKNFSSGLKDVVWNTDAAAEEQKQ

SEQ ID NO: 38263 - protein, 427 aa, Arabidopsis thaliana
  peptide (1)..(427): Ceres Seq. ID no. 12575937
MGRTLGEGSFAKVKYAKNTVTGDQAAIKILDREKVFRHKMVEQLKREISTMKLIKHPNVVEIIEVMASKTKIYIVLELVNGGELFDKIAQQGRLKEDEARRYFQQLINAVDYCHSRGVYHRDLKPENLILDANGVLKVSDFGLSAFSRQVREDGLLHTACGTPNYVAPEVLSDKGYDGAAADVWSCGVILFVLMAGYLPFDEPNLMTLYKRICKAEFSCPPWFSQGAKRVIKRILEPNPITRISIAELLEDEWFKKGYKPPSFDQDDEDITIDDVDAAFSNSKECLVTEKKEKPVSMNAFELISSSSEFSLENLFEKQAQLVKKETRFTSQRSASEIMSKMEETAKPLGFNVRKDNYKIKMKGDKSGRKGQLSVATEVFEVAPSLHVVELRKTGGDTLEFHKFYKNFSSGLKDVVWNTDAAAEEQKQ

SEQ ID NO: 38264 - protein, 388 aa, Arabidopsis thaliana
  peptide (1)..(388): Ceres Seq. ID no. 12575938
MVEQLKREISTMKLIKHPNVVEIIEVMASKTKIYIVLELVNGGELFDKIAQQGRLKEDEARRYFQQLINAVDYCHSRGVYHRDLKPENLILDANGVLKVSDFGLSAFSRQVREDGLLHTACGTPNYVAPEVLSDKGYDGAAADVWSCGVILFVLMAGYLPFDEPNLMTLYKRICKAEFSCPPWFSQGAKRVIKRILEPNPITRISIAELLEDEWFKKGYKPPSFDQDDEDITIDDVDAAFSNSKECLVTEKKEKPVSMNAFELISSSSEFSLENLFEKQAQLVKKETRFTSQRSASEIMSKMEETAKPLGFNVRKDNYKIKMKGDKSGRKGQLSVATEVFEVAPSLHVVELRKTGGDTLEFHKFYKNFSSGLKDVVWNTDAAAEEQKQ

SEQ ID NO: 38265 - DNA, 764 bp, Arabidopsis thaliana
  misc_feature (1)..(764): Ceres Seq. ID no. 12579449
  misc_feature (1)..(764): Ortholog of  Ceres SEQ ID NO 14316091 as cited in SEQ ID NO 57622
  misc_feature (1)..(764): Ortholog of  Ceres SEQ ID NO 13639317 as cited in SEQ ID NO 59781
accatgcatcatcatcattaggtctaatatcatgcgtccacaatacaaagacgtgaacgataaattagactcgacggccaagcacgaaaccaacagccatggcggtcgttataataatccttacgtccacattactagtcccacatcagcttctgataagaggtcgaaggataaggttcttgaggtgttgaatcgctgtgggaagaaagtagaggacgctactcgcaaagcggaagcattagtcggaggtttaaaagaccacctgaattttagtcctagcataagtgatgcagcaatggctaggctttctcaaggcactaagatgatcgttgaaggaggaccagagagagtgtttcaacgagagtttggtgttttagctgtagagaaacttttagattcgtttgtttgctacatatcgactacttcgggaccagtgaccggagtgatatacatttccaacagaagaatcgctttttgtagcgactatgccattcgtcttccttcttctgccggtggaaacggtgttgcggcatatttacaaggtggtgatggagtgggagaagataagtagcattagttcatcaacgaacgtgttgaagccaagtgagagatacgtgcatatggtgacacgagatgggtttgagttttggttcatgggctttgtctcctacatcgatgctttcaattgtctcaacaaagctctcctcaattcccgttgtgatcatgccatgtaatgtaatcaaattctaactaagaattttctt

SEQ ID NO: 38266 - protein, 189 aa, Arabidopsis thaliana
  peptide (1)..(189): Ceres Seq. ID no. 12579450
PCIIIIRSNIMRPQYKDVNDKLDSTAKHETNSHGGRYNNPYVHITSPTSASDKRSKDKVLEVLNRCGKKVEDATRKAEALVGGLKDHLNFSPSISDAAMARLSQGTKMIVEGGPERVFQREFGVLAVEKLLDSFVCYISTTSGPVTGVIYISNRRIAFCSDYAIRLPSSAGGNGVAAYLQGGDGVGEDK

SEQ ID NO: 38267 - protein, 179 aa, Arabidopsis thaliana
  peptide (1)..(179): Ceres Seq. ID no. 12579451
MRPQYKDVNDKLDSTAKHETNSHGGRYNNPYVHITSPTSASDKRSKDKVLEVLNRCGKKVEDATRKAEALVGGLKDHLNFSPSISDAAMARLSQGTKMIVEGGPERVFQREFGVLAVEKLLDSFVCYISTTSGPVTGVIYISNRRIAFCSDYAIRLPSSAGGNGVAAYLQGGDGVGEDK

SEQ ID NO: 38268 - DNA, 651 bp, Arabidopsis thaliana
  misc_feature (1)..(651): Ceres Seq. ID no. 12370134
  misc_feature (1)..(651): Ortholog of  Ceres SEQ ID NO 13585437 as cited in SEQ ID NO 65262
atcacgatcgcaacaatggcggctgctgcgaaggagatcctacggcgaccagtggcggcaacaataaggctaaccgttccggcgggaggagcgaggccagccccaccggtaggtccggcgctaggtcagtacaggcttaacctgatggctttctgcaaagacttcaacgctaggactcaaaagtacaaaccagacactccgatggccgtgacgataacggcgttcaaggacaactctttcgaattcaccgtcaagtctccgacggtgtcgtggtacatcaagaaagcagctggagtcgataaaggaagcacacgcccgggtcatttgtcggtgacgacgctatcggtgagacacgtgtacgagatcgcgaaggtgaagcagacggatccgttttgtcagtatatgccgttggaatcgatttgcaaatccatcattggtactgctaattctatgggtatcaagatcgttcaggatttggagtgattttagggtttctgatgaaagagtggaatcaatttgcttctggtaaacgtctgtgctttgagtagtaaagtataaaccatgaatgaatttcacagattgttctgtgttttggtgttacttccattgtgttgtttgtttcaatggataattgagctccaaaagctttcc

SEQ ID NO: 38269 - protein, 160 aa, Arabidopsis thaliana
  peptide (1)..(160): Ceres Seq. ID no. 12370135
ITIATMAAAAKEILRRPVAATIRLTVPAGGARPAPPVGPALGQYRLNLMAFCKDFNARTQKYKPDTPMAVTITAFKDNSFEFTVKSPTVSWYIKKAAGVDKGSTRPGHLSVTTLSVRHVYEIAKVKQTDPFCQYMPLESICKSIIGTANSMGIKIVQDLE

SEQ ID NO: 38270 - protein, 155 aa, Arabidopsis thaliana
  peptide (1)..(155): Ceres Seq. ID no. 12370136
MAAAAKEILRRPVAATIRLTVPAGGARPAPPVGPALGQYRLNLMAFCKDFNARTQKYKPDTPMAVTITAFKDNSFEFTVKSPTVSWYIKKAAGVDKGSTRPGHLSVTTLSVRHVYEIAKVKQTDPFCQYMPLESICKSIIGTANSMGIKIVQDLE

SEQ ID NO: 38271 - protein, 112 aa, Arabidopsis thaliana
  peptide (1)..(112): Ceres Seq. ID no. 12370137
MAFCKDFNARTQKYKPDTPMAVTITAFKDNSFEFTVKSPTVSWYIKKAAGVDKGSTRPGHLSVTTLSVRHVYEIAKVKQTDPFCQYMPLESICKSIIGTANSMGIKIVQDLE

SEQ ID NO: 38272 - DNA, 901 bp, Arabidopsis thaliana
  misc_feature (1)..(901): Ceres Seq. ID no. 13487970
  misc_feature (1)..(901): Ortholog of  Ceres SEQ ID NO 15172911 as cited in SEQ ID NO 55340
  misc_feature (1)..(901): Ortholog of  Ceres SEQ ID NO 13655345 as cited in SEQ ID NO 63222
aacatatccattttgggaaaccataaattcccaaatgtcattcgccgaggaatttgaagctaatcttgtttcgctggcccatgttttgcagaagaaatatgctctcctgcgcgatttggataaaagtttgcaagaaaaccaacgacaaaatgaacaacgctgtgaaaaagaaatagaggatataagaaggggcagagctggaaatatcacacctaatacctctcttacaaagttctcagaggaagcacttgatgaacagaaacacagtgtccggattgctgacgagaaagtcacactggctatgcaggcatatgatctggtggatatgcatgttcagcaacttgaccagtatatgaaaaaatccggcgaagtgatccgcaaagagaaagaagctgccgctgcgacattagaactggagaacaacgggaaagccgggaatgctggtgaaggtggaagaggagggcgaaaaaagacaaggctagcaacagcagcgtcaacagcagcagcatcaactgggatgacttcaagtaatatggatctggatctgcctgtggatccaaacgaaccaacttactgcatctgcaaccaagttagctttggcgagatggttgcgtgtgacaacaatgcgtgcaagattgagtggttccatttcggttgcgtcggtctgaaagaacaacccaaggggaaatggtactgcccggagtgtgctacagtaaagaagagcaggaaaggtcgatgatttgaatgttcatgtctgctaataatccaaacagcttcatcatatctactgtaatccaaacagtttagtatatcaactcatgtaagatgttaccatgttgactataaattgtagaagtcttgtttcgttctttgtttgacaaaattaataactgagtttggg

SEQ ID NO: 38273 - protein, 245 aa, Arabidopsis thaliana
  peptide (1)..(245): Ceres Seq. ID no. 13487971
TYPFWETINSQMSFAEEFEANLVSLAHVLQKKYALLRDLDKSLQENQRQNEQRCEKEIEDIRRGRAGNITPNTSLTKFSEEALDEQKHSVRIADEKVTLAMQAYDLVDMHVQQLDQYMKKSGEVIRKEKEAAAATLELENNGKAGNAGEGGRGGRKKTRLATAASTAAASTGMTSSNMDLDLPVDPNEPTYCICNQVSFGEMVACDNNACKIEWFHFGCVGLKEQPKGKWYCPECATVKKSRKGR

SEQ ID NO: 38274 - protein, 234 aa, Arabidopsis thaliana
  peptide (1)..(234): Ceres Seq. ID no. 13487972
MSFAEEFEANLVSLAHVLQKKYALLRDLDKSLQENQRQNEQRCEKEIEDIRRGRAGNITPNTSLTKFSEEALDEQKHSVRIADEKVTLAMQAYDLVDMHVQQLDQYMKKSGEVIRKEKEAAAATLELENNGKAGNAGEGGRGGRKKTRLATAASTAAASTGMTSSNMDLDLPVDPNEPTYCICNQVSFGEMVACDNNACKIEWFHFGCVGLKEQPKGKWYCPECATVKKSRKGR

SEQ ID NO: 38275 - protein, 145 aa, Arabidopsis thaliana
  peptide (1)..(145): Ceres Seq. ID no. 13487973
MQAYDLVDMHVQQLDQYMKKSGEVIRKEKEAAAATLELENNGKAGNAGEGGRGGRKKTRLATAASTAAASTGMTSSNMDLDLPVDPNEPTYCICNQVSFGEMVACDNNACKIEWFHFGCVGLKEQPKGKWYCPECATVKKSRKGR

SEQ ID NO: 38276 - DNA, 1617 bp, Arabidopsis thaliana
  misc_feature (1)..(1617): Ceres Seq. ID no. 13489016
  misc_feature (1)..(1617): Ortholog of  Ceres SEQ ID NO 15170151 as cited in SEQ ID NO 53069
  misc_feature (1)..(1617): Ortholog of  Ceres SEQ ID NO 13594209 as cited in SEQ ID NO 59089
  misc_feature (1)..(1617): Ortholog of  Ceres SEQ ID NO 14303546 as cited in SEQ ID NO 64893
  misc_feature (1)..(1617): Ortholog of  Ceres SEQ ID NO 13502874 as cited in SEQ ID NO 66298
  misc_feature (1)..(1617): Ortholog of  Ceres SEQ ID NO 12614124 as cited in SEQ ID NO 68392
gggtgcttattaaaacaaaataacatacaaatggatagcatttggattctatcacttctcttcttcatcatctttcttcttctggccgccttcaaacgcaaaaatcatgggaaacatcgacgaataccatctcctcctggttttccaatcatcggaaacttacatcagctcggagaattacaacatcagtctctatggaagctctcaaagaagtatggccctgtgatgcttttgaagcttggaaaagtccccacactcatactttcttcatcagaaacagcaaaacaagctctaagagactatgatctccattgttgtagccgtccttccttagcaggaggaagagagctctcttacaacaatctagatatgtcttcatctccttataatgaatattggaaggaactaaggaagctctgcagtcaagaactctttagtgctaataaaattcaatcgattcaacctattaaggacgaggaggtcaagaaagttatcgattcaatcgcggaatcatcttctctaaagaatccggttaacttgagcaagacgtttcttgctttaactacaagtgtagtatgcaaggcagcatttggtgtgagttttgagggaagtgtgctcaacagtgatagattcaataagttagtccgagatactttcgagatgttgggaagcttctctgcctcagattttattccgtatgtcggatggatcatcgataagttcaatggtttacaagggtggagaaagaaaagctttcgagatcttgatgcgttctatgaacaaatttttgatctgcataaggaagagaaggaagtaggaagtgaagatttagtggatgtgctcttgaggttggagaaagaagaaattgttgttggaaatggcaagctcacaagaaatcatatcaaagcaattttgatgaacattcttttaggaggaatcgatacttctgcaataacaatgacatgggcaatggcagaacttgctaaaaaccctagagtgatgaagaaagttcaagcagaaatcagaaaccaaatcaagaacaaagaaagaatcagctttgatgacactgataagctcgagtacttgaaaatggtgatcaaagaaacatggaggttacatcctccaacacctcttctcctcccaagagatgtaatcactgaatttgagatcaatggctacacgattcctgccaaaacacggcttcatgtgaatgtttgggctatcgggcgtgatcctgatacatggaaagatccagaaatgtttctccccgaaaggtttaatgatagtaacattgatgcaaaaggacagaactttgagttgttgtcgtttgggagtggtaggagaatttgtcctggactgtacatgggaacaacaatggtggagtttggcctagctaatatgttgtatcattttgattggaagttaccagaaggcatggtagtcgaagatatcgatatggaagaagctcctggacttactgtgagcaaaaaaagtgagcttgtacttgttccagtgaagtatttagaccattgattcacgtgaattagttcttcatcgattgtactatgaatgagaacgaaatgataatgataattttcaatgtaatattttttttct

SEQ ID NO: 38277 - protein, 510 aa, Arabidopsis thaliana
  peptide (1)..(510): Ceres Seq. ID no. 13489017
GCLLKQNNIQMDSIWILSLLFFIIFLLLAAFKRKNHGKHRRIPSPPGFPIIGNLHQLGELQHQSLWKLSKKYGPVMLLKLGKVPTLILSSSETAKQALRDYDLHCCSRPSLAGGRELSYNNLDMSSSPYNEYWKELRKLCSQELFSANKIQSIQPIKDEEVKKVIDSIAESSSLKNPVNLSKTFLALTTSVVCKAAFGVSFEGSVLNSDRFNKLVRDTFEMLGSFSASDFIPYVGWIIDKFNGLQGWRKKSFRDLDAFYEQIFDLHKEEKEVGSEDLVDVLLRLEKEEIVVGNGKLTRNHIKAILMNILLGGIDTSAITMTWAMAELAKNPRVMKKVQAEIRNQIKNKERISFDDTDKLEYLKMVIKETWRLHPPTPLLLPRDVITEFEINGYTIPAKTRLHVNVWAIGRDPDTWKDPEMFLPERFNDSNIDAKGQNFELLSFGSGRRICPGLYMGTTMVEFGLANMLYHFDWKLPEGMVVEDIDMEEAPGLTVSKKSELVLVPVKYLDH

SEQ ID NO: 38278 - protein, 500 aa, Arabidopsis thaliana
  peptide (1)..(500): Ceres Seq. ID no. 13489018
MDSIWILSLLFFIIFLLLAAFKRKNHGKHRRIPSPPGFPIIGNLHQLGELQHQSLWKLSKKYGPVMLLKLGKVPTLILSSSETAKQALRDYDLHCCSRPSLAGGRELSYNNLDMSSSPYNEYWKELRKLCSQELFSANKIQSIQPIKDEEVKKVIDSIAESSSLKNPVNLSKTFLALTTSVVCKAAFGVSFEGSVLNSDRFNKLVRDTFEMLGSFSASDFIPYVGWIIDKFNGLQGWRKKSFRDLDAFYEQIFDLHKEEKEVGSEDLVDVLLRLEKEEIVVGNGKLTRNHIKAILMNILLGGIDTSAITMTWAMAELAKNPRVMKKVQAEIRNQIKNKERISFDDTDKLEYLKMVIKETWRLHPPTPLLLPRDVITEFEINGYTIPAKTRLHVNVWAIGRDPDTWKDPEMFLPERFNDSNIDAKGQNFELLSFGSGRRICPGLYMGTTMVEFGLANMLYHFDWKLPEGMVVEDIDMEEAPGLTVSKKSELVLVPVKYLDH

SEQ ID NO: 38279 - protein, 435 aa, Arabidopsis thaliana
  peptide (1)..(435): Ceres Seq. ID no. 13489019
MLLKLGKVPTLILSSSETAKQALRDYDLHCCSRPSLAGGRELSYNNLDMSSSPYNEYWKELRKLCSQELFSANKIQSIQPIKDEEVKKVIDSIAESSSLKNPVNLSKTFLALTTSVVCKAAFGVSFEGSVLNSDRFNKLVRDTFEMLGSFSASDFIPYVGWIIDKFNGLQGWRKKSFRDLDAFYEQIFDLHKEEKEVGSEDLVDVLLRLEKEEIVVGNGKLTRNHIKAILMNILLGGIDTSAITMTWAMAELAKNPRVMKKVQAEIRNQIKNKERISFDDTDKLEYLKMVIKETWRLHPPTPLLLPRDVITEFEINGYTIPAKTRLHVNVWAIGRDPDTWKDPEMFLPERFNDSNIDAKGQNFELLSFGSGRRICPGLYMGTTMVEFGLANMLYHFDWKLPEGMVVEDIDMEEAPGLTVSKKSELVLVPVKYLDH

SEQ ID NO: 38280 - DNA, 1567 bp, Arabidopsis thaliana; identical to SEQ ID NO: 37456
  misc_feature (1)..(1567): Ceres Seq. ID no. 12389081
  misc_feature (1)..(1567): Ortholog of  Ceres SEQ ID NO 14302255 as cited in SEQ ID NO 65021

SEQ ID NO: 38281 - protein, 395 aa, Arabidopsis thaliana; identical to SEQ ID NO: 37457
  peptide (1)..(395): Ceres Seq. ID no. 12389082

SEQ ID NO: 38282 - protein, 393 aa, Arabidopsis thaliana; identical to SEQ ID NO: 37458
  peptide (1)..(393): Ceres Seq. ID no. 12389083

SEQ ID NO: 38283 - protein, 391 aa, Arabidopsis thaliana; identical to SEQ ID NO: 37459
  peptide (1)..(391): Ceres Seq. ID no. 12389084

SEQ ID NO: 38284 - DNA, 1780 bp, Arabidopsis thaliana
  misc_feature (1)..(1780): Ceres Seq. ID no. 13489509
  misc_feature (1)..(1780): Ortholog of  Ceres SEQ ID NO 15177141 as cited in SEQ ID NO 54147
aagtcgcaacgctccaacgacttcaattcaatttactttcgattttgtcctcttccaaaaacccttccgcttaaaccctaattcacttcgccggccatgtcgacactcgaggatggatttccggcggataagctcttcgctcaaggatactcttacacctacgacgacgtcatctttcttcctcacttcatcgatttctccacagacgctgtttctctatccacgcgccttagccggcgcgtgcctctctccataccttgcgtttcgtctccgatggatactgtttcggaatctcacatggctgctgctatggcttctcttggtgggattggaatcgtccactataactgtggcatcgccgctcaagcatcgattattcgccaagctaagtcgcttaaacatccgattgcttccgacgccggtgtgaagttcccggagtatgagattacttctttagatgcttttggtccttcttccttcgtttttgtcgagcaaacaggaacaatgacgactcctaaattgttaggctatgtaacgaaatcgcagtggaagagaatgaattacgaacaaagggagatgaagatatacgattacatgaagagctgtgatagcagtgactattgtgtaccatgggaaattgattttgaaaagttggagtttgttttagaagataagcaaaagggctttgtggttcttgagagggatggtgagactgtgaacgtggtgacgaaagatgatatacagagggttaaaggatatcccaagtctggaccagggactgtgggcccagacggtgagtggatggttggtgcagcgataggtacgagggagtctgataaggagaggcttgagcatttggttaatgttggggtcaatgctgtagtgttggatagttcgcaagggaactctatttaccagcttgagatgatcaagtatgtgaaaaagacttaccctgaattggatgtgattggtggcaatgttgtgacaatgtaccaggcacagaatttgatccaagcaggagttgatgggttgagagttggtatgggatctggttcgatatgtaccacacaagaggtttgtgcagttggtcgtggacaggctactgctgtgtacaaggtttgttcgatcgctgctcagagcgggattccagttatagcggatggtggtatctcaaattcagggcacattgtaaaggctctcgtccttggagcatcaactgttatgatgggtagctttttagctggaagtactgaggctcccgggggttacgagtatacgaacggtaagaggatcaagaagtaccgtggaatgggatcgctagaagcaatgactaaaggaagtgaccaaagatacttaggagatcaaacaaaactcaagattgctcaaggagtggttggagcagtcgcggataaaggctcagtgttgaagctgataccttacacaatgcacgccgtgaaacaaggtttccaagaccttggtgcttcttccttgcaatctgctcatggtctgttgagatcaaacatccttaggcttgaggctcgaactggtgctgcacaggtcgaaggaggagttcacgggctggtttcttatgaaaagaaatcgttttaagctttggcctaaaattgagtgctaagagtgtttcttatatcatgttccatgttatttttatagatattacttttcaatctagtaactttagtctttttatttattgacatgatttacattgtctcctaaaatcaattttcctctaatattgtcttatatctactaagttact

SEQ ID NO: 38285 - protein, 503 aa, Arabidopsis thaliana
  peptide (1)..(503): Ceres Seq. ID no. 13489510
MSTLEDGFPADKLFAQGYSYTYDDVIFLPHFIDFSTDAVSLSTRLSRRVPLSIPCVSSPMDTVSESHMAAAMASLGGIGIVHYNCGIAAQASIIRQAKSLKHPIASDAGVKFPEYEITSLDAFGPSSFVFVEQTGTMTTPKLLGYVTKSQWKRMNYEQREMKIYDYMKSCDSSDYCVPWEIDFEKLEFVLEDKQKGFVVLERDGETVNVVTKDDIQRVKGYPKSGPGTVGPDGEWMVGAAIGTRESDKERLEHLVNVGVNAVVLDSSQGNSIYQLEMIKYVKKTYPELDVIGGNVVTMYQAQNLIQAGVDGLRVGMGSGSICTTQEVCAVGRGQATAVYKVCSIAAQSGIPVIADGGISNSGHIVKALVLGASTVMMGSFLAGSTEAPGGYEYTNGKRIKKYRGMGSLEAMTKGSDQRYLGDQTKLKIAQGVVGAVADKGSVLKLIPYTMHAVKQGFQDLGASSLQSAHGLLRSNILRLEARTGAAQVEGGVHGLVSYEKKSF

SEQ ID NO: 38286 - protein, 444 aa, Arabidopsis thaliana
  peptide (1)..(444): Ceres Seq. ID no. 13489511
MDTVSESHMAAAMASLGGIGIVHYNCGIAAQASIIRQAKSLKHPIASDAGVKFPEYEITSLDAFGPSSFVFVEQTGTMTTPKLLGYVTKSQWKRMNYEQREMKIYDYMKSCDSSDYCVPWEIDFEKLEFVLEDKQKGFVVLERDGETVNVVTKDDIQRVKGYPKSGPGTVGPDGEWMVGAAIGTRESDKERLEHLVNVGVNAVVLDSSQGNSIYQLEMIKYVKKTYPELDVIGGNVVTMYQAQNLIQAGVDGLRVGMGSGSICTTQEVCAVGRGQATAVYKVCSIAAQSGIPVIADGGISNSGHIVKALVLGASTVMMGSFLAGSTEAPGGYEYTNGKRIKKYRGMGSLEAMTKGSDQRYLGDQTKLKIAQGVVGAVADKGSVLKLIPYTMHAVKQGFQDLGASSLQSAHGLLRSNILRLEARTGAAQVEGGVHGLVSYEKKSF

SEQ ID NO: 38287 - protein, 436 aa, Arabidopsis thaliana
  peptide (1)..(436): Ceres Seq. ID no. 13489512
MAAAMASLGGIGIVHYNCGIAAQASIIRQAKSLKHPIASDAGVKFPEYEITSLDAFGPSSFVFVEQTGTMTTPKLLGYVTKSQWKRMNYEQREMKIYDYMKSCDSSDYCVPWEIDFEKLEFVLEDKQKGFVVLERDGETVNVVTKDDIQRVKGYPKSGPGTVGPDGEWMVGAAIGTRESDKERLEHLVNVGVNAVVLDSSQGNSIYQLEMIKYVKKTYPELDVIGGNVVTMYQAQNLIQAGVDGLRVGMGSGSICTTQEVCAVGRGQATAVYKVCSIAAQSGIPVIADGGISNSGHIVKALVLGASTVMMGSFLAGSTEAPGGYEYTNGKRIKKYRGMGSLEAMTKGSDQRYLGDQTKLKIAQGVVGAVADKGSVLKLIPYTMHAVKQGFQDLGASSLQSAHGLLRSNILRLEARTGAAQVEGGVHGLVSYEKKSF

SEQ ID NO: 38288 - DNA, 767 bp, Arabidopsis thaliana
  misc_feature (1)..(767): Ceres Seq. ID no. 13497708
  misc_feature (1)..(767): Ortholog of  Ceres SEQ ID NO 13594647 as cited in SEQ ID NO 52208
  misc_feature (1)..(767): Ortholog of  Ceres SEQ ID NO 13637658 as cited in SEQ ID NO 53077
  misc_feature (1)..(767): Ortholog of  Ceres SEQ ID NO 13664275 as cited in SEQ ID NO 61120
  misc_feature (1)..(767): Ortholog of  Ceres SEQ ID NO 15174168 as cited in SEQ ID NO 61888
  misc_feature (1)..(767): Ortholog of  Ceres SEQ ID NO 12635311 as cited in SEQ ID NO 0
  misc_feature (1)..(767): Ortholog of  Ceres SEQ ID NO 13599510 as cited in SEQ ID NO 0
  misc_feature (1)..(767): Ortholog of  Ceres SEQ ID NO 13599622 as cited in SEQ ID NO 0
  misc_feature (1)..(767): Ortholog of  Ceres SEQ ID NO 13600020 as cited in SEQ ID NO 0
aaaccaactccatctcacttctcaagtcttataatttattcatttctctcttcttcatcgatctttggcttttagaaaacctaatcagaaatggcaacggcgtcgtttaacatgcagtcagtgttcgctgctccttccggtgtattgactacacgcaacatcagaaacacaaaccaactcttcttcaagaggaatgctccggtaggagtcagatgcatggctcagggcgatcctatcaaggaagatccttctgtgccctcgacctcgacttcggccactcaaccacaaatgccacagtctcctcctccaccagttagcaagcctaaggtgagtacgaagtttggagatttgctagcgtttagcggtccagcacccgagaggatcaacgggagactagcaatggttggattcgtggcggccatcgccgtggagttatcaaagggagaaaacgtgtttgctcagatctctgacggtggtgtcgggtggtttctaggaacaaccgcgttgttgacgttggcatcgatggttccgttgttcaagggaataagggcagaggcaaagtcaaaagggttcatgacttcagacgccgagctatggaacggtcggtttgcgatgctcggtctcgttgcgttggccttcaccgagtacgtcactggtgggactctagtctaaggctaaagctttttgtttgctagtttaaggacaaatttggagaatgattatgtaacgcatagtttgatttaatactatgagttttaaacagtgtg

SEQ ID NO: 38289 - protein, 193 aa, Arabidopsis thaliana
  peptide (1)..(193): Ceres Seq. ID no. 13497709
MATASFNMQSVFAAPSGVLTTRNIRNTNQLFFKRNAPVGVRCMAQGDPIKEDPSVPSTSTSATQPQMPQSPPPPVSKPKVSTKFGDLLAFSGPAPERINGRLAMVGFVAAIAVELSKGENVFAQISDGGVGWFLGTTALLTLASMVPLFKGIRAEAKSKGFMTSDAELWNGRFAMLGLVALAFTEYVTGGTLV

SEQ ID NO: 38290 - protein, 186 aa, Arabidopsis thaliana
  peptide (1)..(186): Ceres Seq. ID no. 13497710
MQSVFAAPSGVLTTRNIRNTNQLFFKRNAPVGVRCMAQGDPIKEDPSVPSTSTSATQPQMPQSPPPPVSKPKVSTKFGDLLAFSGPAPERINGRLAMVGFVAAIAVELSKGENVFAQISDGGVGWFLGTTALLTLASMVPLFKGIRAEAKSKGFMTSDAELWNGRFAMLGLVALAFTEYVTGGTLV

SEQ ID NO: 38291 - protein, 151 aa, Arabidopsis thaliana
  peptide (1)..(151): Ceres Seq. ID no. 13497711
MAQGDPIKEDPSVPSTSTSATQPQMPQSPPPPVSKPKVSTKFGDLLAFSGPAPERINGRLAMVGFVAAIAVELSKGENVFAQISDGGVGWFLGTTALLTLASMVPLFKGIRAEAKSKGFMTSDAELWNGRFAMLGLVALAFTEYVTGGTLV

SEQ ID NO: 38292 - DNA, 753 bp, Arabidopsis thaliana
  misc_feature (1)..(753): Ceres Seq. ID no. 12488252
  misc_feature (1)..(753): Ortholog of  Ceres SEQ ID NO 12635272 as cited in SEQ ID NO 495
  misc_feature (1)..(753): Ortholog of  Ceres SEQ ID NO 13594789 as cited in SEQ ID NO 52172
  misc_feature (1)..(753): Ortholog of  Ceres SEQ ID NO 14306131 as cited in SEQ ID NO 52246
  misc_feature (1)..(753): Ortholog of  Ceres SEQ ID NO 14309585 as cited in SEQ ID NO 52660
  misc_feature (1)..(753): Ortholog of  Ceres SEQ ID NO 14305267 as cited in SEQ ID NO 0
actcatttttctattactgaaatttttcttagagaagaagaagaagaggcaaaatggccacaagcgcatcagctttgctctcaccaatagcttcttcctctgctctttcccttgcgatcgcatctgcgtacacttttctcctcccatcttccgggattacactgaaaagctcgtccactggcgcgatggtgctgatggatctgtagaaacttccaccaccttattttctgccacggccgtattcgcaaaaatgtctgctaccagcgacgcaatcttcaacttccagagagagaacgtagcaaaacagggcttaccggagcagaacggaaaaacccatttcgaagctggagatgatcgtgctaaggagtacgtcagtctcttgaaatcgaacgatccaattggattcaacattgttgatgttcttgcttggggttctattggacacatcgttgcttactacatcttggctacttccagcaatggatacgacccaagcttctttggatgattcgtttcaatgtcaatctctcgtatatgtatatgtatatgtttgacttgtgttgcaagctatctaatctgttctctatctctgtttcttcttctgttgttgntgtttttgtctaagacttgtccctctttttgcaaatgttttatttctccatttacaaatattggtttgcagagttttataagaagaacataatagtataaaaaaaaaaaaaaaaaagcttctcgtgccggcttctcgtgccg

SEQ ID NO: 38293 - protein, 168 aa, Arabidopsis thaliana
  peptide (1)..(168): Ceres Seq. ID no. 12488253
LIFLLLKFFLEKKKKRQNGHKRISFALTNSFFLCSFPCDRICVHFSPPIFRDYTEKLVHWRDGADGSVETSTTLFSATAVFAKMSATSDAIFNFQRENVAKQGLPEQNGKTHFEAGDDRAKEYVSLLKSNDPIGFNIVDVLAWGSIGHIVAYYILATSSNGYDPSFFG

SEQ ID NO: 38294 - protein, 85 aa, Arabidopsis thaliana
  peptide (1)..(85): Ceres Seq. ID no. 12488254
MSATSDAIFNFQRENVAKQGLPEQNGKTHFEAGDDRAKEYVSLLKSNDPIGFNIVDVLAWGSIGHIVAYYILATSSNGYDPSFFG

SEQ ID NO: 38295 - DNA, 1689 bp, Arabidopsis thaliana
  misc_feature (1)..(1689): Ceres Seq. ID no. 12669827
  misc_feature (1)..(1689): Ortholog of  Ceres SEQ ID NO 14308813 as cited in SEQ ID NO 55485
  misc_feature (1)..(1689): Ortholog of  Ceres SEQ ID NO 13655744 as cited in SEQ ID NO 64032
  misc_feature (1)..(1689): Ortholog of  Ceres SEQ ID NO 13590394 as cited in SEQ ID NO 66581
atccccaaatcttctccttctccaaaaaaatttcaaaccctagcttctcgatttctctcctctgctctccaattccatcttcccatggcgatttcggctccagccgcttgttcttcctcctctagaattctctgttcctactcctctccttctccttctctctgtcccgccatttccacctctggtaaactcaaaaccctaactctctcttcctccttcctcccttcttactcattaaccaccacctccgcttctcaatccactcgtcgctccttcaccgtccgcgccgctcgtggaaagttcgagaggaagaagcctcatgtcaacatcggaaccatcggtcatgttgaccatgggaaaactactttaaccgcagctctaaccatggctctcgcttccattggttccagcgtcgctaaaaagtacgacgagattgacgctgcgccggaggagagagctcgtggtatcacaatcaacactgctactgttgagtacgagactgagaatcgtcactacgctcacgttgattgtcctggtcacgctgattacgttaagaatatgattaccggagctgcacagatggacggagctatcctcgttgtttccggcgccgatggtcctatgcctcagactaaagagcatatccttttggctaagcaggttggtgttcctgatatggttgtgtttcttaacaaagaggatcaagtagatgatgcagagttgctagagctcgttgagcttgaggttcgtgagcttctctcgtcttatgaatttaacggtgatgatattccgattatctctggttctgctcttttagccgttgagactcttactgagaatcctaaggttaagagaggtgataacaaatgggtagataagatttatgaacttatggatgctgttgatgattacatccctatccctcagagacaaactgaattgccattcttgttagctgttgaggatgtgttctctatcactggacgtggtacggtggctacagggcgtgtcgagagaggtacggttaaggtaggagagactgtagatttagtgggtttgagggagactaggagttacactgtcactggggttgaaatgtttcagaagattcttgatgaggctttagctggtgacaatgtagggttgttgcttaggggtattcaaaaggctgatattcagagaggtatggttttagctaagccgggatcgattactccacataccaagtttgaagcaattatctatgtgttgaagaaagaggaaggtggaaggcattctccattctttgcagggtacaggcctcagttctacatgaggacgactgatgttacgggtaaagtgacgaagatcatgaacgacaaagatgaagagtcgaagatggttatgcccggtgatcgagtgaagattgttgttgagcttattgtgccggtggcttgtgaacaagggatgaggtttgctatcagagaaggaggaaagactgttggtgctggagttattgggacgatcctcgaatgattataaggttttagagagtttcatatagtgagcatctctacttgctttctttttgtttcactcttgattctcaaactctttgagtttttacctttttttatttatttttgtgccattttccataagaacttgaaatcaaaatgtcatatatttcttgattttctgatccttgtt

SEQ ID NO: 38296 - protein, 504 aa, Arabidopsis thaliana
  peptide (1)..(504): Ceres Seq. ID no. 12669828
IPKSSPSPKKFQTLASRFLSSALQFHLPMAISAPAACSSSSRILCSYSSPSPSLCPAISTSGKLKTLTLSSSFLPSYSLTTTSASQSTRRSFTVRAARGKFERKKPHVNIGTIGHVDHGKTTLTAALTMALASIGSSVAKKYDEIDAAPEERARGITINTATVEYETENRHYAHVDCPGHADYVKNMITGAAQMDGAILVVSGADGPMPQTKEHILLAKQVGVPDMVVFLNKEDQVDDAELLELVELEVRELLSSYEFNGDDIPIISGSALLAVETLTENPKVKRGDNKWVDKIYELMDAVDDYIPIPQRQTELPFLLAVEDVFSITGRGTVATGRVERGTVKVGETVDLVGLRETRSYTVTGVEMFQKILDEALAGDNVGLLLRGIQKADIQRGMVLAKPGSITPHTKFEAIIYVLKKEEGGRHSPFFAGYRPQFYMRTTDVTGKVTKIMNDKDEESKMVMPGDRVKIVVELIVPVACEQGMRFAIREGGKTVGAGVIGTILE

SEQ ID NO: 38297 - protein, 476 aa, Arabidopsis thaliana
  peptide (1)..(476): Ceres Seq. ID no. 12669829
MAISAPAACSSSSRILCSYSSPSPSLCPAISTSGKLKTLTLSSSFLPSYSLTTTSASQSTRRSFTVRAARGKFERKKPHVNIGTIGHVDHGKTTLTAALTMALASIGSSVAKKYDEIDAAPEERARGITINTATVEYETENRHYAHVDCPGHADYVKNMITGAAQMDGAILVVSGADGPMPQTKEHILLAKQVGVPDMVVFLNKEDQVDDAELLELVELEVRELLSSYEFNGDDIPIISGSALLAVETLTENPKVKRGDNKWVDKIYELMDAVDDYIPIPQRQTELPFLLAVEDVFSITGRGTVATGRVERGTVKVGETVDLVGLRETRSYTVTGVEMFQKILDEALAGDNVGLLLRGIQKADIQRGMVLAKPGSITPHTKFEAIIYVLKKEEGGRHSPFFAGYRPQFYMRTTDVTGKVTKIMNDKDEESKMVMPGDRVKIVVELIVPVACEQGMRFAIREGGKTVGAGVIGTILE

SEQ ID NO: 38298 - protein, 376 aa, Arabidopsis thaliana
  peptide (1)..(376): Ceres Seq. ID no. 12669830
MALASIGSSVAKKYDEIDAAPEERARGITINTATVEYETENRHYAHVDCPGHADYVKNMITGAAQMDGAILVVSGADGPMPQTKEHILLAKQVGVPDMVVFLNKEDQVDDAELLELVELEVRELLSSYEFNGDDIPIISGSALLAVETLTENPKVKRGDNKWVDKIYELMDAVDDYIPIPQRQTELPFLLAVEDVFSITGRGTVATGRVERGTVKVGETVDLVGLRETRSYTVTGVEMFQKILDEALAGDNVGLLLRGIQKADIQRGMVLAKPGSITPHTKFEAIIYVLKKEEGGRHSPFFAGYRPQFYMRTTDVTGKVTKIMNDKDEESKMVMPGDRVKIVVELIVPVACEQGMRFAIREGGKTVGAGVIGTILE

SEQ ID NO: 38299 - DNA, 1049 bp, Arabidopsis thaliana
  misc_feature (1)..(1049): Ceres Seq. ID no. 12371939
  misc_feature (1)..(1049): Ortholog of  Ceres SEQ ID NO 12583421 as cited in SEQ ID NO 56410
  misc_feature (1)..(1049): Ortholog of  Ceres SEQ ID NO 15176407 as cited in SEQ ID NO 59620
  misc_feature (1)..(1049): Ortholog of  Ceres SEQ ID NO 13596876 as cited in SEQ ID NO 62696
  misc_feature (1)..(1049): Ortholog of  Ceres SEQ ID NO 13655442 as cited in SEQ ID NO 64359
aaaattactacgattgctataatgtcgatgtctcggctcggattgttgttgttcgtcgctatattgctcgtcttgcttcagtcttccacttgtctgattagttctccaagttctatcatcaatccttctaaagtcaaacaggtttcgtcgaagcccagggcatttgtgtatgaaggttttttgacggacttggaatgtgatcatctaatctctcttgcgaaagagaatctgcagagatctgcggttgctgataacgataatggcgagagtcaagtcagtgatgttcgtaccagctccggcacttttatctccaaaggaaaggatcctattgtttccggtatcgaggacaagctctcaacatggacatttctcccaaaagaaaacggggaagaccttcaggtattgagatatgagcacggtcagaaatatgatgctcactttgactacttccacgacaaagtcaacattgcccgtggtggacaccgcatagcaacggttctcttgtatctgtccaatgtcacaaagggtggagaaactgttttccccgatgcacaggaattctctcgccgctcgctttctgagaataaagacgatctttctgattgtgcaaagaaaggaatcgctgtgaaaccgaagaaagggaatgctctgttgttcttcaacctccaacaagacgcaatcccagacccctttagccttcacggaggttgtccagtgatcgaaggagagaaatggtcggctactaagtggatccacgtggactcattcgataagatattgacacatgatggtaattgtactgacgtaaacgagagctgtgagagatgggcagtgcttggagaatgtggaaagaatccagagtatatggttggaactccagagatccctgggaattgcagacgtagctgtaaagcttgttaaagactttaaactcctctttttctctgtaacattaaaagtttttttttcttgatcgagtttcattttcttgtttctgattgttgttacatgtatcgtctcgctttatagaatgatttttttcgtctggc

SEQ ID NO: 38300 - protein, 306 aa, Arabidopsis thaliana
  peptide (1)..(306): Ceres Seq. ID no. 12371940
KITTIAIMSMSRLGLLLFVAILLVLLQSSTCLISSPSSIINPSKVKQVSSKPRAFVYEGFLTDLECDHLISLAKENLQRSAVADNDNGESQVSDVRTSSGTFISKGKDPIVSGIEDKLSTWTFLPKENGEDLQVLRYEHGQKYDAHFDYFHDKVNIARGGHRIATVLLYLSNVTKGGETVFPDAQEFSRRSLSENKDDLSDCAKKGIAVKPKKGNALLFFNLQQDAIPDPFSLHGGCPVIEGEKWSATKWIHVDSFDKILTHDGNCTDVNESCERWAVLGECGKNPEYMVGTPEIPGNCRRSCKAC

SEQ ID NO: 38301 - protein, 299 aa, Arabidopsis thaliana
  peptide (1)..(299): Ceres Seq. ID no. 12371941
MSMSRLGLLLFVAILLVLLQSSTCLISSPSSIINPSKVKQVSSKPRAFVYEGFLTDLECDHLISLAKENLQRSAVADNDNGESQVSDVRTSSGTFISKGKDPIVSGIEDKLSTWTFLPKENGEDLQVLRYEHGQKYDAHFDYFHDKVNIARGGHRIATVLLYLSNVTKGGETVFPDAQEFSRRSLSENKDDLSDCAKKGIAVKPKKGNALLFFNLQQDAIPDPFSLHGGCPVIEGEKWSATKWIHVDSFDKILTHDGNCTDVNESCERWAVLGECGKNPEYMVGTPEIPGNCRRSCKAC

SEQ ID NO: 38302 - protein, 297 aa, Arabidopsis thaliana
  peptide (1)..(297): Ceres Seq. ID no. 12371942
MSRLGLLLFVAILLVLLQSSTCLISSPSSIINPSKVKQVSSKPRAFVYEGFLTDLECDHLISLAKENLQRSAVADNDNGESQVSDVRTSSGTFISKGKDPIVSGIEDKLSTWTFLPKENGEDLQVLRYEHGQKYDAHFDYFHDKVNIARGGHRIATVLLYLSNVTKGGETVFPDAQEFSRRSLSENKDDLSDCAKKGIAVKPKKGNALLFFNLQQDAIPDPFSLHGGCPVIEGEKWSATKWIHVDSFDKILTHDGNCTDVNESCERWAVLGECGKNPEYMVGTPEIPGNCRRSCKAC

SEQ ID NO: 38303 - DNA, 2967 bp, Arabidopsis thaliana
  misc_feature (1)..(2967): Ceres Seq. ID no. 13580311
  misc_feature (1)..(2967): Ortholog of  Ceres SEQ ID NO 15168977 as cited in SEQ ID NO 20587
agagaagagaatcttccaaaaatgttaaatcttgtgaaacaaataaagcatagcaaagcaaagtccaaagtccaatgagctaaaacaaaatcaaaaaggtttctttatgttttttttttttgaagtaagaaaaaaaaagagtttataaagaaacagtgaagaaataaatagcagaacaaagagaaagatcggagaaaagaatctttttaggctctctctcgcagacttcgcactcacacactcacttccattgctccaaaaaaacattgtatctacttcacttgctgtagagatatggtatcaagatcttattcaaacctcttggatcttgcttctggtaacttccattcgttttctcgagaaaagaagaggtttccaagagtagcaactgtcactggtgtcttatctgagctagatgatgataacaacagcaacagtgtctgctctgatgctccttcttccgtcacacaagatcgaatcatcatcgttggaaaccagcttcctattaaatcacatcggaactctgctggtaaattgagttttagttgggacaatgactcgcttctcttgcagcttaaagatggtatgcgtgaagatatggaagttgtctacattggttgccttaaggaacagattgatacagttgagcaagatgatgtttctcaaaggttgcttgagaatttcaaatgtgttcctgcttatatcccacctgagctattcactaagtactatcatggattctgtaagcaacatctatggcctttgtttcactacatgcttcccttaactcctgatcttggtggtagatttgatcgttctttatggcaagcttatctttcggttaacaagatctttgctgataaagtgatggaagtgattagtcctgatgatgattttgtttgggttcatgactatcacttaatggttttgcctacatttctaaggaagaggtttaatagagtaaagcttggttttttccttcatagcccgttcccttcctctgagatttaccgtactcttccagtgagaaatgagctcttacgtgcactcctcaacgctgatttgattggctttcatacctttgactatgcaagacacttcctttcttgttgtagcaggatgcttggtttatcctatcagtccaaacgtggaaccatagggcttgagtattatggtcgaacggttagtatcaagattcttcctgtggggattcatatcagccagcttcagtcaattttaaacctcccagagactcagaccaaagttgctgagctaagagatcagttcttggatcagaaagttcttctcggtgttgatgacatggacatcttcaaaggaatcagcctcaaactcttggcaatggaacaacttctcacacagcatcccgagaagagaggtcgagttgtacttgtccagattgcaaaccctgcaagaggtcgtgggaaagacgttcaggaggttcagtctgaaactgaagccacggttaaaaggatcaatgaaatgtttggaaggccgggctaccaacccgtggttctgattgatacaccgcttcaattctttgagaggattgcttactatgtcattgcagagtgttgtcttgttacagcggtaagagatggtatgaatcttataccttatgagtacattatctgcaggcaaggtaatccgaaactcaacgagactataggccttgacccttctgctgcaaagaagagtatgcttgttgtctctgagtttattggttgttctccttctttaagcggcgccattagagtaaatccgtggaacattgatgctgtgactgaagcaatggactatgcattgatagtttcagaagcagagaagcaaatgcgtcacgagaagcatcacaaatatgttagcacacatgatgttgcttattgggcgcgtagctttatacaagatcttgaaagggcttgcggggatcatgtgaggaagaggtgttgggggattggattcgggttaggctttagagttgtggcgcttgatccgagttttaaaaagctttcgattgagcacattgtctcagcttataagagaaccaagaaccgagccattttgttggattatgatggcacaatggtgcagccaggttccattaggacaacaccaacccgcgaaacaatcgaaatcttgaacaacctgtctagtgatcccaagaatatcgtgtacctcgtcagtgggaaagacagaaggacactaactgaatggttttcttcatgtgacgatctcggtttgggtgcagagcacgggtattttataaggccaaatgatggaacagactgggaaacgtcgagtttggtatcaggttttgagtggaaacaaatagcagagccagtgatgagactttacactgagactacagatggatcaacaatagagactaaagagactgctctcgtttggaattaccaattcgcagatcctgattttggatcttgtcaagccaaagagcttatggaacacctcgaaagcgtgcttaccaatgatccagtctctgtcaagactggacaacaactcgttgaagttaaaccacagggtgtgaacaaaggtcttgtggcagagaggcttctaacaacgatgcaagaaaaagggaaacttttggatttcattctctgcgtcggtgatgatcggtctgatgaggatatgtttgaggtgataatgagtgctaaagatggtccagctttgtctcctgtggctgagatattcgcttgcaccgttggacaaaagccaagcaaagcaaaatactatttagacgatactgcggagataatcagaatgctggacggtctagccgctaccaacacaactatctctgatcaaactgattcaaccgccactgttccaactaaagatctgttttaaggatttgtgaacgaaagttttagtgggtttgttgttgtgatttgtgaatgctttttcaaatataatggattaaggtaatcaaat

SEQ ID NO: 38304 - protein, 862 aa, Arabidopsis thaliana
  peptide (1)..(862): Ceres Seq. ID no. 13580312
MVSRSYSNLLDLASGNFHSFSREKKRFPRVATVTGVLSELDDDNNSNSVCSDAPSSVTQDRIIIVGNQLPIKSHRNSAGKLSFSWDNDSLLLQLKDGMREDMEVVYIGCLKEQIDTVEQDDVSQRLLENFKCVPAYIPPELFTKYYHGFCKQHLWPLFHYMLPLTPDLGGRFDRSLWQAYLSVNKIFADKVMEVISPDDDFVWVHDYHLMVLPTFLRKRFNRVKLGFFLHSPFPSSEIYRTLPVRNELLRALLNADLIGFHTFDYARHFLSCCSRMLGLSYQSKRGTIGLEYYGRTVSIKILPVGIHISQLQSILNLPETQTKVAELRDQFLDQKVLLGVDDMDIFKGISLKLLAMEQLLTQHPEKRGRVVLVQIANPARGRGKDVQEVQSETEATVKRINEMFGRPGYQPVVLIDTPLQFFERIAYYVIAECCLVTAVRDGMNLIPYEYIICRQGNPKLNETIGLDPSAAKKSMLVVSEFIGCSPSLSGAIRVNPWNIDAVTEAMDYALIVSEAEKQMRHEKHHKYVSTHDVAYWARSFIQDLERACGDHVRKRCWGIGFGLGFRVVALDPSFKKLSIEHIVSAYKRTKNRAILLDYDGTMVQPGSIRTTPTRETIEILNNLSSDPKNIVYLVSGKDRRTLTEWFSSCDDLGLGAEHGYFIRPNDGTDWETSSLVSGFEWKQIAEPVMRLYTETTDGSTIETKETALVWNYQFADPDFGSCQAKELMEHLESVLTNDPVSVKTGQQLVEVKPQGVNKGLVAERLLTTMQEKGKLLDFILCVGDDRSDEDMFEVIMSAKDGPALSPVAEIFACTVGQKPSKAKYYLDDTAEIIRMLDGLAATNTTISDQTDSTATVPTKDLF

SEQ ID NO: 38305 - protein, 765 aa, Arabidopsis thaliana
  peptide (1)..(765): Ceres Seq. ID no. 13580313
MREDMEVVYIGCLKEQIDTVEQDDVSQRLLENFKCVPAYIPPELFTKYYHGFCKQHLWPLFHYMLPLTPDLGGRFDRSLWQAYLSVNKIFADKVMEVISPDDDFVWVHDYHLMVLPTFLRKRFNRVKLGFFLHSPFPSSEIYRTLPVRNELLRALLNADLIGFHTFDYARHFLSCCSRMLGLSYQSKRGTIGLEYYGRTVSIKILPVGIHISQLQSILNLPETQTKVAELRDQFLDQKVLLGVDDMDIFKGISLKLLAMEQLLTQHPEKRGRVVLVQIANPARGRGKDVQEVQSETEATVKRINEMFGRPGYQPVVLIDTPLQFFERIAYYVIAECCLVTAVRDGMNLIPYEYIICRQGNPKLNETIGLDPSAAKKSMLVVSEFIGCSPSLSGAIRVNPWNIDAVTEAMDYALIVSEAEKQMRHEKHHKYVSTHDVAYWARSFIQDLERACGDHVRKRCWGIGFGLGFRVVALDPSFKKLSIEHIVSAYKRTKNRAILLDYDGTMVQPGSIRTTPTRETIEILNNLSSDPKNIVYLVSGKDRRTLTEWFSSCDDLGLGAEHGYFIRPNDGTDWETSSLVSGFEWKQIAEPVMRLYTETTDGSTIETKETALVWNYQFADPDFGSCQAKELMEHLESVLTNDPVSVKTGQQLVEVKPQGVNKGLVAERLLTTMQEKGKLLDFILCVGDDRSDEDMFEVIMSAKDGPALSPVAEIFACTVGQKPSKAKYYLDDTAEIIRMLDGLAATNTTISDQTDSTATVPTKDLF

SEQ ID NO: 38306 - protein, 761 aa, Arabidopsis thaliana
  peptide (1)..(761): Ceres Seq. ID no. 13580314
MEVVYIGCLKEQIDTVEQDDVSQRLLENFKCVPAYIPPELFTKYYHGFCKQHLWPLFHYMLPLTPDLGGRFDRSLWQAYLSVNKIFADKVMEVISPDDDFVWVHDYHLMVLPTFLRKRFNRVKLGFFLHSPFPSSEIYRTLPVRNELLRALLNADLIGFHTFDYARHFLSCCSRMLGLSYQSKRGTIGLEYYGRTVSIKILPVGIHISQLQSILNLPETQTKVAELRDQFLDQKVLLGVDDMDIFKGISLKLLAMEQLLTQHPEKRGRVVLVQIANPARGRGKDVQEVQSETEATVKRINEMFGRPGYQPVVLIDTPLQFFERIAYYVIAECCLVTAVRDGMNLIPYEYIICRQGNPKLNETIGLDPSAAKKSMLVVSEFIGCSPSLSGAIRVNPWNIDAVTEAMDYALIVSEAEKQMRHEKHHKYVSTHDVAYWARSFIQDLERACGDHVRKRCWGIGFGLGFRVVALDPSFKKLSIEHIVSAYKRTKNRAILLDYDGTMVQPGSIRTTPTRETIEILNNLSSDPKNIVYLVSGKDRRTLTEWFSSCDDLGLGAEHGYFIRPNDGTDWETSSLVSGFEWKQIAEPVMRLYTETTDGSTIETKETALVWNYQFADPDFGSCQAKELMEHLESVLTNDPVSVKTGQQLVEVKPQGVNKGLVAERLLTTMQEKGKLLDFILCVGDDRSDEDMFEVIMSAKDGPALSPVAEIFACTVGQKPSKAKYYLDDTAEIIRMLDGLAATNTTISDQTDSTATVPTKDLF

SEQ ID NO: 38307 - DNA, 764 bp, Arabidopsis thaliana
  misc_feature (1)..(764): Ceres Seq. ID no. 12325589
  misc_feature (1)..(764): Ortholog of  Ceres SEQ ID NO 13660598 as cited in SEQ ID NO 67591
aaaatttctcctatttccaaaatcttctatttctctctaaaaaaatgtcgaagaacgtttcgagaaactgcttaggatcaatggaagacatcaagaaagtattccaacgattcgacaaaaacaacgatgggaaaatctctatcgatgagcttaaagacgtgataggagctctctctccaaacgcttcacaagaagaaaccaaagcaatgatgaaagagtttgatcttgacggtaatggtttcattgatttggatgagtttgttgctttgtttcaaatcagtgatcaaagtagcaacaatagtgcgattagagatttgaaagaagcttttgatttgtatgatttggatcgtaatggaaggatctcggctaatgagttacactcggttatgaagaatcttggtgagaagtgttcgattcaagattgtcaaaggatgattaataaagttgattctgatggtgatggttgtgttgattttgaagagtttaagaagatgatgatgattaatggtagtgcttgatagaatcgatttagaatttggaaaagtgatatccttttttttgtttgtaaatattttgttttatgatttcgttaatctaatcttttttaggatttaggttaattaggagtttttaattttttaggttttatcgattaatctagaagaatctctatgttgcttctttaatggctctctgacctaatgttagggaatattgttgatgacctaattaatcgattaataatacaaaaaaccttttttttt

SEQ ID NO: 38308 - protein, 171 aa, Arabidopsis thaliana
  peptide (1)..(171): Ceres Seq. ID no. 12325590
NFSYFQNLLFLSKKMSKNVSRNCLGSMEDIKKVFQRFDKNNDGKISIDELKDVIGALSPNASQEETKAMMKEFDLDGNGFIDLDEFVALFQISDQSSNNSAIRDLKEAFDLYDLDRNGRISANELHSVMKNLGEKCSIQDCQRMINKVDSDGDGCVDFEEFKKMMMINGSA

SEQ ID NO: 38309 - protein, 157 aa, Arabidopsis thaliana
  peptide (1)..(157): Ceres Seq. ID no. 12325591
MSKNVSRNCLGSMEDIKKVFQRFDKNNDGKISIDELKDVIGALSPNASQEETKAMMKEFDLDGNGFIDLDEFVALFQISDQSSNNSAIRDLKEAFDLYDLDRNGRISANELHSVMKNLGEKCSIQDCQRMINKVDSDGDGCVDFEEFKKMMMINGSA

SEQ ID NO: 38310 - protein, 145 aa, Arabidopsis thaliana
  peptide (1)..(145): Ceres Seq. ID no. 12325592
MEDIKKVFQRFDKNNDGKISIDELKDVIGALSPNASQEETKAMMKEFDLDGNGFIDLDEFVALFQISDQSSNNSAIRDLKEAFDLYDLDRNGRISANELHSVMKNLGEKCSIQDCQRMINKVDSDGDGCVDFEEFKKMMMINGSA

SEQ ID NO: 38311 - DNA, 581 bp, Arabidopsis thaliana
  misc_feature (1)..(581): Ceres Seq. ID no. 12423084
  misc_feature (1)..(581): Ortholog of  Ceres SEQ ID NO 13594922 as cited in SEQ ID NO 55751
actgcgatcggagaagaaaaagctcgagagacgccatggaaatttcccaagctcgttcaagcttcgtttgtcttcttcttctgttactctccatgtttttcgttccctgcgtcttttccaaatctcctcgtcctatctccgatgtggagatcaggcagaagaagagcgaatgctacggtgatatagagagtgggttatggggttggcaatgcaaatcttctgcaatagcgaaagagaattgtgcgctgcgatgcctttctccggtttgctatcaactcatttatgagagtgatccgcttgaagaaggtgaaaaagatttgattaggagccaagagtacaagtattgtatgtacaagtcatcactcggggaaagcttagagggtgttcgaggcatcttttgatggtatcaaataagactttctcagtgaagacatttgccaaaatctgagctaagctcttgaatttctgatcagtagtattctgctctgtcgcgtttgaagccatgtaaggcttcttttattataaacctcaatttttgggttaatggttgtttatatgaaacgtttacgtttatgattggc

SEQ ID NO: 38312 - protein, 132 aa, Arabidopsis thaliana
  peptide (1)..(132): Ceres Seq. ID no. 12423085
CDRRRKSSRDAMEISQARSSFVCLLLLLLSMFFVPCVFSKSPRPISDVEIRQKKSECYGDIESGLWGWQCKSSAIAKENCALRCLSPVCYQLIYESDPLEEGEKDLIRSQEYKYCMYKSSLGESLEGVRGIF

SEQ ID NO: 38313 - protein, 121 aa, Arabidopsis thaliana
  peptide (1)..(121): Ceres Seq. ID no. 12423086
MEISQARSSFVCLLLLLLSMFFVPCVFSKSPRPISDVEIRQKKSECYGDIESGLWGWQCKSSAIAKENCALRCLSPVCYQLIYESDPLEEGEKDLIRSQEYKYCMYKSSLGESLEGVRGIF

SEQ ID NO: 38314 - protein, 102 aa, Arabidopsis thaliana
  peptide (1)..(102): Ceres Seq. ID no. 12423087
MFFVPCVFSKSPRPISDVEIRQKKSECYGDIESGLWGWQCKSSAIAKENCALRCLSPVCYQLIYESDPLEEGEKDLIRSQEYKYCMYKSSLGESLEGVRGIF

SEQ ID NO: 38315 - DNA, 2365 bp, Arabidopsis thaliana
  misc_feature (1)..(2365): Ceres Seq. ID no. 13489353
  misc_feature (1)..(2365): Ortholog of  Ceres SEQ ID NO 14304565 as cited in SEQ ID NO 53297
  misc_feature (1)..(2365): Ortholog of  Ceres SEQ ID NO 15172170 as cited in SEQ ID NO 58957
  misc_feature (1)..(2365): Ortholog of  Ceres SEQ ID NO 13654989 as cited in SEQ ID NO 63117
  misc_feature (1)..(2365): Ortholog of  Ceres SEQ ID NO 13584744 as cited in SEQ ID NO 69137
agagagaaaaaaaaaatgaagagaaggagactttttttctctgttctactctctatcctaactctgttcatcaatggtcctttgataacgacagctcaatctccaccttcttcttcaacttcatgtaaccgtatctgtggaggaatcgagattccttttccttttggaatcggacgaagagactgttttctcaacgactggtacgaggttgtctgtaacagcaccacctccggtaaatccttagctccgttcctctataagatcaacagagaattagttagcatcactcttcgaagcagcatcgacagttcctacggagttgttcacattaaatctccggtgacttcctccggctgttctcaacgacccgtaaagcctcttcctttaaacctcaccggtaaaggaagtccctttttcatcaccgactcgaatcgtctcgtctcagttggttgtgacaacagagcattgattacagacatcgaatctcagatcacaggatgcgaatcgagctgcgacggagataagagtcgtttagacaagatctgcggtggttacacatgttgtcaggcgaagattccggcggatagaccgcaagtaatcggcgttgaccttgaaagctccggtggtaacacaactcaaggaggaaactgtaaagttgctttcttgacgaatgagacttactctccggcgaatgttacagagccggaacaattttatactaatgggtttacggtgattgagcttggttggtactttgatacatcagattctcggttaacgaatcctgtgggttgtgtgaatttgacggaaacagggatttacacgagcgcaccgagctgtgtttgtgagtatggtaacttctctggctttggttacagtaactgttactgcaatcagattggttacagagggaatccttatcttcctggtggatgcattgacattgacgaatgtgaggaaggaaaaggactaagcagctgtggagaactaacttgtgtgaatgttcctggatcgtggaggtgcgagctgaatggagtagggaagatcaagcctctgtttccaggtcttgttctaggttttccactgttgttcttggtacttgggatatggggattgatcaagttcgttaagaagagaaggaagattatccgaaagagaatgttctttaaacgtaatggaggcttgttgttgaaacaacagttaactacaagaggaggtaatgtgcagtcatcgaagatattcagttcgaaagagctggagaaagcgacggataacttcaatatgaacagggttcttgggcaaggaggtcaaggcactgtctacaaaggaatgttggtagatgggcgaattgttgctgtgaaaagatctaaagttttagatgaagataaagttgaggagtttatcaatgaagttggtgttctctcgcagattaaccatagaaatattgtcaaactcatggggtgttgtctcgagacagaggttcctatcttggtttatgaacatattccaaatggagacctattcaagcggcttcaccatgattctgatgattacactatgacttgggatgtgcgattgcgcatctctgttgagattgcaggagcacttgcttacttgcactcggctgcatcaactccggtctatcatagagatgtcaagaccacaaacatacttttggatgagaagtatagagccaaggtatcggatttcgggacctcgagatccataaacgtagatcaaactcacttgactactctagttgcaggtacttttggatacttggatccagagtactttcaaactagccagtttacggataaaagtgatgtttatagttttggggtcgtcttggttgagctcataactggagaaaagccgttttctgtaatgcggcccgaagaaaacagaggacttgtgtctcatttcaatgaggctatgaaacagaacagagttcttgatattgttgattctcggatcaaagaaggttgcacgttggaacaagtgttggctgtggcgaaacttgccagaaggtgtttaagtctaaaagggaagaaacgaccaaatatgagagaggtttcagttgagcttgagaggatccgttcatcacccgaagatttggagttacatattgaagaggaggacgaagaagaatgcgccatggaaatcaacatggatgattcttggagcgtcgacatgactgctccagcttccctctttgatttatcgcccaagttagacgttgaaccgctggttcctcaacgaacatggtgatgatggaacctaaaacactgcaaatgtacaaagtgctgtgataacaaattctctcaatgttccattctttattaataaaaaatttgatgatgtc

SEQ ID NO: 38316 - protein, 756 aa, Arabidopsis thaliana
  peptide (1)..(756): Ceres Seq. ID no. 13489354
REKKKMKRRRLFFSVLLSILTLFINGPLITTAQSPPSSSTSCNRICGGIEIPFPFGIGRRDCFLNDWYEVVCNSTTSGKSLAPFLYKINRELVSITLRSSIDSSYGVVHIKSPVTSSGCSQRPVKPLPLNLTGKGSPFFITDSNRLVSVGCDNRALITDIESQITGCESSCDGDKSRLDKICGGYTCCQAKIPADRPQVIGVDLESSGGNTTQGGNCKVAFLTNETYSPANVTEPEQFYTNGFTVIELGWYFDTSDSRLTNPVGCVNLTETGIYTSAPSCVCEYGNFSGFGYSNCYCNQIGYRGNPYLPGGCIDIDECEEGKGLSSCGELTCVNVPGSWRCELNGVGKIKPLFPGLVLGFPLLFLVLGIWGLIKFVKKRRKIIRKRMFFKRNGGLLLKQQLTTRGGNVQSSKIFSSKELEKATDNFNMNRVLGQGGQGTVYKGMLVDGRIVAVKRSKVLDEDKVEEFINEVGVLSQINHRNIVKLMGCCLETEVPILVYEHIPNGDLFKRLHHDSDDYTMTWDVRLRISVEIAGALAYLHSAASTPVYHRDVKTTNILLDEKYRAKVSDFGTSRSINVDQTHLTTLVAGTFGYLDPEYFQTSQFTDKSDVYSFGVVLVELITGEKPFSVMRPEENRGLVSHFNEAMKQNRVLDIVDSRIKEGCTLEQVLAVAKLARRCLSLKGKKRPNMREVSVELERIRSSPEDLELHIEEEDEEECAMEINMDDSWSVDMTAPASLFDLSPKLDVEPLVPQRTW

SEQ ID NO: 38317 - protein, 751 aa, Arabidopsis thaliana
  peptide (1)..(751): Ceres Seq. ID no. 13489355
MKRRRLFFSVLLSILTLFINGPLITTAQSPPSSSTSCNRICGGIEIPFPFGIGRRDCFLNDWYEVVCNSTTSGKSLAPFLYKINRELVSITLRSSIDSSYGVVHIKSPVTSSGCSQRPVKPLPLNLTGKGSPFFITDSNRLVSVGCDNRALITDIESQITGCESSCDGDKSRLDKICGGYTCCQAKIPADRPQVIGVDLESSGGNTTQGGNCKVAFLTNETYSPANVTEPEQFYTNGFTVIELGWYFDTSDSRLTNPVGCVNLTETGIYTSAPSCVCEYGNFSGFGYSNCYCNQIGYRGNPYLPGGCIDIDECEEGKGLSSCGELTCVNVPGSWRCELNGVGKIKPLFPGLVLGFPLLFLVLGIWGLIKFVKKRRKIIRKRMFFKRNGGLLLKQQLTTRGGNVQSSKIFSSKELEKATDNFNMNRVLGQGGQGTVYKGMLVDGRIVAVKRSKVLDEDKVEEFINEVGVLSQINHRNIVKLMGCCLETEVPILVYEHIPNGDLFKRLHHDSDDYTMTWDVRLRISVEIAGALAYLHSAASTPVYHRDVKTTNILLDEKYRAKVSDFGTSRSINVDQTHLTTLVAGTFGYLDPEYFQTSQFTDKSDVYSFGVVLVELITGEKPFSVMRPEENRGLVSHFNEAMKQNRVLDIVDSRIKEGCTLEQVLAVAKLARRCLSLKGKKRPNMREVSVELERIRSSPEDLELHIEEEDEEECAMEINMDDSWSVDMTAPASLFDLSPKLDVEPLVPQRTW

SEQ ID NO: 38318 - DNA, 1966 bp, Arabidopsis thaliana
  misc_feature (1)..(1966): Ceres Seq. ID no. 13648305
  misc_feature (1)..(1966): Ortholog of  Ceres SEQ ID NO 14307940 as cited in SEQ ID NO 0
  misc_feature (1)..(1966): Ortholog of  Ceres SEQ ID NO 14308560 as cited in SEQ ID NO 0
ggaagtgaactccattgacgacgagtgaacgaaaggagggaagaaaaaagttaggttcgaaacgaaagtaaactagttaggtgaaaagcgaaacaacacccacagagcaatggcccctgctctcgccgttacacgagatctcaccgccgtcggatctccagagaatgctcctgcgaaaggacgtgcttcggtttacagtgaagttcaatcaagccgtattaacaacactcttcctttgccttctgttctcaaaggagctttcaaaatcgtcgaaggtcccgctagttccgccgccgggaatccagatgagatagcgaagttgtttccgggtctatatggccagccatcagtagcagtggttccagatcaggatgcaccttcgtcggcaccgaaattgaagattggtgttgttttgtctggaggtcaggcacctggtgggcacaatgttatttctggactgtttgattacctgcaagagcgtgcgaaaggtagcacattttatgggttcaagggtggtccagctggtatcatgaaatgcaaatatgttgagttgaatgctgaatatattcagccttacagaaaccagggtggttttgacatgatctgcagtggaagagacaagattgaaacacctgaccagtttaaacaagctgaagaaacagcaaagaagcttgatttggatgggttggtggttatcggtggagatgattccaacaccaatgcttgccttcttgctgaaaacttcaggagtaagaacttgaaaacccgagtcattgggtgccccaagaccattgatggtgatttgaaatgcaaagaggttcctactagttttgggtttgatacagcttgcaagatttactctgaaatgatcggaaacgtcatgattgatgcaaggtcgactggaaagtactatcattttgtaagacttatgggtcgtgctgcttcccacattacgcttgagtgtgctttacaaactcacccaaacataaccattattggagaagaggtttctgcccagaagcagactttgaagaatgtcacagactacatggtggatgttatctgcaaacgtgctgaacttggttacaactacggtgtcatactgattccagaaggtctgatcgactttattcctgaggtccaagagctcattgctgaactgaatgaaattctggcaaatgaggttgtcgatgaaaatggtttgtggaagaagaagctcaccgagcaatccctgaagctgtttgatcttctgcctgaagcaattcaggaacagctgatgcttgagagagacccacacggaaatgtccaggttgctaagattgagactgagaagatgcttattcaaatggttgaaactgaattggagaaaagaaagcaagctggtgcatacaagggacaattcatgggacagtcacatttcttcgggtatgaaggaagatgcggcttgcccacaaattttgatgccacatactgttatgcacttggttatggcgctggagtactcctcaacagtgggaagaccggactaatttcttcggttgggaacttggctgctcctgtggaagaatggactgtaggtgggactgctctcacagccttgatggatgtcgagaggagacacggtaagttcaagcctgtgatcaagaaagcaatggtggaacttgaaggtgcaccatttaagaaattcgcatcactgcgtgaagaatgggcattgaagaaccgatacatcagcccaggtccgatccaattcactggacctggttcagactctctcagccacactctacttcttgaactcggggctcaatagtctctcgactaaccaccattcctttgcttttctgccttccttggaatttcgcatcagtcttgttttatcttgaatattacgtgtccgtaacatttcgattaagttgattcctctcgtgtttcttcaacatataagataattataatattatttctt

SEQ ID NO: 38319 - protein, 566 aa, Arabidopsis thaliana
  peptide (1)..(566): Ceres Seq. ID no. 13648306
MAPALAVTRDLTAVGSPENAPAKGRASVYSEVQSSRINNTLPLPSVLKGAFKIVEGPASSAAGNPDEIAKLFPGLYGQPSVAVVPDQDAPSSAPKLKIGVVLSGGQAPGGHNVISGLFDYLQERAKGSTFYGFKGGPAGIMKCKYVELNAEYIQPYRNQGGFDMICSGRDKIETPDQFKQAEETAKKLDLDGLVVIGGDDSNTNACLLAENFRSKNLKTRVIGCPKTIDGDLKCKEVPTSFGFDTACKIYSEMIGNVMIDARSTGKYYHFVRLMGRAASHITLECALQTHPNITIIGEEVSAQKQTLKNVTDYMVDVICKRAELGYNYGVILIPEGLIDFIPEVQELIAELNEILANEVVDENGLWKKKLTEQSLKLFDLLPEAIQEQLMLERDPHGNVQVAKIETEKMLIQMVETELEKRKQAGAYKGQFMGQSHFFGYEGRCGLPTNFDATYCYALGYGAGVLLNSGKTGLISSVGNLAAPVEEWTVGGTALTALMDVERRHGKFKPVIKKAMVELEGAPFKKFASLREEWALKNRYISPGPIQFTGPGSDSLSHTLLLELGAQ

SEQ ID NO: 38320 - protein, 426 aa, Arabidopsis thaliana
  peptide (1)..(426): Ceres Seq. ID no. 13648307
MKCKYVELNAEYIQPYRNQGGFDMICSGRDKIETPDQFKQAEETAKKLDLDGLVVIGGDDSNTNACLLAENFRSKNLKTRVIGCPKTIDGDLKCKEVPTSFGFDTACKIYSEMIGNVMIDARSTGKYYHFVRLMGRAASHITLECALQTHPNITIIGEEVSAQKQTLKNVTDYMVDVICKRAELGYNYGVILIPEGLIDFIPEVQELIAELNEILANEVVDENGLWKKKLTEQSLKLFDLLPEAIQEQLMLERDPHGNVQVAKIETEKMLIQMVETELEKRKQAGAYKGQFMGQSHFFGYEGRCGLPTNFDATYCYALGYGAGVLLNSGKTGLISSVGNLAAPVEEWTVGGTALTALMDVERRHGKFKPVIKKAMVELEGAPFKKFASLREEWALKNRYISPGPIQFTGPGSDSLSHTLLLELGAQ

SEQ ID NO: 38321 - protein, 403 aa, Arabidopsis thaliana
  peptide (1)..(403): Ceres Seq. ID no. 13648308
MICSGRDKIETPDQFKQAEETAKKLDLDGLVVIGGDDSNTNACLLAENFRSKNLKTRVIGCPKTIDGDLKCKEVPTSFGFDTACKIYSEMIGNVMIDARSTGKYYHFVRLMGRAASHITLECALQTHPNITIIGEEVSAQKQTLKNVTDYMVDVICKRAELGYNYGVILIPEGLIDFIPEVQELIAELNEILANEVVDENGLWKKKLTEQSLKLFDLLPEAIQEQLMLERDPHGNVQVAKIETEKMLIQMVETELEKRKQAGAYKGQFMGQSHFFGYEGRCGLPTNFDATYCYALGYGAGVLLNSGKTGLISSVGNLAAPVEEWTVGGTALTALMDVERRHGKFKPVIKKAMVELEGAPFKKFASLREEWALKNRYISPGPIQFTGPGSDSLSHTLLLELGAQ

SEQ ID NO: 38322 - DNA, 1110 bp, Arabidopsis thaliana
  misc_feature (1)..(1110): Ceres Seq. ID no. 13488521
  misc_feature (1)..(1110): Ortholog of  Ceres SEQ ID NO 14303493 as cited in SEQ ID NO 54484
  misc_feature (1)..(1110): Ortholog of  Ceres SEQ ID NO 14312258 as cited in SEQ ID NO 57251
acttcacttttgttctttgtcgcttcaattcaacgcttattcctaaattcgattttgcgttgtcaaattccttaaatttcgttacaaaggtttgatatttccgatgagatctccagcaaagacgatgccgtcgatgtcaccttcttcagtttccacggagaaatctccacctccgtcagatacttcaatggctatagtagctttcgataactccactactcacttctcttcttctccatcgccgccacattctcttgatcattccagtgaatcggagaaggaagatgcgaaaagtaaacccgagagtagaagaaacaagaatcctggaaaggttgaggaaactccatctccgattgtggtggttcataatcacaatcgctctgtgaaagaagtggttccgacgagaaagagtgcgagagttggttctgggagaagtagtggccaacgatctggagctgtttcggctattttgagaaggtctaggagagaagaggtggtaaagttttcagctttagggtttcggttgagtgaggttgtgttggctttgatatctttctcaattatggctgctgataaaactaaaggttggagtggtgattctttcgatcgttacaaggagtacaggttttgcctgtctgtgaacgtggttgcttttgtatattctagttttcaagcatgtgacttagcgtaccatcttgtcaaagagaagcatttgatcagccaccaccttcgacctctgtttgagttcattatagatcaggtacttgcatatctgcttatgtctgcctcaacagcagcagtcactcgcgttgatgattgggtttcaaactggggaaaagacgagttcacagagatggcaagtgcctcgattgctatgtccttcctggccttccttgcctttgctttcagttccctcatttcaggctataacctatttaaccaaggctctctctgatcctcccacctttttgtataggtccacactccttgtgtgatgtataataaaaatgatcaatatatcttagcattgtaattattatactatttttgtagcctatataaaggtttccaaaaactatgaggttaataagagaggcatatcctgttgtc

SEQ ID NO: 38323 - protein, 283 aa, Arabidopsis thaliana
  peptide (1)..(283): Ceres Seq. ID no. 13488522
MRSPAKTMPSMSPSSVSTEKSPPPSDTSMAIVAFDNSTTHFSSSPSPPHSLDHSSESEKEDAKSKPESRRNKNPGKVEETPSPIVVVHNHNRSVKEVVPTRKSARVGSGRSSGQRSGAVSAILRRSRREEVVKFSALGFRLSEVVLALISFSIMAADKTKGWSGDSFDRYKEYRFCLSVNVVAFVYSSFQACDLAYHLVKEKHLISHHLRPLFEFIIDQVLAYLLMSASTAAVTRVDDWVSNWGKDEFTEMASASIAMSFLAFLAFAFSSLISGYNLFNQGSL

SEQ ID NO: 38324 - protein, 276 aa, Arabidopsis thaliana
  peptide (1)..(276): Ceres Seq. ID no. 13488523
MPSMSPSSVSTEKSPPPSDTSMAIVAFDNSTTHFSSSPSPPHSLDHSSESEKEDAKSKPESRRNKNPGKVEETPSPIVVVHNHNRSVKEVVPTRKSARVGSGRSSGQRSGAVSAILRRSRREEVVKFSALGFRLSEVVLALISFSIMAADKTKGWSGDSFDRYKEYRFCLSVNVVAFVYSSFQACDLAYHLVKEKHLISHHLRPLFEFIIDQVLAYLLMSASTAAVTRVDDWVSNWGKDEFTEMASASIAMSFLAFLAFAFSSLISGYNLFNQGSL

SEQ ID NO: 38325 - protein, 273 aa, Arabidopsis thaliana
  peptide (1)..(273): Ceres Seq. ID no. 13488524
MSPSSVSTEKSPPPSDTSMAIVAFDNSTTHFSSSPSPPHSLDHSSESEKEDAKSKPESRRNKNPGKVEETPSPIVVVHNHNRSVKEVVPTRKSARVGSGRSSGQRSGAVSAILRRSRREEVVKFSALGFRLSEVVLALISFSIMAADKTKGWSGDSFDRYKEYRFCLSVNVVAFVYSSFQACDLAYHLVKEKHLISHHLRPLFEFIIDQVLAYLLMSASTAAVTRVDDWVSNWGKDEFTEMASASIAMSFLAFLAFAFSSLISGYNLFNQGSL

SEQ ID NO: 38326 - DNA, 1329 bp, Arabidopsis thaliana
  misc_feature (1)..(1329): Ceres Seq. ID no. 13619167
  misc_feature (1)..(1329): Ortholog of  Ceres SEQ ID NO 13586135 as cited in SEQ ID NO 1210
  misc_feature (1)..(1329): Ortholog of  Ceres SEQ ID NO 13654329 as cited in SEQ ID NO 68717
atggctgatagttgttgtatcagacttcacttattagcctctgttttcttgctcttattttcatccttcaacttgcagggtattgcagcggaaaatctttccaagcagaaactgacctcactgattcttcagaatgagattgtaaaggaagtcaatgagaatccaaacgctggttggaaagctgctttcaatgatcggtttgcaaatgccaccgttgcagagtttaagcgactcctcggtgttatacaaacaccaaagacggcatacttaggtgtacctattgtaagacatgatttatcgttgaagcttcctaaagaatttgatgctagaaccgcttggtcacattgcaccagtattcgaaggatcttagtgggttatatattgaacaatgtgttactctggtcgacgataactttatggttttggtttcttttgggtcattgtggttcttgctgggcatttggtgctgttgaatcactgtccgacaggttctgcatcaaatataacttgaatgtttccttatctgccaatgatgtcatagcatgttgtggattactttgcggttttggttgtaatggtggtttcccaatgggtgcatggttgtactttaagtaccacggtgtagtaacccaagagtgtgatccatactttgacaatactggttgctctcacccgggatgtgaacccacttaccctacaccaaaatgtgagaggaaatgtgtaagcagaaaccagctatggggtgaatcaaaacactatggtgtcggcgcatacagaatcaatcctgaccctcaagacattatggctgaggtttacaagaatggacctgtcgaggttgcttttaccgtttacgaggactttgcacattacaaatcaggagtatacaagtacataacgggtactaagattggaggtcatgcagttaagctcattggctggggaacttctgatgacggcgaagattattggttgcttgcaaatcaatggaaccgaagctggggtgatgatggttacttcaagatcaggagaggaacgaacgaatgtggcattgaacagagtgttgtagctggtttaccttcagagaagaacgtatttaaaggtattaccacttcagatgatcttctggtttcctcagtctaaacaagacgatgtgtccctacttctgtaatatatcatttgcaactgtgttgtaagtttaatataccattgaaagaatcaccttcaatcaaaacaaaagtatgtatagcttctgttaatattcaattttacatgttaccatgcaagaggactgttacagtgtttatttggttttggtaaattatagccacc

SEQ ID NO: 38327 - protein, 379 aa, Arabidopsis thaliana
  peptide (1)..(379): Ceres Seq. ID no. 13619168
MADSCCIRLHLLASVFLLLFSSFNLQGIAAENLSKQKLTSLILQNEIVKEVNENPNAGWKAAFNDRFANATVAEFKRLLGVIQTPKTAYLGVPIVRHDLSLKLPKEFDARTAWSHCTSIRRILVGYILNNVLLWSTITLWFWFLLGHCGSCWAFGAVESLSDRFCIKYNLNVSLSANDVIACCGLLCGFGCNGGFPMGAWLYFKYHGVVTQECDPYFDNTGCSHPGCEPTYPTPKCERKCVSRNQLWGESKHYGVGAYRINPDPQDIMAEVYKNGPVEVAFTVYEDFAHYKSGVYKYITGTKIGGHAVKLIGWGTSDDGEDYWLLANQWNRSWGDDGYFKIRRGTNECGIEQSVVAGLPSEKNVFKGITTSDDLLVSSV

SEQ ID NO: 38328 - DNA, 1349 bp, Arabidopsis thaliana
  misc_feature (1)..(1349): Ceres Seq. ID no. 13592504
  misc_feature (1)..(1349): Ortholog of  Ceres SEQ ID NO 14304678 as cited in SEQ ID NO 53747
ggacggagcttcacatcgccgagagcttcgtcacgagatccatggcggccatttctcctctcttccttctcttcctcattcccattatcccactatcgcttctcgctatcttagccctaattgtacgtcctcgtcccattaagatccctatcaagtcccgtcacgtcttcatcaccggtggatctagcggcatcggtcttgctctcgcccaccgcgccgcttccgagggcgctcgtgtctcaatcctcgcccgatccggatcaaagctcgaggaggctaagaaatcgatccagctcgccactggtgtcgaagtcgccacattctctgcagacgttcgcgattacgatgcagtctcgaaggcgatagatgaatcgggaccgatcgatgtgttgattgttaaccaaggtgtgtttacggcgcaggagctggtgaaacatagtcctgaagatgtcaaattcacgattgacgtaaatctttttgggagcttcaatgtgattaaagccgctttgcctgccatgaaagcaaggaaagatcgtggacctgcttccatcagtctcgtctcctctcaagctggtcaggttggtgtctatggttatgctgcatattcagcaagcaagtttggtcttcagggtttagcgcaagcattgcaacaggaagttatatctgatgatattcatgtcactcttatttttcctcctgacactaatacacccggctttgaagaagaacagaagagcagacctgaagtcactgccataatagctgcatcctctggttcaatggaaacagaagaagtagcaaaaaaggctatggatggcataaaagcaggaaacttcaccgtctcatgcaactttgagggattcttactgtctctcgcgacaaccggcatgtcccctcaaagatcattttggcttgcttttcttgaagtttataaccgcagggcctataagattaatcgctctcttctttcaatgggattggtataaagccattgaaaaatggagcaaaaccaaaaccaaatgacagcccgacaatgtatcttgaagtgcttttggcagaagcttaaacattgatgggtattctcaaaccttcttctcagtccggtaccacgccagctagtcgactataccaattcagaatatcgacattgctgatagttttgtagaaactcgtcaagattcatgtttccggtctttgaacaagctctgttttttcttttttttatagagaaatcaaagaactcatttgaatgtattttttacttggtcaagaagtgaatgtttttcacaagatgaaatgtaaatgatgtatttgaaagaagtaaaaacttcaaaaccaaaatttgagtg

SEQ ID NO: 38329 - protein, 327 aa, Arabidopsis thaliana
  peptide (1)..(327): Ceres Seq. ID no. 13592505
TELHIAESFVTRSMAAISPLFLLFLIPIIPLSLLAILALIVRPRPIKIPIKSRHVFITGGSSGIGLALAHRAASEGARVSILARSGSKLEEAKKSIQLATGVEVATFSADVRDYDAVSKAIDESGPIDVLIVNQGVFTAQELVKHSPEDVKFTIDVNLFGSFNVIKAALPAMKARKDRGPASISLVSSQAGQVGVYGYAAYSASKFGLQGLAQALQQEVISDDIHVTLIFPPDTNTPGFEEEQKSRPEVTAIIAASSGSMETEEVAKKAMDGIKAGNFTVSCNFEGFLLSLATTGMSPQRSFWLAFLEVYNRRAYKINRSLLSMGLV

SEQ ID NO: 38330 - protein, 314 aa, Arabidopsis thaliana
  peptide (1)..(314): Ceres Seq. ID no. 13592506
MAAISPLFLLFLIPIIPLSLLAILALIVRPRPIKIPIKSRHVFITGGSSGIGLALAHRAASEGARVSILARSGSKLEEAKKSIQLATGVEVATFSADVRDYDAVSKAIDESGPIDVLIVNQGVFTAQELVKHSPEDVKFTIDVNLFGSFNVIKAALPAMKARKDRGPASISLVSSQAGQVGVYGYAAYSASKFGLQGLAQALQQEVISDDIHVTLIFPPDTNTPGFEEEQKSRPEVTAIIAASSGSMETEEVAKKAMDGIKAGNFTVSCNFEGFLLSLATTGMSPQRSFWLAFLEVYNRRAYKINRSLLSMGLV

SEQ ID NO: 38331 - DNA, 610 bp, Arabidopsis thaliana
  misc_feature (1)..(610): Ceres Seq. ID no. 12326739
  misc_feature (1)..(610): Ortholog of  Ceres SEQ ID NO 15178847 as cited in SEQ ID NO 1145
  misc_feature (1)..(610): Ortholog of  Ceres SEQ ID NO 14311253 as cited in SEQ ID NO 56483
  misc_feature (1)..(610): Ortholog of  Ceres SEQ ID NO 13597435 as cited in SEQ ID NO 64073
  misc_feature (1)..(610): Ortholog of  Ceres SEQ ID NO 13656209 as cited in SEQ ID NO 64393
aaccgactcttctaatctctgcgatcgtacatcagaaacctctatctcatcgccgaggaaaacagatcttacaatggctattaacaccatcacgaacgaagaagatgatgcatcaaacaactttggatgcaatatctgtcttgaattggcaagagaaccgatcgtgactctatgtggtcatttgttctgttggccttgtctctacaagtggctccattaccattctaaatcaaatcattgtcctgtttgtaaagctttggttaaggaagatactttggttcctttgtatggaatgggtaagccatcttctgatccgagatcgaaactcaatagtggtgttactgtccctaatcgaccagctgcgactaggactgaaacagctcgacctcgtcttgaacaaagacatcatgggtctagtttctttggtgggcattcaagttttgctgccatgccaactggtttacggttttcaaacttcttgttgtaatggaaagtatcttttgatgaatctgagtctgtttttttgacaatgtttttgaaactattattatacattgtctacgatttttgttattttgacaattaatgtttagagctacatttacattcc

SEQ ID NO: 38332 - protein, 161 aa, Arabidopsis thaliana
  peptide (1)..(161): Ceres Seq. ID no. 12326740
TDSSNLCDRTSETSISSPRKTDLTMAINTITNEEDDASNNFGCNICLELAREPIVTLCGHLFCWPCLYKWLHYHSKSNHCPVCKALVKEDTLVPLYGMGKPSSDPRSKLNSGVTVPNRPAATRTETARPRLEQRHHGSSFFGGHSSFAAMPTGLRFSNFLL

SEQ ID NO: 38333 - protein, 137 aa, Arabidopsis thaliana
  peptide (1)..(137): Ceres Seq. ID no. 12326741
MAINTITNEEDDASNNFGCNICLELAREPIVTLCGHLFCWPCLYKWLHYHSKSNHCPVCKALVKEDTLVPLYGMGKPSSDPRSKLNSGVTVPNRPAATRTETARPRLEQRHHGSSFFGGHSSFAAMPTGLRFSNFLL

SEQ ID NO: 38334 - DNA, 1669 bp, Arabidopsis thaliana
  misc_feature (1)..(1669): Ceres Seq. ID no. 13488602
  misc_feature (1)..(1669): Ortholog of  Ceres SEQ ID NO 14315196 as cited in SEQ ID NO 57698
cgatctcataacttagccattctaaaacccattcaccgtctctgtttcgttcgccgtgattcatagtcgtctcgtctcaccgtcaccatcaccgtcttcttcttccattgacaggatcttgtttagattctgcaatggctttcaggcaaactttatctataaggtccaggcttttcgctcgtcgtaaccaaccagtttatcatattatccctcgtgagagtgatcatgaaagggattcattctgtcaagaaacatctcagagaagttaccatagctttcttcaccaaagatccgttaacaattctgatttctccaaagtttctggaggaagcttacatttgcctcttgctcccacgtctggttttgctttctatcgttatatgtcaagtgcacctggtgttggttcagagaagattggtgtgatgtctgacattgcagaagtcataaccgactcaacattgcaagatgtgccagctcaggctgctgctgctgtcagtgaagttacacttgcagctgctgactctttcttccctatcgcggcccttcagcagtgcattgatatggtgcatacattcacaggctttgagtggtgggcatccattgttgtagcaaccattttgatccgatcatcaacagttcctctcttgatcaaacaaatgaaagacacaaccaagttagcgctgatgaggccacggttggagtccatccgggaggaaatgcaaaacaagggaatggactcggttacgatggcagaaggtcaaaaaaagatgaagaatttgtttaaagaatatggtgtcactccattcaccccaatgaaagggatgtttattcagggaccgctgttcatctgctttttccttgctattcgaaatatggcagagaaggtaccttcattccaaacaggaggtgcattatggtttaccgatctaacaactcccgacagcttatacatcttgccggttataacaggattgacattcttgataaccgttgagtgtaatgcacaagaaggcatggaagggaatccgatggctggcactgtaaaaactgtttgtcgggtttttgctctcctcacagtcccgatgacaatgagttttccacaggccatattttgttactggatcacatccaacctgttctctctcatgtatggacttgtgataaagcgtcctcaagtgaagaagatgttacgcatacctgatctgcctccacctcctccaggtcaacaaccttcatttgacctgttttcagctctcaagaaaatgaaagccatgacacaggaccatacacagaaccagatagaaccaccttcgccagtaaacccgaggctttcctcaacatcgctgagtcctgttagtaagaggctcaaggctttggagagccaagtaaagggaaggaagaagaatagcagcaagaagaagtgatttaaaacggtgcatactatttttgttaagagggccaaacgaaaaaaataataaagcttttgagtcgaaagtgaacacagaattttctcactgatgaaactactctgtgagctaaaaagctggaggcagctattgtaagtttgttttgaccaattatagaatagaagattgtttttatagaaacattttggataacatatacttttttatcttgttaagtaacagaacttgaacaacattggatc

SEQ ID NO: 38335 - protein, 429 aa, Arabidopsis thaliana
  peptide (1)..(429): Ceres Seq. ID no. 13488603
MAFRQTLSIRSRLFARRNQPVYHIIPRESDHERDSFCQETSQRSYHSFLHQRSVNNSDFSKVSGGSLHLPLAPTSGFAFYRYMSSAPGVGSEKIGVMSDIAEVITDSTLQDVPAQAAAAVSEVTLAAADSFFPIAALQQCIDMVHTFTGFEWWASIVVATILIRSSTVPLLIKQMKDTTKLALMRPRLESIREEMQNKGMDSVTMAEGQKKMKNLFKEYGVTPFTPMKGMFIQGPLFICFFLAIRNMAEKVPSFQTGGALWFTDLTTPDSLYILPVITGLTFLITVECNAQEGMEGNPMAGTVKTVCRVFALLTVPMTMSFPQAIFCYWITSNLFSLMYGLVIKRPQVKKMLRIPDLPPPPPGQQPSFDLFSALKKMKAMTQDHTQNQIEPPSPVNPRLSSTSLSPVSKRLKALESQVKGRKKNSSKKK

SEQ ID NO: 38336 - protein, 347 aa, Arabidopsis thaliana
  peptide (1)..(347): Ceres Seq. ID no. 13488604
MSSAPGVGSEKIGVMSDIAEVITDSTLQDVPAQAAAAVSEVTLAAADSFFPIAALQQCIDMVHTFTGFEWWASIVVATILIRSSTVPLLIKQMKDTTKLALMRPRLESIREEMQNKGMDSVTMAEGQKKMKNLFKEYGVTPFTPMKGMFIQGPLFICFFLAIRNMAEKVPSFQTGGALWFTDLTTPDSLYILPVITGLTFLITVECNAQEGMEGNPMAGTVKTVCRVFALLTVPMTMSFPQAIFCYWITSNLFSLMYGLVIKRPQVKKMLRIPDLPPPPPGQQPSFDLFSALKKMKAMTQDHTQNQIEPPSPVNPRLSSTSLSPVSKRLKALESQVKGRKKNSSKKK

SEQ ID NO: 38337 - protein, 333 aa, Arabidopsis thaliana
  peptide (1)..(333): Ceres Seq. ID no. 13488605
MSDIAEVITDSTLQDVPAQAAAAVSEVTLAAADSFFPIAALQQCIDMVHTFTGFEWWASIVVATILIRSSTVPLLIKQMKDTTKLALMRPRLESIREEMQNKGMDSVTMAEGQKKMKNLFKEYGVTPFTPMKGMFIQGPLFICFFLAIRNMAEKVPSFQTGGALWFTDLTTPDSLYILPVITGLTFLITVECNAQEGMEGNPMAGTVKTVCRVFALLTVPMTMSFPQAIFCYWITSNLFSLMYGLVIKRPQVKKMLRIPDLPPPPPGQQPSFDLFSALKKMKAMTQDHTQNQIEPPSPVNPRLSSTSLSPVSKRLKALESQVKGRKKNSSKKK

SEQ ID NO: 38338 - DNA, 1540 bp, Arabidopsis thaliana
  misc_feature (1)..(1540): Ceres Seq. ID no. 13574941
  misc_feature (1)..(1540): Ortholog of  Ceres SEQ ID NO 15179924 as cited in SEQ ID NO 57437
  misc_feature (1)..(1540): Ortholog of  Ceres SEQ ID NO 15171286 as cited in SEQ ID NO 58206
  misc_feature (1)..(1540): Ortholog of  Ceres SEQ ID NO 14302451 as cited in SEQ ID NO 66180
cttttcctttgcctaattcccctaagtcatcgtctcttgaacggttcctgccattaatgtcgaactcttcctaaaccctttttgttcacatttccttctctttctcttcctccgtctctctctgaaaaaccctaattgactcgttgcgattgaaatggatccttgtccattcatccgtcttacaatcgggaacctagctttgaaagttccgttagcggcgaagacaacgagctccgtcgtgcatccgtcgtcttctccttgtttttgtaaaatcaaactcaaaaacttcccgccgcaaaccgccgcaatcccgtacattcctttggagacgactcagtttccggagatccaaaccctagccgccacgtttcatctcagcagctccgatattcaacgcttagcttccagatctatatttacttctaagccttgtcttaaaattttgatctacactggaagagccggcgctgcttgcggcgtacactccggtcgtcttctggcgaaagtctccgtaccgttggatctatctggtacgcaatcgaaaccgtgcgtcttccacaacggatggatatcagtcggaaaaggagctggaaaatcgtcgtcgtctgctcagtttcacctgaatgtgaaggcggagcctgatcctagattcgtttttcagtttgacggcgagcctgaatgtagtcctcaagtcgttcagattcaaggcaatatccggcaaccagttttcacatgcaaattcagttgccggcacaccggtgatcgtactcagagatcaagatcattgccgactgagacaagtgtttcacggagctggctaaactcgttcgggagtgagagagaacgtcctgggaaagagcgtaaaggatggtccataacagtccatgacttgtccggttcaccagtggccatggcgtcaatcgtcactccattcgtggcatctcctggaaccgatcgtgtgagccggtcaaaccctgggtcatggcttatactgcgtcccggagactgtacctggagaccgtggggaagacttgaagcatggcgggaacgcggtggagccactgatggtctaggttacagattcgaactcatcccagacggatcaagcggtgcaggaatcgtgcttgcggaatcaaccataagttctcacagaggtgggaaattctcaatcgagttgggatcgtcgccttcttcatcgtcgccaacaagtgtggtgaaccgatcgagaagccgtagaggtgggagtagtggaagcggtggaggagcatcgccggcgaatagtccgagaggagggagcggagattacggttacggattgtggccgtggaacgtgtacaaagggtttgtgatgtcagcaagtgtggaaggtgaagggaaatgtagtaagccttgtgtagaggtgagtgtgcagcacgttagctgtatggaagatgcggctgcttacgtggcgctttctgcagccattgatcttagtatggatgcttgcaggctgtttaatcaacggatgaggaaagagctttgccatgagtcactgagctga

SEQ ID NO: 38339 - protein, 461 aa, Arabidopsis thaliana
  peptide (1)..(461): Ceres Seq. ID no. 13574942
MDPCPFIRLTIGNLALKVPLAAKTTSSVVHPSSSPCFCKIKLKNFPPQTAAIPYIPLETTQFPEIQTLAATFHLSSSDIQRLASRSIFTSKPCLKILIYTGRAGAACGVHSGRLLAKVSVPLDLSGTQSKPCVFHNGWISVGKGAGKSSSSAQFHLNVKAEPDPRFVFQFDGEPECSPQVVQIQGNIRQPVFTCKFSCRHTGDRTQRSRSLPTETSVSRSWLNSFGSERERPGKERKGWSITVHDLSGSPVAMASIVTPFVASPGTDRVSRSNPGSWLILRPGDCTWRPWGRLEAWRERGGATDGLGYRFELIPDGSSGAGIVLAESTISSHRGGKFSIELGSSPSSSSPTSVVNRSRSRRGGSSGSGGGASPANSPRGGSGDYGYGLWPWNVYKGFVMSASVEGEGKCSKPCVEVSVQHVSCMEDAAAYVALSAAIDLSMDACRLFNQRMRKELCHESLS

SEQ ID NO: 38340 - DNA, 1523 bp, Arabidopsis thaliana
  misc_feature (1)..(1523): Ceres Seq. ID no. 12488230
  misc_feature (1)..(1523): Ortholog of  Ceres SEQ ID NO 13598553 as cited in SEQ ID NO 65093
ctcttcttcctctaattgcttttctccgtcactgagtaccttgcctctcgagctcccaatcttaagtagaggattgagcttaaggcaagatggtaagaaacttaaatatttattttgaatatttgatcaattatctatctttatgaattattgatcaagaaacaaaatttaaagaacatcggggacttgaaaaagtaatggaaatttcacaaaaccgaaaagcaaacggttaattcggttttacaaagaccaaacagaaaattcaataattcggtttggttcggtttaattacacctaacaaaaaagttggtatattcgtttttatttttccgccattcttgtcgatcttcttcagtcgtaaaaccgccgcgtctctgctgaccctcctcttctcatttcatcgacgggagaaaatctcataccatctgagatttccaacagtgaaattaagatgtcaacaggaatatccactgatctccatgtccattttggagctttgaatttctcaaaaacctacaaatctggtttaagaaatcgaacggtgtctttttcgagagtcgggtatgctcagaacaggaaattgagctgcagcgtttccaacacagagaatgtagctcctaaggatgatgaaagaggaaaggatagacctttggttaagatgtgtggcatcacatcagccagagatgcagctatggcagttgaggctggtgccgatttgattgggatgattatttggccacattcaaaacgatccatttctctttctgtcgcaaaggatatctctaaagtggccagggaaggtggggccaaacctgttggtgtttttgttgaagatgatgagaacacgatactgagagcagctgattactctgaccttgagcttgtgcagcttcatggtaatggttcgcgtgctgctttctcgaggttagtacgcaagaggagagtcatatatgtccttaatgcaaatcaggatggaaagctcttgaatgaagttcctgaagaggattgtcatcttgctgattggattcttgtggatagtgcaacgggtgggagtggacacggatttaactgggctcaattcaagttgccttccgtcagaagcagaaatgggtggctcttagctgggggaatcaatccaacaaatgtttcagaagctctttctatccttcaacctgatggaattgatgttagtagcggtatttgcggtacagatggtatccagaaggataagtctaagataagctcctttataactgcagttcgctctgtacactactaatggcaagcaatataaaccacggtaatttatcttgtaactatagttttgagcatcaacctattgtttccaatctatgtcattaagttttgaattgtaactggttgataataataataatgccctttcttttcatcagtagtagatttaaattaaaagcgttgggttgtcaccgtaataatgtcgttgggctctcaagaacaagatccttgtatgaaatgtattctactgatcatatattattcc

SEQ ID NO: 38341 - protein, 275 aa, Arabidopsis thaliana
  peptide (1)..(275): Ceres Seq. ID no. 12488231
MSTGISTDLHVHFGALNFSKTYKSGLRNRTVSFSRVGYAQNRKLSCSVSNTENVAPKDDERGKDRPLVKMCGITSARDAAMAVEAGADLIGMIIWPHSKRSISLSVAKDISKVAREGGAKPVGVFVEDDENTILRAADYSDLELVQLHGNGSRAAFSRLVRKRRVIYVLNANQDGKLLNEVPEEDCHLADWILVDSATGGSGHGFNWAQFKLPSVRSRNGWLLAGGINPTNVSEALSILQPDGIDVSSGICGTDGIQKDKSKISSFITAVRSVHY

SEQ ID NO: 38342 - protein, 206 aa, Arabidopsis thaliana
  peptide (1)..(206): Ceres Seq. ID no. 12488232
MCGITSARDAAMAVEAGADLIGMIIWPHSKRSISLSVAKDISKVAREGGAKPVGVFVEDDENTILRAADYSDLELVQLHGNGSRAAFSRLVRKRRVIYVLNANQDGKLLNEVPEEDCHLADWILVDSATGGSGHGFNWAQFKLPSVRSRNGWLLAGGINPTNVSEALSILQPDGIDVSSGICGTDGIQKDKSKISSFITAVRSVHY

SEQ ID NO: 38343 - protein, 195 aa, Arabidopsis thaliana
  peptide (1)..(195): Ceres Seq. ID no. 12488233
MAVEAGADLIGMIIWPHSKRSISLSVAKDISKVAREGGAKPVGVFVEDDENTILRAADYSDLELVQLHGNGSRAAFSRLVRKRRVIYVLNANQDGKLLNEVPEEDCHLADWILVDSATGGSGHGFNWAQFKLPSVRSRNGWLLAGGINPTNVSEALSILQPDGIDVSSGICGTDGIQKDKSKISSFITAVRSVHY

SEQ ID NO: 38344 - DNA, 910 bp, Arabidopsis thaliana
  misc_feature (1)..(910): Ceres Seq. ID no. 13488348
  misc_feature (1)..(910): Ortholog of  Ceres SEQ ID NO 14301502 as cited in SEQ ID NO 61205
aacagtcaattggcggcgaagatgacgactcagtcgcagttcttagtgaacctctcttacggaggcctcgcctcccaaagtaatctcagagcgaataatcgtgtttcaccttcttcttgtcaaattacacgaacaaatcgctcatgggcattaccagtttcctttaaagttgagaaatttcaactccaacgaggaaggaggagaagaggatcaccatgttttggggagagcgaagggttggtcaaaaatgggattggtgatgctgatgggattataattgttgatcacggttctcgtcgccgtgaatccaatcttatgcttgaggagtttgtgaaaatgttcaaagaaaaaactggttacccaattgtagagcctgctcatatggaattggctgagccatctataaaagatgcattcagtttgtgtgtacaacaaggggcgaaacgtgtagttgtgagcccgttttttctatttcctggaagacattggcatacggacattccctcgttgacggctgatgctgcaaaggagttctctggcatctcatacctcataactgcacctctcggcccccataatctcctcctggacgttgtaaatgacagaatccaacattgcttgagccatgttgaaggtgatgctgacgagtgtcttgtttgtgctggaacaaataagtgcaagctctacaatagttcttaggtgtacatgtaagaacgtttttgtatatctgctcatcttctctaaccttcggatgcgggaaaaaaaggaggcatagtatattgttcatactcatcatttagtacgcgtcctatgtttcaacaagggagttttgagatttatgttcttttcttcttattgcagaccaatttgaaagactacgataatataataaaagctgtctgttaaatgc

SEQ ID NO: 38345 - protein, 232 aa, Arabidopsis thaliana
  peptide (1)..(232): Ceres Seq. ID no. 13488349
NSQLAAKMTTQSQFLVNLSYGGLASQSNLRANNRVSPSSCQITRTNRSWALPVSFKVEKFQLQRGRRRRGSPCFGESEGLVKNGIGDADGIIIVDHGSRRRESNLMLEEFVKMFKEKTGYPIVEPAHMELAEPSIKDAFSLCVQQGAKRVVVSPFFLFPGRHWHTDIPSLTADAAKEFSGISYLITAPLGPHNLLLDVVNDRIQHCLSHVEGDADECLVCAGTNKCKLYNSS

SEQ ID NO: 38346 - protein, 225 aa, Arabidopsis thaliana
  peptide (1)..(225): Ceres Seq. ID no. 13488350
MTTQSQFLVNLSYGGLASQSNLRANNRVSPSSCQITRTNRSWALPVSFKVEKFQLQRGRRRRGSPCFGESEGLVKNGIGDADGIIIVDHGSRRRESNLMLEEFVKMFKEKTGYPIVEPAHMELAEPSIKDAFSLCVQQGAKRVVVSPFFLFPGRHWHTDIPSLTADAAKEFSGISYLITAPLGPHNLLLDVVNDRIQHCLSHVEGDADECLVCAGTNKCKLYNSS

SEQ ID NO: 38347 - protein, 127 aa, Arabidopsis thaliana
  peptide (1)..(127): Ceres Seq. ID no. 13488351
MLEEFVKMFKEKTGYPIVEPAHMELAEPSIKDAFSLCVQQGAKRVVVSPFFLFPGRHWHTDIPSLTADAAKEFSGISYLITAPLGPHNLLLDVVNDRIQHCLSHVEGDADECLVCAGTNKCKLYNSS

SEQ ID NO: 38348 - DNA, 1007 bp, Arabidopsis thaliana; identical to SEQ ID NO: 20890
  misc_feature (1)..(1007): Ceres Seq. ID no. 12325471
  misc_feature (1)..(1007): Ortholog of  Ceres SEQ ID NO 13583434 as cited in SEQ ID NO 62329

SEQ ID NO: 38349 - protein, 228 aa, Arabidopsis thaliana; identical to SEQ ID NO: 20891
  peptide (1)..(228): Ceres Seq. ID no. 12325472

SEQ ID NO: 38350 - protein, 154 aa, Arabidopsis thaliana; identical to SEQ ID NO: 20892
  peptide (1)..(154): Ceres Seq. ID no. 12325473

SEQ ID NO: 38351 - DNA, 1306 bp, Arabidopsis thaliana
  misc_feature (1)..(1306): Ceres Seq. ID no. 12348661
  misc_feature (1)..(1306): Ortholog of  Ceres SEQ ID NO 14310037 as cited in SEQ ID NO 20603
aactgatcgtataatcattctcacggagacgagtgaccaaaacaaggtctcccgcttcttgcgaagattaaacgaatccatttagattttagaaaccacacaaaaaaatatgggtcggctcaagttcgcatgtccggttcttgagatcaatttaatctcagctcaagacttagcccctgtctcaagaaacatgaaaacgtattccgtcgcttggatcaacaccgatcctatgagaaaactcaccacgcgtgttgatcaatccaacagagctaaccctatatggaacgagaagttcgtgtttcgcgttaatgacaagattctcgatgttgacgcatcagcgattgtgattgagatatacgcagcggcttgggctaaagatgctcttgttggtactgtgaatgttcttctcagcgatctttttgctccttggtctggttttggtgatggtaacgacggtggtggtgggaataacaacatgaggcttgtgactcttcagattcgtcgtccttcagggaggctacaagggtttttacgtctcggtattgcacttcttgacggtggtcaacggagtatgcctttatctattgaggttttcgatggaagtcgaaaaggagagaggaatagtgttaaaagagatcaagaggcttcaagaatgatgcatcgccgtacgaatagcgatcaaacggatttaaccacgtctacgaatgattacggtgtgaaaacaggggttgttactggcaatggaggaggaggtggtggtggtggcggtattgttgttggtgcggatagtatggttaatggttcgctttgtagctctgatattggaccatcagcgtctgtggttgcggctgcgattgcgcaagggctttacaatagacagaaaacagcggttaaagcggctaacaaagaggacgcaagttcgatacttgaagggaaaacagagggaattgagtatagagttgaacggtggagagcagagaaaaatggcacggttggagcgggtggagcggctggatcaagcgatgattctagcgggaaaggaggagcgggaaggagaagaaggaggaggagaagaaaggagaaacaacaagggaggagaaacggtggaggagagggtaagaaagggttgttttcatgttttggaaacgtgtttggatgtgagatttcgataacatgtggcggtggaagcggcggagaaggagacagcacaaagaagagatataataacaataaagtagtaaatcttagtgctgtagacgaaacgtttagtcattctgcgacttgaaataagagaaagtgtttactt

SEQ ID NO: 38352 - protein, 391 aa, Arabidopsis thaliana
  peptide (1)..(391): Ceres Seq. ID no. 12348662
MGRLKFACPVLEINLISAQDLAPVSRNMKTYSVAWINTDPMRKLTTRVDQSNRANPIWNEKFVFRVNDKILDVDASAIVIEIYAAAWAKDALVGTVNVLLSDLFAPWSGFGDGNDGGGGNNNMRLVTLQIRRPSGRLQGFLRLGIALLDGGQRSMPLSIEVFDGSRKGERNSVKRDQEASRMMHRRTNSDQTDLTTSTNDYGVKTGVVTGNGGGGGGGGGIVVGADSMVNGSLCSSDIGPSASVVAAAIAQGLYNRQKTAVKAANKEDASSILEGKTEGIEYRVERWRAEKNGTVGAGGAAGSSDDSSGKGGAGRRRRRRRRKEKQQGRRNGGGEGKKGLFSCFGNVFGCEISITCGGGSGGEGDSTKKRYNNNKVVNLSAVDETFSHSAT

SEQ ID NO: 38353 - protein, 364 aa, Arabidopsis thaliana
  peptide (1)..(364): Ceres Seq. ID no. 12348663
MKTYSVAWINTDPMRKLTTRVDQSNRANPIWNEKFVFRVNDKILDVDASAIVIEIYAAAWAKDALVGTVNVLLSDLFAPWSGFGDGNDGGGGNNNMRLVTLQIRRPSGRLQGFLRLGIALLDGGQRSMPLSIEVFDGSRKGERNSVKRDQEASRMMHRRTNSDQTDLTTSTNDYGVKTGVVTGNGGGGGGGGGIVVGADSMVNGSLCSSDIGPSASVVAAAIAQGLYNRQKTAVKAANKEDASSILEGKTEGIEYRVERWRAEKNGTVGAGGAAGSSDDSSGKGGAGRRRRRRRRKEKQQGRRNGGGEGKKGLFSCFGNVFGCEISITCGGGSGGEGDSTKKRYNNNKVVNLSAVDETFSHSAT

SEQ ID NO: 38354 - protein, 351 aa, Arabidopsis thaliana
  peptide (1)..(351): Ceres Seq. ID no. 12348664
MRKLTTRVDQSNRANPIWNEKFVFRVNDKILDVDASAIVIEIYAAAWAKDALVGTVNVLLSDLFAPWSGFGDGNDGGGGNNNMRLVTLQIRRPSGRLQGFLRLGIALLDGGQRSMPLSIEVFDGSRKGERNSVKRDQEASRMMHRRTNSDQTDLTTSTNDYGVKTGVVTGNGGGGGGGGGIVVGADSMVNGSLCSSDIGPSASVVAAAIAQGLYNRQKTAVKAANKEDASSILEGKTEGIEYRVERWRAEKNGTVGAGGAAGSSDDSSGKGGAGRRRRRRRRKEKQQGRRNGGGEGKKGLFSCFGNVFGCEISITCGGGSGGEGDSTKKRYNNNKVVNLSAVDETFSHSAT

SEQ ID NO: 38355 - DNA, 1768 bp, Arabidopsis thaliana
  misc_feature (1)..(1768): Ceres Seq. ID no. 13489028
  misc_feature (1)..(1768): Ortholog of  Ceres SEQ ID NO 13654989 as cited in SEQ ID NO 63117
  misc_feature (1)..(1768): Ortholog of  Ceres SEQ ID NO 13584744 as cited in SEQ ID NO 69137
atcttaatctgctttctcgacaaagaaaagcagagaaagagagacttgttatactaaactcaatctctggcttttagttttgttgtctctctccttcagtttccaggaaaaaatctctttctcattaagctgttatatagatctgtgttcatactcttcttccacaatctaacccaaaaaaaaataactctttatttctctctacaaatttcatttgttccattttctcaattttagaacttaagaaacccaaaaagcaaatttttagtacatttttaggtttaattaaagtaattaatttttgtgtgtttccatcaaaattccacttgttttctacagaaattttcaatctttttattattgtatctctctttaagacatgaactgtctgttcttgttcaaatcaaagaaacccagaaagcaacagaaagacaacaacaagaacaaaagaaaaggtaaagagttgttacaaaactcagctccagaactgacgaatcggagtgaaacgtcttcgtttaatctccagacaccaagatcgttgccttctccaagaagtatcaaagatttgtatacagagagagaacaaaatcttagggttttttcttacgaagaactcagtaaagccacttatgtgtttagcagaaagcttgtgatcggtgaaggtggatttggtattgtttataaaggaaagattctcagcaatggagattcttctgatcctccacttgtcgttgccatcaagaaactcaatcgacaaggtttacagggtcacaagcaatggctagcagaggttcagtttcttggagtagtgaatcatccgaacgttgtgaagctcataggttattgctcggaagacggcgagaccgggatcgagaggcttttggtttatgagtacatgtcgaatcgaagtttagaagaccatctcttccctcgtcgatcacacacattaccgtggaaaaaaagactcgagatcatgcttggtgctgctgaaggattgacttatttacatgatcttaaggtgatatatagagatttcaaatcctctaatgtgcttttagacgatcaattctgtccaaaattatcggactttgggcttgccagagaaggacctgatggcgacaatactcatgtcactaccgcaagagttggaacacacggctatgcggctccggaatacgtgcaaacaggtcatcttcggttaaagagcgacgtctatagcttcggtgttgtgctctacgagatcataaccggacgcagaaccattgagaggaacaagccagtggctgaacgaaggctattggattgggtcaaagagtatcctgctgatagtcaacgtttcagcatgatcgttgaccctcggttacgcaacaattatccagctgctggagctaggagtttggctaaattggctgatctttgcctgaaaaagaacgataaagagcgacctacgatggaaattgtagtggaaagattgaaaaagattatcgaagaatcggatagtgaagattatccgatggctacgactacgaccaaggaaagtagtcaggtaaggaggagacaagttgcaaaacctgagaaacaaagtttgagaggggttagtgtcagaggatgattttgagtttagaagtttttttgcaagtttatatattataaataagtttatgcaatttgttggtttattgtgagattagtagagaaaatgtatcttattgtgtgttttgtaaataaaattcaatacggtgaatgagaatcattgagatcaagtttt

SEQ ID NO: 38356 - protein, 410 aa, Arabidopsis thaliana
  peptide (1)..(410): Ceres Seq. ID no. 13489029
MNCLFLFKSKKPRKQQKDNNKNKRKGKELLQNSAPELTNRSETSSFNLQTPRSLPSPRSIKDLYTEREQNLRVFSYEELSKATYVFSRKLVIGEGGFGIVYKGKILSNGDSSDPPLVVAIKKLNRQGLQGHKQWLAEVQFLGVVNHPNVVKLIGYCSEDGETGIERLLVYEYMSNRSLEDHLFPRRSHTLPWKKRLEIMLGAAEGLTYLHDLKVIYRDFKSSNVLLDDQFCPKLSDFGLAREGPDGDNTHVTTARVGTHGYAAPEYVQTGHLRLKSDVYSFGVVLYEIITGRRTIERNKPVAERRLLDWVKEYPADSQRFSMIVDPRLRNNYPAAGARSLAKLADLCLKKNDKERPTMEIVVERLKKIIEESDSEDYPMATTTTKESSQVRRRQVAKPEKQSLRGVSVRG

SEQ ID NO: 38357 - protein, 238 aa, Arabidopsis thaliana
  peptide (1)..(238): Ceres Seq. ID no. 13489030
MSNRSLEDHLFPRRSHTLPWKKRLEIMLGAAEGLTYLHDLKVIYRDFKSSNVLLDDQFCPKLSDFGLAREGPDGDNTHVTTARVGTHGYAAPEYVQTGHLRLKSDVYSFGVVLYEIITGRRTIERNKPVAERRLLDWVKEYPADSQRFSMIVDPRLRNNYPAAGARSLAKLADLCLKKNDKERPTMEIVVERLKKIIEESDSEDYPMATTTTKESSQVRRRQVAKPEKQSLRGVSVRG

SEQ ID NO: 38358 - protein, 212 aa, Arabidopsis thaliana
  peptide (1)..(212): Ceres Seq. ID no. 13489031
MLGAAEGLTYLHDLKVIYRDFKSSNVLLDDQFCPKLSDFGLAREGPDGDNTHVTTARVGTHGYAAPEYVQTGHLRLKSDVYSFGVVLYEIITGRRTIERNKPVAERRLLDWVKEYPADSQRFSMIVDPRLRNNYPAAGARSLAKLADLCLKKNDKERPTMEIVVERLKKIIEESDSEDYPMATTTTKESSQVRRRQVAKPEKQSLRGVSVRG

SEQ ID NO: 38359 - DNA, 1307 bp, Arabidopsis thaliana; identical to SEQ ID NO: 35946
  misc_feature (1)..(1307): Ceres Seq. ID no. 12482093
  misc_feature (1)..(1307): Ortholog of  Ceres SEQ ID NO 14314272 as cited in SEQ ID NO 57461
  misc_feature (1)..(1307): Ortholog of  Ceres SEQ ID NO 15170602 as cited in SEQ ID NO 57485

SEQ ID NO: 38360 - protein, 255 aa, Arabidopsis thaliana; identical to SEQ ID NO: 35947
  peptide (1)..(255): Ceres Seq. ID no. 12482094

SEQ ID NO: 38361 - protein, 190 aa, Arabidopsis thaliana; identical to SEQ ID NO: 35948
  peptide (1)..(190): Ceres Seq. ID no. 12482095

SEQ ID NO: 38362 - protein, 184 aa, Arabidopsis thaliana; identical to SEQ ID NO: 35949
  peptide (1)..(184): Ceres Seq. ID no. 12482096

SEQ ID NO: 38363 - DNA, 1302 bp, Arabidopsis thaliana
  misc_feature (1)..(1302): Ceres Seq. ID no. 12327836
  misc_feature (1)..(1302): Ortholog of  Ceres SEQ ID NO 13639663 as cited in SEQ ID NO 57850
agagtttttcccattgaagaagatcgagtgaaattcgaagagcgaatcaaagaggaagaagaagaaggaggaggtatagcaatgggggtcgattattacaaggttcttcaggtggatcggaatgcgaaagacgacgacttgaagaaagcttatcgcaaactcgccatgaagtggcatccagacaagaaccctaacaacaaaaaagacgccgaagccaaattcaagcagatctctgaagcttacgatgttttgagtgatcctcaaaagagagccatctatgatcaatatggagaagaaggtctaacaagccaggctccgcctcccggagcaggcggcgggttttcggatggaggggcttcgttccggttcaacggtagaagcgcagatgatatcttctcggagttctttggcttcacaagaccatttggtgactcacgtggtgcaggtccctctaatgggttccggttcgaagaagacgttttctcgtcgaatgttgttccaccgaggaaagctgcccctattgagagacaacttccttgtagtttggaagatctctacaaaggagtcagtaagaagatgaagatctctcgggacgtcctcgattcaagcgggagacccacaacagttgaggagatcttgacgatagaaatcaagccagggtggaagaaagggacgaagattaccttcccggagaaaggaaacgagcagcgaggaatcataccatcagatcttgtattcatagttgatgagaagccgcatgctgtgttcaagcgagacgggaatgaccttgtgatgacacagaagatccctcttgtggaagccctcacgggatacactgctcaggtctcgactctggatggaagatcagtaacggttccaattaacaacgtgatcagcccttcttatgaagaggtggtgaaaggtgaaggcatgccaatccctaaagacccatcaaagaaagggaacttgagaatcaagttcactgttaagttcccatcgaggctaacaacagagcagaaatctggaatcaaacgaatgttttcgtcttcctagtctgtctctttctttcttactgctacgtttgattttcggttatgactaggtatgtggtagtgtgggtctttgtttgggagattgtgaggttcttgaacgatgtcgcattgagatttctcaacgtccttcagagcttttggtttgggtttggggttttacattttagcatattttttttttttcgttcttttaaatttgttattagattggggaaaaaataaaaaactaaataaagattctttgcttctc

SEQ ID NO: 38364 - protein, 350 aa, Arabidopsis thaliana
  peptide (1)..(350): Ceres Seq. ID no. 12327837
RVFPIEEDRVKFEERIKEEEEEGGGIAMGVDYYKVLQVDRNAKDDDLKKAYRKLAMKWHPDKNPNNKKDAEAKFKQISEAYDVLSDPQKRAIYDQYGEEGLTSQAPPPGAGGGFSDGGASFRFNGRSADDIFSEFFGFTRPFGDSRGAGPSNGFRFEEDVFSSNVVPPRKAAPIERQLPCSLEDLYKGVSKKMKISRDVLDSSGRPTTVEEILTIEIKPGWKKGTKITFPEKGNEQRGIIPSDLVFIVDEKPHAVFKRDGNDLVMTQKIPLVEALTGYTAQVSTLDGRSVTVPINNVISPSYEEVVKGEGMPIPKDPSKKGNLRIKFTVKFPSRLTTEQKSGIKRMFSSS

SEQ ID NO: 38365 - protein, 323 aa, Arabidopsis thaliana
  peptide (1)..(323): Ceres Seq. ID no. 12327838
MGVDYYKVLQVDRNAKDDDLKKAYRKLAMKWHPDKNPNNKKDAEAKFKQISEAYDVLSDPQKRAIYDQYGEEGLTSQAPPPGAGGGFSDGGASFRFNGRSADDIFSEFFGFTRPFGDSRGAGPSNGFRFEEDVFSSNVVPPRKAAPIERQLPCSLEDLYKGVSKKMKISRDVLDSSGRPTTVEEILTIEIKPGWKKGTKITFPEKGNEQRGIIPSDLVFIVDEKPHAVFKRDGNDLVMTQKIPLVEALTGYTAQVSTLDGRSVTVPINNVISPSYEEVVKGEGMPIPKDPSKKGNLRIKFTVKFPSRLTTEQKSGIKRMFSSS

SEQ ID NO: 38366 - protein, 295 aa, Arabidopsis thaliana
  peptide (1)..(295): Ceres Seq. ID no. 12327839
MKWHPDKNPNNKKDAEAKFKQISEAYDVLSDPQKRAIYDQYGEEGLTSQAPPPGAGGGFSDGGASFRFNGRSADDIFSEFFGFTRPFGDSRGAGPSNGFRFEEDVFSSNVVPPRKAAPIERQLPCSLEDLYKGVSKKMKISRDVLDSSGRPTTVEEILTIEIKPGWKKGTKITFPEKGNEQRGIIPSDLVFIVDEKPHAVFKRDGNDLVMTQKIPLVEALTGYTAQVSTLDGRSVTVPINNVISPSYEEVVKGEGMPIPKDPSKKGNLRIKFTVKFPSRLTTEQKSGIKRMFSSS

SEQ ID NO: 38367 - DNA, 1188 bp, Arabidopsis thaliana
  misc_feature (1)..(1188): Ceres Seq. ID no. 12329150
  misc_feature (1)..(1188): Ortholog of  Ceres SEQ ID NO 14307065 as cited in SEQ ID NO 53918
aaatccagtttcgctcctccttgctctagctctgttatctgattcgtaaccattgatgaaatgcgagttctcgacgaaattgcagagtcaccatttctgatttcaccgctaaaccctaattcgacagccaatggatatagatgggtcgataagtgccatggattcttacataacacggttctcgttgcggcttctctcttcttcgtcgcttacttagcttacgaagcgaagaagagtctgtctaaactctcgaatcggagatcttatatcatgattgcttattatggttgtctttggcttgttagcttgctcaatcttgcttggtgctgtctccagggttgggaatgtactcctgggaaagaagttgtttggaatctgttaactttgttcacaacatctggaatgttgtttctggaagtaagcttggtggcttttctcttccaaggaaactatgcaagcggtgcagaagcattaactagaacgttcctaatctcgggttttattgttgctcttgatttgctttctcaaggcaatttttctctttggattggagtgccattgtttattgacaacaatgaaaatggaaaaacgttcaaatggggcttatggatcattcataagcttctactcactggcgtttatgggatggtgttcttgatgtacaactctaggtggagagaaaaattgcctgcaaggcctgcattctacaactacataatcatcatgttcgccttatacagcctttacctagttgcatctgcgtttaccgcaaacaacgcgcattttggtttctggttatatgggatcatgagtgtttgctaccacgcattataccttcctcttctttacataacgttcctcgcagactttttccaggaagaagatttgaacttggagaatgtatactactcagagatgaaggatgctggatttttcgactctgattgggaataggactaggataacaaacatcttcctcattttctcaatctgtaaatacacgttgggtaggatctcctagaagtcatggctgctttttccggctttggcgggttacattttagggtctagtcttttgtatgtctgtactttttcctcatgtttctttctcttttataaatccaaaatgtcttgtgaatctctttgttccttaagctgataatctaaaagaaagttttgtagtagtcc

SEQ ID NO: 38368 - protein, 297 aa, Arabidopsis thaliana
  peptide (1)..(297): Ceres Seq. ID no. 12329151
MRVLDEIAESPFLISPLNPNSTANGYRWVDKCHGFLHNTVLVAASLFFVAYLAYEAKKSLSKLSNRRSYIMIAYYGCLWLVSLLNLAWCCLQGWECTPGKEVVWNLLTLFTTSGMLFLEVSLVAFLFQGNYASGAEALTRTFLISGFIVALDLLSQGNFSLWIGVPLFIDNNENGKTFKWGLWIIHKLLLTGVYGMVFLMYNSRWREKLPARPAFYNYIIIMFALYSLYLVASAFTANNAHFGFWLYGIMSVCYHALYLPLLYITFLADFFQEEDLNLENVYYSEMKDAGFFDSDWE

SEQ ID NO: 38369 - protein, 227 aa, Arabidopsis thaliana
  peptide (1)..(227): Ceres Seq. ID no. 12329152
MIAYYGCLWLVSLLNLAWCCLQGWECTPGKEVVWNLLTLFTTSGMLFLEVSLVAFLFQGNYASGAEALTRTFLISGFIVALDLLSQGNFSLWIGVPLFIDNNENGKTFKWGLWIIHKLLLTGVYGMVFLMYNSRWREKLPARPAFYNYIIIMFALYSLYLVASAFTANNAHFGFWLYGIMSVCYHALYLPLLYITFLADFFQEEDLNLENVYYSEMKDAGFFDSDWE

SEQ ID NO: 38370 - protein, 183 aa, Arabidopsis thaliana
  peptide (1)..(183): Ceres Seq. ID no. 12329153
MLFLEVSLVAFLFQGNYASGAEALTRTFLISGFIVALDLLSQGNFSLWIGVPLFIDNNENGKTFKWGLWIIHKLLLTGVYGMVFLMYNSRWREKLPARPAFYNYIIIMFALYSLYLVASAFTANNAHFGFWLYGIMSVCYHALYLPLLYITFLADFFQEEDLNLENVYYSEMKDAGFFDSDWE

SEQ ID NO: 38371 - DNA, 1213 bp, Arabidopsis thaliana
  misc_feature (1)..(1213): Ceres Seq. ID no. 12560121
  misc_feature (1)..(1213): Ortholog of  Ceres SEQ ID NO 15172792 as cited in SEQ ID NO 52134
  misc_feature (1)..(1213): Ortholog of  Ceres SEQ ID NO 13502622 as cited in SEQ ID NO 56443
  misc_feature (1)..(1213): Ortholog of  Ceres SEQ ID NO 12624901 as cited in SEQ ID NO 62597
aataatgtgttgcaaaagaggcaaagtatacaacgtgaaagtggtaggtctaccagatcccataccctcattttaatggcggagattacaagggaaagagacaactccaattcaaagctctgatttttccctttcacaattctttagctagttttatacttttcttcttcctttcatttgggttaagagaagccatggataccgagtttctccgaaccctagatcgtcagattcttttgggtgtcttcgttgctttcgtcgccgttggtgctggtgctgcttattttcttacatcctccaagaaacgcagagtgtgtttggatccagagaatttcaaggagttcaagcttgttaagagacatcagcttagtcacaatgtggccaagttcgtttttgaactcccaacttctacttctgtgttgggtcttcccattagacaacacatcaagttgcaggggaaaggatggtcaaggagaggatgttattaagccatacaccccgactacggttagactctgacgttggacgtttcgaacttgtcattaagatgtatccgcaaggacggatgtctcatcatttcagggagatgcgtgttggagaccatcttgccgaaaagggaccaaagggtaggttcaagatcaaccaggcagtttagggcatttggaatgcttgctggaggttcaggcatcactcccatgttccaagtggccagagcaattctagaaaacccaacagacaagacaaaggtgcatctcatttacgccaacgtcatatacgacgacattctcttgaaggaagaattggagggtcttactaccaattaccntgaacaatttaaaatcttctatgttttgaaccagcctccggaagtatgggatggtggtgttggatttgtatcaaaggaaatgattcagactcattgccctgcacctgcatctgatattcagatcctaagatgcggaccaccgccaatgaacaaggccatggctgcaaaccttgaagctctgggatactctccggagatgcaattccagttctgatctgaatatcttcttttggttgctctgaaacggaactcataataatttagttacaatcccaactacgagagttgtgtcttaactgagtgagagttgtatttctgttgtgtgtttgttagcccacttgaaagtttccattgattggtttacgaattggttagacattttggttc

SEQ ID NO: 38372 - protein, 124 aa, Arabidopsis thaliana
  peptide (1)..(124): Ceres Seq. ID no. 12560122
  misc_feature (54)..(54): Xaa is any aa, unknown or other
MLAGGSGITPMFQVARAILENPTDKTKVHLIYANVIYDDILLKEELEGLTTNYXEQFKIFYVLNQPPEVWDGGVGFVSKEMIQTHCPAPASDIQILRCGPPPMNKAMAANLEALGYSPEMQFQF

SEQ ID NO: 38373 - protein, 114 aa, Arabidopsis thaliana
  peptide (1)..(114): Ceres Seq. ID no. 12560123
  misc_feature (44)..(44): Xaa is any aa, unknown or other
MFQVARAILENPTDKTKVHLIYANVIYDDILLKEELEGLTTNYXEQFKIFYVLNQPPEVWDGGVGFVSKEMIQTHCPAPASDIQILRCGPPPMNKAMAANLEALGYSPEMQFQF

SEQ ID NO: 38374 - protein, 97 aa, Arabidopsis thaliana
  peptide (1)..(97): Ceres Seq. ID no. 12560124
MDTEFLRTLDRQILLGVFVAFVAVGAGAAYFLTSSKKRRVCLDPENFKEFKLVKRHQLSHNVAKFVFELPTSTSVLGLPIRQHIKLQGKGWSRRGCY

SEQ ID NO: 38375 - DNA, 1280 bp, Arabidopsis thaliana; identical to SEQ ID NO: 37431
  misc_feature (1)..(1280): Ceres Seq. ID no. 12335829
  misc_feature (1)..(1280): Ortholog of  Ceres SEQ ID NO 14314434 as cited in SEQ ID NO 52401
  misc_feature (1)..(1280): Ortholog of  Ceres SEQ ID NO 14303939 as cited in SEQ ID NO 54286
  misc_feature (1)..(1280): Ortholog of  Ceres SEQ ID NO 14307760 as cited in SEQ ID NO 54741
  misc_feature (1)..(1280): Ortholog of  Ceres SEQ ID NO 15179003 as cited in SEQ ID NO 0
  misc_feature (1)..(1280): Ortholog of  Ceres SEQ ID NO 15179235 as cited in SEQ ID NO 0

SEQ ID NO: 38376 - protein, 252 aa, Arabidopsis thaliana; identical to SEQ ID NO: 37432
  peptide (1)..(252): Ceres Seq. ID no. 12335830

SEQ ID NO: 38377 - protein, 168 aa, Arabidopsis thaliana; identical to SEQ ID NO: 37433
  peptide (1)..(168): Ceres Seq. ID no. 12335831

SEQ ID NO: 38378 - protein, 127 aa, Arabidopsis thaliana; identical to SEQ ID NO: 37434
  peptide (1)..(127): Ceres Seq. ID no. 12335832

SEQ ID NO: 38379 - DNA, 1854 bp, Arabidopsis thaliana
  misc_feature (1)..(1854): Ceres Seq. ID no. 13653854
  misc_feature (1)..(1854): Ortholog of  Ceres SEQ ID NO 15178131 as cited in SEQ ID NO 52639
aaggaggggaaaatcagctttttggagaagaaaccaaagaaaacattcgaaaccctaaaatctccattagaattcgaaaatgacaaagaagagaaagctcgaaggagaagaatctaacgaagctgaagaaccgtcgcagaagctgaagcagacgccggaggaggagcagcagcttgtaattaaaaatcaggataatcaaggagacgttgaagaagttgaatacgaggaagtagaggaagagcaagaagaagaagtagaagatgatgacgatgaagatgatggtgatgagaatgaggatcagacggatgggaatcgtatagaggcggcggcgacgtctggatctggcgatcaagaagatgatgacgatgaaccaattcaggatctgttggaaccattttcaaaggagcaagttttgagtcttcttaaggaagcagcggagaagcatgttgatgtagccaatcgaattagggaagtagctgatgaggaccctgttcatcggaagatctttgtgcacggtcttggttgggatacgaaaacagagacgcttattgaagcttttaagcagtacggagagatcgaagattgcaaggctgtgtttgataagatctcagggaaatctaaaggttatggctttattctgtacaagtctcgttcaggtgctcgcaacgcactcaagcagcctcagaagaagattggtagtcgtatgacggcatgccaattagcttctaaaggacctgtctttggtggagctcctatcgctgctgcagctgtttcagcgcctgctcagcattcgaactcggagcatactcagaaaaagatttatgttagtaatgtcggagcagagcttgatccacagaagttgctgatgtttttctcaaagtttggagaaattgaagaaggtcctttgggtcttgataagtatactgggagacctaaaggtttctgtctctttgtttataagtcgtctgaaagcgccaagagggctttggaggagccacacaagacttttgaaggccatatcttgcattgccagaaagctatcgatggtcccaaaccgggcaagcagcagcagcatcaccataacccacacgcctataacaatcctcgttaccaaaggaatgataacaatggttatggtccgcctggaggtcatggacatctcatggctggtaacccagctgggatgggtggtccaacggcacaggtgataaacccggccattggacaggccttgacagctttattggcatctcagggagctggtttggcttttaatccggcaattggacaggctttgttgggttccttggggacagctgctggtgtaaacccagggaatggagttggaatgccaactggttacggtactcaagctatggcaccggggacaatgcctgggtacggtacacaacctgggttgcaaggcggttatcagactccgcaacctggtcaaggcggtacaagtagagggcaacatggtgtcgggccatacggtactccttacatgggtcactaaatgtatcatgtatccatccactcagatatcagaaatcagtgttttaatattggcctggtgattcttctcaagtttataaggagctgatgctaaatgaagtctttatgaaatgttactctttggtcactcctaaggccaaactcataaaaaaccttttaaggagttttagttttcatctacttgtttttcccaaactctctttatgaaattcctaaaaaaaactttgtactactattttcagtgtttatgtctctattttttcagttttctgaatatcccccttagactttcatttgtaaaactaaaaaagcgcaacnacgctccatgtgggtctttgc

SEQ ID NO: 38380 - protein, 478 aa, Arabidopsis thaliana
  peptide (1)..(478): Ceres Seq. ID no. 13653855
MTKKRKLEGEESNEAEEPSQKLKQTPEEEQQLVIKNQDNQGDVEEVEYEEVEEEQEEEVEDDDDEDDGDENEDQTDGNRIEAAATSGSGDQEDDDDEPIQDLLEPFSKEQVLSLLKEAAEKHVDVANRIREVADEDPVHRKIFVHGLGWDTKTETLIEAFKQYGEIEDCKAVFDKISGKSKGYGFILYKSRSGARNALKQPQKKIGSRMTACQLASKGPVFGGAPIAAAAVSAPAQHSNSEHTQKKIYVSNVGAELDPQKLLMFFSKFGEIEEGPLGLDKYTGRPKGFCLFVYKSSESAKRALEEPHKTFEGHILHCQKAIDGPKPGKQQQHHHNPHAYNNPRYQRNDNNGYGPPGGHGHLMAGNPAGMGGPTAQVINPAIGQALTALLASQGAGLAFNPAIGQALLGSLGTAAGVNPGNGVGMPTGYGTQAMAPGTMPGYGTQPGLQGGYQTPQPGQGGTSRGQHGVGPYGTPYMGH

SEQ ID NO: 38381 - protein, 270 aa, Arabidopsis thaliana
  peptide (1)..(270): Ceres Seq. ID no. 13653856
MTACQLASKGPVFGGAPIAAAAVSAPAQHSNSEHTQKKIYVSNVGAELDPQKLLMFFSKFGEIEEGPLGLDKYTGRPKGFCLFVYKSSESAKRALEEPHKTFEGHILHCQKAIDGPKPGKQQQHHHNPHAYNNPRYQRNDNNGYGPPGGHGHLMAGNPAGMGGPTAQVINPAIGQALTALLASQGAGLAFNPAIGQALLGSLGTAAGVNPGNGVGMPTGYGTQAMAPGTMPGYGTQPGLQGGYQTPQPGQGGTSRGQHGVGPYGTPYMGH

SEQ ID NO: 38382 - DNA, 1349 bp, Arabidopsis thaliana
  misc_feature (1)..(1349): Ceres Seq. ID no. 13488010
  misc_feature (1)..(1349): Ortholog of  Ceres SEQ ID NO 12563124 as cited in SEQ ID NO 57104
  misc_feature (1)..(1349): Ortholog of  Ceres SEQ ID NO 13598373 as cited in SEQ ID NO 62185
  misc_feature (1)..(1349): Ortholog of  Ceres SEQ ID NO 12584664 as cited in SEQ ID NO 62232
  misc_feature (1)..(1349): Ortholog of  Ceres SEQ ID NO 12617639 as cited in SEQ ID NO 65219
ttgtatgacataatgacgacgagacgaaggacaaaattgtcatttaaggaataaaagatattcttacaaagatattttttgctcgaaacgaggagaaaaaatcattagttatcgaaaatgctcacatgatgtgggcctaaccactaacccaattaaccacacatcttaatcagagtaagttgaaacaaatctttcagcaaaccctagaaaacatgtttaaccctagttattacgtcacacctgttctataaattaaggctgcgtcttatcacctcaaatcacataagtctctctcttacattttgaaaccctaatttctcaaaaaaaatgtctgaagttgagtaccggtgctttgtcggcggccttgcctgggccaccaatgatgaagatcttcaaaggacgttctcacagttcggcgacgttatcgattctaaggtctgttacacgagagatcggtctcccggatcgagccgattccgatgattctgatcctcgacggatctgattccgatctgtttctctgttacttgattcgattactgttactatgttctctctcgttctttgttactgttacttaatttgtcccatcggtacgttcatcttcctgcttctatgagctcggagatcgatcgatttttgctttattttcatcgctttgttttatattccttccacgattgtttttgctgatgtgtatgattttgtttgtttacagatcattaacgaccgcgagagtggaagatcaaggggattcggattcgtcaccttcaaggacgagaaagccatgagggatgcgattgaagagatgaacggtaaagagctcgatggacgtgtcatcaccgtgaacgaggctcagtcgagaggtagcggcggtggcggaggaggccgtggtggaagcggtggtggttaccgcagcggaggcggtggtggatactcaggaggcggtggcggcggatactcaggaggaggcggtggtggttacgagagacgtagcggaggttacggatctggtggaggcggtggtggccgaggatacggtggtggtggacgccgtgagggaggtggctacggaggcggtgatggtggaagttacggaggcggtggtggcggctggtaatcaaagatagagttgtttgcgtgctgctgctctgtttttggtttagatttggttttgtgtcaccacttctggtttggttatcgttcgtttggtttacttttttgatgaaacagtttcgtttaagtcttctttgtctggaacgaaatgttaattcgcgtgttgtttactaaatttataacgtttccttttaaccagattcgagattttccctcaaataatttatcttgtt

SEQ ID NO: 38383 - protein, 110 aa, Arabidopsis thaliana; identical to SEQ ID NO: 22060
  peptide (1)..(110): Ceres Seq. ID no. 13488011

SEQ ID NO: 38384 - protein, 103 aa, Arabidopsis thaliana; identical to SEQ ID NO: 22061
  peptide (1)..(103): Ceres Seq. ID no. 13488012

SEQ ID NO: 38385 - DNA, 767 bp, Arabidopsis thaliana; identical to SEQ ID NO: 38288
  misc_feature (1)..(767): Ceres Seq. ID no. 13497708
  misc_feature (1)..(767): Ortholog of  Ceres SEQ ID NO 13594647 as cited in SEQ ID NO 52208
  misc_feature (1)..(767): Ortholog of  Ceres SEQ ID NO 13637658 as cited in SEQ ID NO 53077
  misc_feature (1)..(767): Ortholog of  Ceres SEQ ID NO 13664275 as cited in SEQ ID NO 61120
  misc_feature (1)..(767): Ortholog of  Ceres SEQ ID NO 15174168 as cited in SEQ ID NO 61888
  misc_feature (1)..(767): Ortholog of  Ceres SEQ ID NO 12635311 as cited in SEQ ID NO 0
  misc_feature (1)..(767): Ortholog of  Ceres SEQ ID NO 13599510 as cited in SEQ ID NO 0
  misc_feature (1)..(767): Ortholog of  Ceres SEQ ID NO 13599622 as cited in SEQ ID NO 0
  misc_feature (1)..(767): Ortholog of  Ceres SEQ ID NO 13600020 as cited in SEQ ID NO 0

SEQ ID NO: 38386 - protein, 193 aa, Arabidopsis thaliana; identical to SEQ ID NO: 38289
  peptide (1)..(193): Ceres Seq. ID no. 13497709

SEQ ID NO: 38387 - protein, 186 aa, Arabidopsis thaliana; identical to SEQ ID NO: 38290
  peptide (1)..(186): Ceres Seq. ID no. 13497710

SEQ ID NO: 38388 - protein, 151 aa, Arabidopsis thaliana; identical to SEQ ID NO: 38291
  peptide (1)..(151): Ceres Seq. ID no. 13497711

SEQ ID NO: 38389 - DNA, 697 bp, Arabidopsis thaliana
  misc_feature (1)..(697): Ceres Seq. ID no. 12421143
  misc_feature (1)..(697): Ortholog of  Ceres SEQ ID NO 12612272 as cited in SEQ ID NO 55946
  misc_feature (1)..(697): Ortholog of  Ceres SEQ ID NO 15169960 as cited in SEQ ID NO 57591
agatcaaatcagcaggaaaatcaagaaccaaaagtctcccgaaaagcaacgaacaatgtctctcattccaagcatttttggaggacgcagatcaaacgtctttgatccgttctcgcaagacttatgggatccattcgaaggattcttcacgccatcttctgcgttggcaaacgcttcaaccgctcgtgatgtggcagcgtttacaaacgcaagagtggattggaaggaaacgccggaggcacatgtgttcaaagcggacttgccaggcctgaagaaggaagaagtcaaggttgaggttgaagacaagaacgttctgcagattagcggagagaggagcaaggagaacgaagagaagaacgataagtggcaccgtgtggagagagctagtgggaagtttatgagaaggtttaggttaccggagaatgcaaagatggaagaagtgaaggcaacaatggagaatggtgtgcttacggttgtggttccgaaagcgcctgagaagaagcctcaagtcaagtccatcgatatctccggggctaattgaatatgaagatgaagatgaaatatttggtgtgtcaaataaaaagcttgtgtgcttaagtttgtgtttttttcttggcttgttgtgttatgaatttgtggctttttctaatattaaatgaatgtaagatctcattataatgaataaacaaatgtttcc

SEQ ID NO: 38390 - protein, 179 aa, Arabidopsis thaliana
  peptide (1)..(179): Ceres Seq. ID no. 12421144
DQISRKIKNQKSPEKQRTMSLIPSIFGGRRSNVFDPFSQDLWDPFEGFFTPSSALANASTARDVAAFTNARVDWKETPEAHVFKADLPGLKKEEVKVEVEDKNVLQISGERSKENEEKNDKWHRVERASGKFMRRFRLPENAKMEEVKATMENGVLTVVVPKAPEKKPQVKSIDISGAN

SEQ ID NO: 38391 - protein, 161 aa, Arabidopsis thaliana
  peptide (1)..(161): Ceres Seq. ID no. 12421145
MSLIPSIFGGRRSNVFDPFSQDLWDPFEGFFTPSSALANASTARDVAAFTNARVDWKETPEAHVFKADLPGLKKEEVKVEVEDKNVLQISGERSKENEEKNDKWHRVERASGKFMRRFRLPENAKMEEVKATMENGVLTVVVPKAPEKKPQVKSIDISGAN

SEQ ID NO: 38392 - protein, 89 aa, Arabidopsis thaliana
  peptide (1)..(89): Ceres Seq. ID no. 12421146
IKSAGKSRTKSLPKSNEQCLSFQAFLEDADQTSLIRSRKTYGIHSKDSSRHLLRWQTLQPLVMWQRLQTQEWIGRKRRRHMCSKRTCQA

SEQ ID NO: 38393 - DNA, 678 bp, Arabidopsis thaliana
  misc_feature (1)..(678): Ceres Seq. ID no. 12326799
  misc_feature (1)..(678): Ortholog of  Ceres SEQ ID NO 12610648 as cited in SEQ ID NO 56246
gacgcagatcatcatcagattcttgtctctctctgttatctgagtgataagaagtattttcagtgcttgaggatctgcaaaagatatccatctgcggtttaacaatggttctattacagttggatccattcctcaatgaactcacgagcatgtttgagaaaagcaaagagaagggttctgtgtgggttactttgaaaagatcatctctcaagtctaaggtgcagaagaggaaactgagctcagttggagaatccattgaatacagatgccttattcgagcaaccgatggaaagaaaactgtttctacttcggttggtgctaaggatcaccagagatttcaagcatcatatgccaccattcttaaggcccacatgactgctttgaagaagagggaaaggaaagaccggaagaaatcgacagaggcagagaagaaagaaagcacttcaaccactaaatctaagaaactttgatttctccttttgtgtttctcattgatttgcaattgctgcttaagagttgaattttgaaagctattgaaagatctaaaagattttgacttgtgttataatagagattttggtttgcatttgcttttccctcgagaatgttcatcgtgtataaataaaccaattccatacaaatgtacgaacataaatccaattcaaagaaactgattct

SEQ ID NO: 38394 - protein, 121 aa, Arabidopsis thaliana
  peptide (1)..(121): Ceres Seq. ID no. 12326800
MVLLQLDPFLNELTSMFEKSKEKGSVWVTLKRSSLKSKVQKRKLSSVGESIEYRCLIRATDGKKTVSTSVGAKDHQRFQASYATILKAHMTALKKRERKDRKKSTEAEKKESTSTTKSKKL

SEQ ID NO: 38395 - protein, 106 aa, Arabidopsis thaliana
  peptide (1)..(106): Ceres Seq. ID no. 12326801
MFEKSKEKGSVWVTLKRSSLKSKVQKRKLSSVGESIEYRCLIRATDGKKTVSTSVGAKDHQRFQASYATILKAHMTALKKRERKDRKKSTEAEKKESTSTTKSKKL

SEQ ID NO: 38396 - DNA, 805 bp, Arabidopsis thaliana
  misc_feature (1)..(805): Ceres Seq. ID no. 13592732
  misc_feature (1)..(805): Ortholog of  Ceres SEQ ID NO 13595704 as cited in SEQ ID NO 51001
  misc_feature (1)..(805): Ortholog of  Ceres SEQ ID NO 13638279 as cited in SEQ ID NO 57674
  misc_feature (1)..(805): Ortholog of  Ceres SEQ ID NO 15177534 as cited in SEQ ID NO 0
acttaaacgtcgccgtttccgtgttcgaagcttcgtgaaaatcttcaatctcgcgagagagaagaagaagaagaagaagaagaagaagcgatgttcctggtggattggttctatggagttctggcaactctgggactatggcagaaagaagcgaagattctgtttctaggtctcgacaacgccggcaaaaccaccttgcttcacatgttaaaggacgagagactggtccagcatcagccgacacagcatccgacatcgaaagagcttagtatcggcaaaatcaagttcaaagccttcgatttgggaggtcatcagattgctcgtagagtctggaaggactattacgctaaggttgatgcagtggtatacctagttgatgcatatgacaaagagaggtttgcagaatcaaagaaagagcttgacgctcttctctctgatgaatccctagcaaatgtccctttcctcatccttggaaacaaaatcgacattccgtacgctgcatcagaagacgagctgcgttatcatctaggcctcaccagtttcaccactgggaaaggtaaagtgaatctagcaggaacaaatgttcgtcctcttgaggtgttcatgtgcagcattgtcagaaagatgggttacggcgaaggatttaaatgggtttctcaatatatcgactagatcaatcatatttaagtcttatctatctatactgtgtgattggtatctgtacgtgttataacctaatgtataattacgattaatgtgtgtatacaacaagatttgacggcttttaaattatcaattttgtgtt

SEQ ID NO: 38397 - protein, 193 aa, Arabidopsis thaliana
  peptide (1)..(193): Ceres Seq. ID no. 13592733
MFLVDWFYGVLATLGLWQKEAKILFLGLDNAGKTTLLHMLKDERLVQHQPTQHPTSKELSIGKIKFKAFDLGGHQIARRVWKDYYAKVDAVVYLVDAYDKERFAESKKELDALLSDESLANVPFLILGNKIDIPYAASEDELRYHLGLTSFTTGKGKVNLAGTNVRPLEVFMCSIVRKMGYGEGFKWVSQYID

SEQ ID NO: 38398 - protein, 155 aa, Arabidopsis thaliana
  peptide (1)..(155): Ceres Seq. ID no. 13592734
MLKDERLVQHQPTQHPTSKELSIGKIKFKAFDLGGHQIARRVWKDYYAKVDAVVYLVDAYDKERFAESKKELDALLSDESLANVPFLILGNKIDIPYAASEDELRYHLGLTSFTTGKGKVNLAGTNVRPLEVFMCSIVRKMGYGEGFKWVSQYID

SEQ ID NO: 38399 - DNA, 664 bp, Arabidopsis thaliana
  misc_feature (1)..(664): Ceres Seq. ID no. 12738931
  misc_feature (1)..(664): Ortholog of  Ceres SEQ ID NO 12557737 as cited in SEQ ID NO 81
cccactctgtgcattaggtttcattttagcggcagacgagagagctaaagcaaggagcaaccctaaccatggcgactcaaccagctactgaatctgtgcaatgcttcggaaggaagaagaccgcagtggccgtcactcactgcaagcgtggatctggtttgatcaagctcaacggttgcccaatcgagcttttccagcctgagatcctccgattcaagatcttcgagccggttcttctcctcggaaagcaccgtttcgctggtgtgaacatgaggatccgtgtcaacggtggtggtcacacatcccaggtttacgccatccgtcagagtatcgcgaaggctcttgttgcgtactaccagaagtatgtggatgagcagtcgaagaaggagattaaggatatcttggtgaggtatgataggactctgcttgtggcggatccgaggaggtgtgagccgaagaagtttggtggtcgtggtgctcgttctcgttaccagaagagttaccgttaaacaaagctggtttgtgttttgtttttcaatttggaatcatcgtaaggtttttgtgggagtatggacttgtgagactctttagattttataatttctgctttattatgcttgttggattatggtgattctccaagaaacttatgttttgttatgtc

SEQ ID NO: 38400 - protein, 146 aa, Arabidopsis thaliana
  peptide (1)..(146): Ceres Seq. ID no. 12738932
MATQPATESVQCFGRKKTAVAVTHCKRGSGLIKLNGCPIELFQPEILRFKIFEPVLLLGKHRFAGVNMRIRVNGGGHTSQVYAIRQSIAKALVAYYQKYVDEQSKKEIKDILVRYDRTLLVADPRRCEPKKFGGRGARSRYQKSYR

SEQ ID NO: 38401 - protein, 79 aa, Arabidopsis thaliana; identical to SEQ ID NO: 21210
  peptide (1)..(79): Ceres Seq. ID no. 12738933

SEQ ID NO: 38402 - DNA, 903 bp, Arabidopsis thaliana
  misc_feature (1)..(903): Ceres Seq. ID no. 12337733
  misc_feature (1)..(903): Ortholog of  Ceres SEQ ID NO 12609518 as cited in SEQ ID NO 51887
  misc_feature (1)..(903): Ortholog of  Ceres SEQ ID NO 13638980 as cited in SEQ ID NO 55975
  misc_feature (1)..(903): Ortholog of  Ceres SEQ ID NO 13597466 as cited in SEQ ID NO 65077
  misc_feature (1)..(903): Ortholog of  Ceres SEQ ID NO 13654590 as cited in SEQ ID NO 68615
aaaaaaaaccaatcatttgctcgaaaaggaatcatgggtcttaaagctggaacctttgtgcttctcttgttgggtttgatcttggtctctgacgctagatctttcgttgactccaccatctcagagaaagtttccaacaaggaagacgtttgcactctgtgtgaggaatatgttactgatgctctcagctaccttgagaaaaatgtcacacaagcggagatcatcgaagatcttcatgatcggtgttcccaattgcgcggatattcgcagcagtgcataagtttggtggattactatgttcctcttttcttcttacaactagagtcgtttcaacctcattatttctgcaagaggatgaatctttgtggcaaagttgtagctcttgtcgaagaagctcgtcaggacagttgcggtgtatgccacaggactgtttcagagattctcatcaaactacaagatcctgacacacagctggatatcgttgaactgcttatcaagggatgcaaatcgctcaagaactacgagaagaagtgcaagacgttggtgtttgaatatggacctctgatactcgtaaatgcagaggaattcctagtgaaaaaagacgtctgcacactcttgcgcgcatgcccccctgagaaatcggttctaaggcagccggagttggctgattcttgaatgttcaaaacgttgctataacaggattttaattccttatgggttatacaagtaggaacacgagctgctccatgagaatggttgcagactttgtgtagtgtctatatgtatggattcaaacacatcctccaaaatgtccctttgcctttgtgtaaataatgatcgctacaacaattgtacctctactatgatatcactgtattctatttgaggtttgtcacattttat

SEQ ID NO: 38403 - protein, 224 aa, Arabidopsis thaliana
  peptide (1)..(224): Ceres Seq. ID no. 12337734
KKNQSFARKGIMGLKAGTFVLLLLGLILVSDARSFVDSTISEKVSNKEDVCTLCEEYVTDALSYLEKNVTQAEIIEDLHDRCSQLRGYSQQCISLVDYYVPLFFLQLESFQPHYFCKRMNLCGKVVALVEEARQDSCGVCHRTVSEILIKLQDPDTQLDIVELLIKGCKSLKNYEKKCKTLVFEYGPLILVNAEEFLVKKDVCTLLRACPPEKSVLRQPELADS

SEQ ID NO: 38404 - protein, 213 aa, Arabidopsis thaliana
  peptide (1)..(213): Ceres Seq. ID no. 12337735
MGLKAGTFVLLLLGLILVSDARSFVDSTISEKVSNKEDVCTLCEEYVTDALSYLEKNVTQAEIIEDLHDRCSQLRGYSQQCISLVDYYVPLFFLQLESFQPHYFCKRMNLCGKVVALVEEARQDSCGVCHRTVSEILIKLQDPDTQLDIVELLIKGCKSLKNYEKKCKTLVFEYGPLILVNAEEFLVKKDVCTLLRACPPEKSVLRQPELADS

SEQ ID NO: 38405 - DNA, 702 bp, Arabidopsis thaliana
  misc_feature (1)..(702): Ceres Seq. ID no. 13488314
  misc_feature (1)..(702): Ortholog of  Ceres SEQ ID NO 14309400 as cited in SEQ ID NO 0
attttgttttgcgtttctgaatttgtggccattatcttctcacactctcttctcttagctcacagaggaaagaaaaatggcgaattccatttcatcaatatctctgcctcgatgtttcatcttcaacaatggtagtcacaaatcaaggccatggccaagctcaagcagtttctttctcaacaaatcatcaaagcatcatcctcatccactactctctctttcttcttcgccgtcttccgtcgtagaaactgataatgacgacgacaacgacctcactttcagtggttgcagagcgtgtgggaaagaagagaaagagagtgggtgtaatggtgacggacggattcaaggtggcattgcaactgtccccggtttcggttggtggccaattaaggcttacaggccttgtcccgcgtttgttgaggccggaggtagataccgccgcatagggcagagcatggacgaggttgcatttggtcgtggtgactctaaatcctccacttctgtagacaccagtgattcactactacgccagacaaagccaacaagttctagcaaaagttcaaacaagtgatatatagcccagtttttcaagtccaagaagaactttttttggaaatgtgtaatgatgattgggcctaaacatattatcggcccatttataattttacggctcaatagttaagaaaccctaaagaaggtttt

SEQ ID NO: 38406 - protein, 164 aa, Arabidopsis thaliana
  peptide (1)..(164): Ceres Seq. ID no. 13488315
MANSISSISLPRCFIFNNGSHKSRPWPSSSSFFLNKSSKHHPHPLLSLSSSPSSVVETDNDDDNDLTFSGCRACGKEEKESGCNGDGRIQGGIATVPGFGWWPIKAYRPCPAFVEAGGRYRRIGQSMDEVAFGRGDSKSSTSVDTSDSLLRQTKPTSSSKSSNK

SEQ ID NO: 38407 - DNA, 907 bp, Arabidopsis thaliana
  misc_feature (1)..(907): Ceres Seq. ID no. 13488344
  misc_feature (1)..(907): Ortholog of  Ceres SEQ ID NO 15178260 as cited in SEQ ID NO 59907
cctctttaagagtcacttgactttaatatttctctttttgtttctttctccttttctctgttttttcttttcttttctctttgcgattcgctgagagcatgcctgaatgtcaagagaaagggagagatttgaagagatagggaagaagatcaaaagagaagcagatgcttggcctcatcaaatggctggaattagaagaccaatgtcgggtcctcccggaaccctcaataccattacgccttgtgctgcctgcaagcttttgcgccgtagatgtgctcaagaatgtcccttttcgccatatttctccccacacgagcctcataagttcgcttccgtccacaaagtctttggagctagtaacgtctccaagatgctaatggaagtacctgagagccagagagcagatgccgcgaatagccttgtgtatgaagcaaacgtgaggctaagagatccggtgtacggatgcatgggagccatctcagctctacaacaacaagtccaagctttacaagccgagctcacggccgtaagatccgagattcttaagtacaagcaacgagaagctgtcgccactttgatcgtaccttccaactcccaagttgccggatttcacaactccggcggtgtttccgtgattgcaccaccaccacaaagaccaacaactccaccacaacctacaacggctcatcctccttctccatcttcttgtgttttctctcaaccaaccacaagagacttagaatacggcaacattgaaagtgagaacaactacttcggttaaatttttattgtatcattctacaaacacatacaaatacatataattaatttatttcgataatttgtgatccggtgactaataaattaaattaaattaaattaatataagtgaacaaggttggtcttg

SEQ ID NO: 38408 - protein, 224 aa, Arabidopsis thaliana
  peptide (1)..(224): Ceres Seq. ID no. 13488345
MSRERERFEEIGKKIKREADAWPHQMAGIRRPMSGPPGTLNTITPCAACKLLRRRCAQECPFSPYFSPHEPHKFASVHKVFGASNVSKMLMEVPESQRADAANSLVYEANVRLRDPVYGCMGAISALQQQVQALQAELTAVRSEILKYKQREAVATLIVPSNSQVAGFHNSGGVSVIAPPPQRPTTPPQPTTAHPPSPSSCVFSQPTTRDLEYGNIESENNYFG

SEQ ID NO: 38409 - protein, 199 aa, Arabidopsis thaliana
  peptide (1)..(199): Ceres Seq. ID no. 13488346
MAGIRRPMSGPPGTLNTITPCAACKLLRRRCAQECPFSPYFSPHEPHKFASVHKVFGASNVSKMLMEVPESQRADAANSLVYEANVRLRDPVYGCMGAISALQQQVQALQAELTAVRSEILKYKQREAVATLIVPSNSQVAGFHNSGGVSVIAPPPQRPTTPPQPTTAHPPSPSSCVFSQPTTRDLEYGNIESENNYFG

SEQ ID NO: 38410 - protein, 192 aa, Arabidopsis thaliana
  peptide (1)..(192): Ceres Seq. ID no. 13488347
MSGPPGTLNTITPCAACKLLRRRCAQECPFSPYFSPHEPHKFASVHKVFGASNVSKMLMEVPESQRADAANSLVYEANVRLRDPVYGCMGAISALQQQVQALQAELTAVRSEILKYKQREAVATLIVPSNSQVAGFHNSGGVSVIAPPPQRPTTPPQPTTAHPPSPSSCVFSQPTTRDLEYGNIESENNYFG

SEQ ID NO: 38411 - DNA, 819 bp, Arabidopsis thaliana
  misc_feature (1)..(819): Ceres Seq. ID no. 12420502
  misc_feature (1)..(819): Ortholog of  Ceres SEQ ID NO 12585640 as cited in SEQ ID NO 63164
ccgacagagagagagaagcagatcgtatcatcacgagacgaccatcggaataacagagaaagagagaaaaagagagagagagagagagaggatgtctggtgtggttgctcttggtcatgcgagctcgtggggcgcagcgctggtaaggatctcgccgtatactttctccgcaatcggaatcgccatctcgatcggtgtctcagtcctcggtgccgcctggggaatttacattacgggaagtagtttgatcggtgcggctatagaagctcctcgtattacttcgaagaatctcatcagtgtcatcttttgcgaagctgttgctatatatggagttattgttgcaatcatactgcaaacaaagttggagagtgtcccatcttcaaagatgtatgatgctgagtctcttagagctggatatgcaatctttgcatctggaattatagttggattcgccaaccttgtatgcgggttatgtgtaggaatcattggaagcagttgtgcattgtccgatgctcagaactccacactttttgtaaagattcttgtgatcgagatattcgggagtgctctcgggttgtttggagttattgtgggaattattatgtctgcacaagcgacatggccaacgaaatagatatatatatatccggtctgtatatgttgtggtctacttgcaaatctggaaaaacatggcttcttgattatcttcattgttatatcgttccaatgtctagacgaaaatcttgtgtgaaaactgagaaccacttttggatccccaattttttgtatttgtttaaaacttttgaataagtccttttg

SEQ ID NO: 38412 - protein, 210 aa, Arabidopsis thaliana
  peptide (1)..(210): Ceres Seq. ID no. 12420503
RQRERSRSYHHETTIGITEKERKRERERERMSGVVALGHASSWGAALVRISPYTFSAIGIAISIGVSVLGAAWGIYITGSSLIGAAIEAPRITSKNLISVIFCEAVAIYGVIVAIILQTKLESVPSSKMYDAESLRAGYAIFASGIIVGFANLVCGLCVGIIGSSCALSDAQNSTLFVKILVIEIFGSALGLFGVIVGIIMSAQATWPTK

SEQ ID NO: 38413 - protein, 180 aa, Arabidopsis thaliana
  peptide (1)..(180): Ceres Seq. ID no. 12420504
MSGVVALGHASSWGAALVRISPYTFSAIGIAISIGVSVLGAAWGIYITGSSLIGAAIEAPRITSKNLISVIFCEAVAIYGVIVAIILQTKLESVPSSKMYDAESLRAGYAIFASGIIVGFANLVCGLCVGIIGSSCALSDAQNSTLFVKILVIEIFGSALGLFGVIVGIIMSAQATWPTK

SEQ ID NO: 38414 - protein, 115 aa, Arabidopsis thaliana
  peptide (1)..(115): Ceres Seq. ID no. 12420505
MRVMCRNHWKQLCIVRCSELHTFCKDSCDRDIRECSRVVWSYCGNYYVCTSDMANEIDIYISGLYMLWSTCKSGKTWLLDYLHCYIVPMSRRKSCVKTENHFWIPNFLYLFKTFE

SEQ ID NO: 38415 - DNA, 515 bp, Arabidopsis thaliana
  misc_feature (1)..(515): Ceres Seq. ID no. 12579436
  misc_feature (1)..(515): Ortholog of  Ceres SEQ ID NO 15169443 as cited in SEQ ID NO 58785
attttcgttttcactttctccgaacatccaaaagcttgtagcttgctcctcaaatcttcttgaaaaatgaaggttgccgctgctttcctcctcgccgttttgggcggaaacgctaatccttcagccgagaatatcaaagatatcatcggagctgttggtgctgatgttgatggagagagcattgagcttctattgaaagaagtgagtggtaaggacattgctgagctgattgcttctggtagggagaaattagcgtctgtgccatctggtggtggtgtggctgtttcagctgctccatcaagcggtggtggtggtgctgctgctgctgcccctgcggagaagaaagaagccaagaaggaagagaaagaagagtctgatgatgacatgggattcagtctcttcgagtaaggtttttgtccccacggaaaggagtcgagatttgattttttgttctcttagtggttctggtttttgctcctctttgtaaccttggtctagttagcgggttttttatt

SEQ ID NO: 38416 - protein, 113 aa, Arabidopsis thaliana
  peptide (1)..(113): Ceres Seq. ID no. 12579437
MKVAAAFLLAVLGGNANPSAENIKDIIGAVGADVDGESIELLLKEVSGKDIAELIASGREKLASVPSGGGVAVSAAPSSGGGGAAAAAPAEKKEAKKEEKEESDDDMGFSLFE

SEQ ID NO: 38417 - DNA, 658 bp, Arabidopsis thaliana
  misc_feature (1)..(658): Ceres Seq. ID no. 12602522
  misc_feature (1)..(658): Ortholog of  Ceres SEQ ID NO 13655287 as cited in SEQ ID NO 63004
  misc_feature (1)..(658): Ortholog of  Ceres SEQ ID NO 15173178 as cited in SEQ ID NO 64574
gaactttaggggttatcgattctttttgattcgttgtcattcgattatagaatttgtattagaaatcggaattttcgatcaatggggaggagaatattgaacgatgcattgagaacgatcgtgaatgctgagaagcgagggaaagcttcggtggagttgaaacctgtctctaccgtaatgtcttcgtttctcaaaatcatgaaagagaaagggtacatcaagaacttccaagtccatgatccacacagagttggaagaataactgttgatctacaaggaagggttaatgattgcaaagctctcacttataggcaggacgttaaggcaaatgagatcgggcaatacacagaacgcacacttccaacgcgccagtggggttatatagtgattacaactcccgatggcattttggatcatgaagaagctattaaacggaatgtgggtggtcaggttcttggtttctttcattgaactgcaatacggaaagaaactctgatggagggactttgatatgtcaaaccctgccataacatgtcatttgtctggctttttcgacattgtttgtttgtttgtttgttttcttgcactgcagtttcagcaagatggagaattagagaacaaaatttatttctattatgacaacatttcgaatggtatt

SEQ ID NO: 38418 - protein, 129 aa, Arabidopsis thaliana
  peptide (1)..(129): Ceres Seq. ID no. 12602523
MGRRILNDALRTIVNAEKRGKASVELKPVSTVMSSFLKIMKEKGYIKNFQVHDPHRVGRITVDLQGRVNDCKALTYRQDVKANEIGQYTERTLPTRQWGYIVITTPDGILDHEEAIKRNVGGQVLGFFH

SEQ ID NO: 38419 - protein, 97 aa, Arabidopsis thaliana
  peptide (1)..(97): Ceres Seq. ID no. 12602524
MSSFLKIMKEKGYIKNFQVHDPHRVGRITVDLQGRVNDCKALTYRQDVKANEIGQYTERTLPTRQWGYIVITTPDGILDHEEAIKRNVGGQVLGFFH

SEQ ID NO: 38420 - protein, 90 aa, Arabidopsis thaliana
  peptide (1)..(90): Ceres Seq. ID no. 12602525
MKEKGYIKNFQVHDPHRVGRITVDLQGRVNDCKALTYRQDVKANEIGQYTERTLPTRQWGYIVITTPDGILDHEEAIKRNVGGQVLGFFH

SEQ ID NO: 38421 - DNA, 592 bp, Arabidopsis thaliana
  misc_feature (1)..(592): Ceres Seq. ID no. 12394119
  misc_feature (1)..(592): Ortholog of  Ceres SEQ ID NO 15177455 as cited in SEQ ID NO 0
attgttgtgaatttctgtgagattgagaatgcaggcggaggagataatatgccgtgtttcagacgaagagatcatcgagaattacctgaggccaaagataaacggtgaaacatcttcaatcccgagatatgttgtggaattggcagaggagctgtacactgtagagccttggctgcttcctcgacaaacagctccaattctcaaccctggcgagtggttctactttgggaaacgcaatcgaaagtatagtaacttggaaggtgttcattgcaagggatcgtggatactcgaagacggttgcatcgcagtcctgtccaaggagacgggtgaggaaattggtggaacgacgagatttaggtattactataggaacaagggggataaagagagtcgtctgaagatgagcaattggtttatgagagagtaacgtctctattacaaatccaggagagtcttcaatggacgtcaggttttctgcattatcacttgtaatgatgaacattttatcgaataattctctctgcttttttctaagataccattgtttaagatcctaattatgagtttgaatctataattataactctttgcc

SEQ ID NO: 38422 - protein, 132 aa, Arabidopsis thaliana
  peptide (1)..(132): Ceres Seq. ID no. 12394120
MQAEEIICRVSDEEIIENYLRPKINGETSSIPRYVVELAEELYTVEPWLLPRQTAPILNPGEWFYFGKRNRKYSNLEGVHCKGSWILEDGCIAVLSKETGEEIGGTTRFRYYYRNKGDKESRLKMSNWFMRE

SEQ ID NO: 38423 - DNA, 1504 bp, Arabidopsis thaliana
  misc_feature (1)..(1504): Ceres Seq. ID no. 13592972
  misc_feature (1)..(1504): Ortholog of  Ceres SEQ ID NO 13600110 as cited in SEQ ID NO 0
aagctgaaatctagtttattttttctatttactaaaacctcccaaggaccaaagaacatcgacaaaggaagacgacgaagaagatttcgagcttcgacaaatcatgcggattcttactgctcgcatagctaaccatttttgcagggcacgaaacgcgaatcctcgatctcgaaatttctcctcgtcgaacaagaaagatgaccttacattggaggaagaagctgagaggaaaataggttggtgtctcaaaattttctttgcgggcacagcaacgtatattggataccagtttttcccttacttaggtgataacttaattcatcaatcaatatcgcttttacatgtgaaggatcctttgtttaagagaatgggagcttctcggctttcccgtttcgctattgatgatgaaaggaggatgaaggttgtagagatgggtggggctcaagagctactacatatgttgggaagtgctaaagatgacaagacaaggaaagaagccctaaaggctcttgctgctctctctaaatcaggtgaagctgctaaattcctaggctctaatggagcactctctatcgtcaaatcgactccaaattccttggaagattcagacatttcaacatacaagtcaaacatactcgagaagctagttgagaaaaacctcgctgtctcttccaactgaactacctttttacggacaaggataggtcaagaatcataagagcatgtccattgcagggaccttgcaagttttttaagaaaatccttatgaataatagcaaaaaattaaatcagaatggtgtaataaaccaaggtgcgaaccttgtttaaggtatttttgggtgtattaggtgcgctgacgtggctgtatattattggatgacaacttttcccgtgtttttttttctttcccattcccaaactatttttttctttctctcctctctcctctcctgttttctccgaatttcgacttcgacggatcaaattcttcatcgtctctttttttatcatgtctctcttctcatacgatccacaagattcgtgatcgaagaggtgtcagaaaatccaccggaagagctactcttaccggctttgctgaggtcaacgatgtggcgctgtttttcggtggattggttagaatgttgatgctcataggatcctgcttgtgggttcgtctgctggttgaatttgattgcaagttaaagtctggtgcttttgatctggtaattgcttcttacaagttgatctgtaacaattgatttcgaattcagtatatggatttgtatacagattctgggctttgctttatgttcaaatttgtgtttgatcttttggtttttaagataaaaatgtgactcttttggtgcttattcacttgtatgtcatgttatggtctatgttctctaagtggttttagcttagataacttgtatgtctgttttctttactttaagttcaatatgacttgtatcacttcggctttaatgatattgttgtttaaaag

SEQ ID NO: 38424 - protein, 191 aa, Arabidopsis thaliana
  peptide (1)..(191): Ceres Seq. ID no. 13592973
MRILTARIANHFCRARNANPRSRNFSSSNKKDDLTLEEEAERKIGWCLKIFFAGTATYIGYQFFPYLGDNLIHQSISLLHVKDPLFKRMGASRLSRFAIDDERRMKVVEMGGAQELLHMLGSAKDDKTRKEALKALAALSKSGEAAKFLGSNGALSIVKSTPNSLEDSDISTYKSNILEKLVEKNLAVSSN

SEQ ID NO: 38425 - protein, 103 aa, Arabidopsis thaliana
  peptide (1)..(103): Ceres Seq. ID no. 13592974
MGASRLSRFAIDDERRMKVVEMGGAQELLHMLGSAKDDKTRKEALKALAALSKSGEAAKFLGSNGALSIVKSTPNSLEDSDISTYKSNILEKLVEKNLAVSSN

SEQ ID NO: 38426 - DNA, 904 bp, Arabidopsis thaliana
  misc_feature (1)..(904): Ceres Seq. ID no. 12562653
  misc_feature (1)..(904): Ortholog of  Ceres SEQ ID NO 14305465 as cited in SEQ ID NO 1252
atgaagaactaatgatatatacaaacaattcttaatacataaaaatcttctacaaatattgatttaagaagctctaaaatcatacaagtcatggatgaagaagcagcgattgatcgtttaccattagaccttcttgcatatatattttcgttggctacttctttcaccgttttggcccaggcaagtggtgtttgcaagaaatggagaaaagctgtaaatcaatcgatggcgagaagagaaactctgagctttgctggttggaaaatggacgatgattccacttctcgtctcgttcatcttgctttcaacctcaaagaactcgacatatctcgaagcagatggggttgtcatataactgataatggtctttaccaaatagcttctgcaagatgtgtatccaatttaaactctgtctctttatggggcatgaccgccattactgattctggtgttgttcaactgatttcaagaacttcctcactgcaacacctaaacataggaggaacatttataaccgatgagtctcttttcgcaattgcagaacgctgccatcagcttaagacaatcggaatgtggtgttgccgtcatgtgacagagagaggccttcttgttcttgtaaacaaatgcagaaaactcgaatccatcaacttatggggaactagagttcctgtagattgcttcattgctttacttaccatcagtcctgctcttcagatcaaacccatggaattgcttctcaatgctcagaatccaccaccgttgctgcatgctgtctagtgttgctcatcatatttcttgtttgttgtgtacatagtaattcatacaattgaatctgcatatatcttatgtgttctctcatcaatcaacaacatatatatataaatattcagtaaagtttctattg

SEQ ID NO: 38427 - protein, 228 aa, Arabidopsis thaliana
  peptide (1)..(228): Ceres Seq. ID no. 12562654
MDEEAAIDRLPLDLLAYIFSLATSFTVLAQASGVCKKWRKAVNQSMARRETLSFAGWKMDDDSTSRLVHLAFNLKELDISRSRWGCHITDNGLYQIASARCVSNLNSVSLWGMTAITDSGVVQLISRTSSLQHLNIGGTFITDESLFAIAERCHQLKTIGMWCCRHVTERGLLVLVNKCRKLESINLWGTRVPVDCFIALLTISPALQIKPMELLLNAQNPPPLLHAV

SEQ ID NO: 38428 - protein, 183 aa, Arabidopsis thaliana
  peptide (1)..(183): Ceres Seq. ID no. 12562655
MARRETLSFAGWKMDDDSTSRLVHLAFNLKELDISRSRWGCHITDNGLYQIASARCVSNLNSVSLWGMTAITDSGVVQLISRTSSLQHLNIGGTFITDESLFAIAERCHQLKTIGMWCCRHVTERGLLVLVNKCRKLESINLWGTRVPVDCFIALLTISPALQIKPMELLLNAQNPPPLLHAV

SEQ ID NO: 38429 - protein, 170 aa, Arabidopsis thaliana
  peptide (1)..(170): Ceres Seq. ID no. 12562656
MDDDSTSRLVHLAFNLKELDISRSRWGCHITDNGLYQIASARCVSNLNSVSLWGMTAITDSGVVQLISRTSSLQHLNIGGTFITDESLFAIAERCHQLKTIGMWCCRHVTERGLLVLVNKCRKLESINLWGTRVPVDCFIALLTISPALQIKPMELLLNAQNPPPLLHAV

SEQ ID NO: 38430 - DNA, 911 bp, Arabidopsis thaliana
  misc_feature (1)..(911): Ceres Seq. ID no. 13574943
  misc_feature (1)..(911): Ortholog of  Ceres SEQ ID NO 14306110 as cited in SEQ ID NO 1363
ccacgcgtccgctttatctatcttcgtacattatatataatgggatcaaccgtggccgccgctctcctcctcttcctagcggcagtccctgccgtctttgccgcaactttcaaggtcggcgatatttctggctggaccagtaatcttgattacacggtttggctcactggaaagactttcagagtcggtgacactctagagttcgtatatggtctttcacactcggtgtccgtggtggataaagctggctacgataactgcgacagtagcggagccacacagaactttgccgatggagacactaagatcgatcttaccacagttggaacaatgcacttcctttgccctacttttggtcactgcaagaacggcatgaaactcgccgttcctgtcctcgccgccgctccatctccttcgactccttcttcgcctccctccactccttcgactccttcttccccgccctccactccgtctaccccttcttcgcccccctcccctccttcgcctccttctccatcgctcccccctagctctctgcctccatctgcatctccgccgaccaatggcacgccggattcagagacattgacgcctccgccagctccattgccgccttcgctgtctccaaacgcggcatctaagggagtcatgagctatggaataattggagtcacgatgatattgatgtacgctgttatgacctaaataacagggtggaaacagagcattgttttgctccatgtcttttttggtcggcggcctttggaaatactacaccactacgtgctcttttgtgtgtaacggaatttttttgccattgacaatttttccttcttccttctttttttaattacttgtaggggttgataaacgttatagccatctccaagctattttatcttattctt

SEQ ID NO: 38431 - protein, 235 aa, Arabidopsis thaliana
  peptide (1)..(235): Ceres Seq. ID no. 13574944
PRVRFIYLRTLYIMGSTVAAALLLFLAAVPAVFAATFKVGDISGWTSNLDYTVWLTGKTFRVGDTLEFVYGLSHSVSVVDKAGYDNCDSSGATQNFADGDTKIDLTTVGTMHFLCPTFGHCKNGMKLAVPVLAAAPSPSTPSSPPSTPSTPSSPPSTPSTPSSPPSPPSPPSPSLPPSSLPPSASPPTNGTPDSETLTPPPAPLPPSLSPNAASKGVMSYGIIGVTMILMYAVMT

SEQ ID NO: 38432 - protein, 222 aa, Arabidopsis thaliana
  peptide (1)..(222): Ceres Seq. ID no. 13574945
MGSTVAAALLLFLAAVPAVFAATFKVGDISGWTSNLDYTVWLTGKTFRVGDTLEFVYGLSHSVSVVDKAGYDNCDSSGATQNFADGDTKIDLTTVGTMHFLCPTFGHCKNGMKLAVPVLAAAPSPSTPSSPPSTPSTPSSPPSTPSTPSSPPSPPSPPSPSLPPSSLPPSASPPTNGTPDSETLTPPPAPLPPSLSPNAASKGVMSYGIIGVTMILMYAVMT

SEQ ID NO: 38433 - protein, 125 aa, Arabidopsis thaliana
  peptide (1)..(125): Ceres Seq. ID no. 13574946
MHFLCPTFGHCKNGMKLAVPVLAAAPSPSTPSSPPSTPSTPSSPPSTPSTPSSPPSPPSPPSPSLPPSSLPPSASPPTNGTPDSETLTPPPAPLPPSLSPNAASKGVMSYGIIGVTMILMYAVMT

SEQ ID NO: 38434 - DNA, 1622 bp, Arabidopsis thaliana
  misc_feature (1)..(1622): Ceres Seq. ID no. 12738553
  misc_feature (1)..(1622): Ortholog of  Ceres SEQ ID NO 15176051 as cited in SEQ ID NO 53434
  misc_feature (1)..(1622): Ortholog of  Ceres SEQ ID NO 15170306 as cited in SEQ ID NO 58219
  misc_feature (1)..(1622): Ortholog of  Ceres SEQ ID NO 12465091 as cited in SEQ ID NO 65947
ttcaaaggataaatacgcatggcttcgcgatgacgagttcgcacgccaagctatagctgggatcaacccggtcaacatagaacgagtcacgtcttatccaccggtcagcaatcttgaccctgaaatctacggaccaggtcttcactccgctctcacggaagaccacatcatcggtcaacttgatggcttaaccgtacaacaagcgttagagatgaaccgtttgtttatggtggactaccatgacatatacttaccgtttctagatagaatcaacgcgcttgatggacgcaaggcttacgcgactcgaaccatattgttcttgacccgactcggtacactcaagcctatcgccatcgagctaagcctcccttctcaatcaagctcaaaccaaaagtccaagcgcgtggtcacacctccagtagacgcaacctccaactggatgtggcagctagccaaggcccacgttgggtccaatgacgctggtgtccaccagcttgtgaatcattggttacgtactcatgcgtgtttggaaccgtttatattagctgctcatagacaattaagcgcaatgcatccgatattcaaattattagaccctcacatgaggtacactttggagatcaatgccgtggcacgacagactttgattagtgcggacggtgtgatcgagtcgtgcttcactgctggtcaatacggtctagagattagttccgctgcgtataagaacaaatggcggtttgatatggaaggtctccctgctgatctcatccgaagggggatggctgttccagacccaacacaaccacatgggcttaaattacttgttgaagactacccatgccaacgacggtctcttattatggtccgcaatccaaacttgggtccgaacctacgtggaacgttattacgcaaactcgaacctaatccaaaccgatactgagctccaagcctggtactctgagtcaatcaacgtaggtcacgctgatcaccgcgacgccgagtggtggccgaagctttccaccgtcgaagatctcgtctccgtcatcaccaccatcatctggctcgcctccgcacaacacgcggcactcaacttcggacaatatccttacggtggctacgtcccgaaccgaccaccgctaatgcgtcggttgattcccgacgagtcagatcccgagttcacgagttttatcgaagatcctcaaaagtattttttctcgtcgatgccgagtttattgcaaacgacgaagtttatggcggtggttgatacattgtcgacacattcgccggatgaggagtatatcggagagagacaacaaccgtcgatatggactggagatgctgagatcgtagatgcgttttatggattctcggcggaaatcggacggatagagaaggagattgacaagaggaatcgtgatcctagctgtaggaatcgctgtggcgcgggagtgttaccgtatgagttgatggctccgagttctgaaccgggtgttacgtgtagaggagtgcctaatagtgtatctatttagaattattcaatttttcaaagtatagagaattttataagtatataattagattttgacgcagtatggtttatttgccgatattgtaaaattctt

SEQ ID NO: 38435 - protein, 312 aa, Arabidopsis thaliana
  peptide (1)..(312): Ceres Seq. ID no. 12738554
SKDKYAWLRDDEFARQAIAGINPVNIERVTSYPPVSNLDPEIYGPGLHSALTEDHIIGQLDGLTVQQALEMNRLFMVDYHDIYLPFLDRINALDGRKAYATRTILFLTRLGTLKPIAIELSLPSQSSSNQKSKRVVTPPVDATSNWMWQLAKAHVGSNDAGVHQLVNHWLRTHACLEPFILAAHRQLSAMHPIFKLLDPHMRYTLEINAVARQTLISADGVIESCFTAGQYGLEISSAAYKNKWRFDMEGLPADLIRRGMAVPDPTQPHGLKLLVEDYPCQRRSLIMVRNPNLGPNLRGTLLRKLEPNPNRY

SEQ ID NO: 38436 - protein, 242 aa, Arabidopsis thaliana
  peptide (1)..(242): Ceres Seq. ID no. 12738555
MNRLFMVDYHDIYLPFLDRINALDGRKAYATRTILFLTRLGTLKPIAIELSLPSQSSSNQKSKRVVTPPVDATSNWMWQLAKAHVGSNDAGVHQLVNHWLRTHACLEPFILAAHRQLSAMHPIFKLLDPHMRYTLEINAVARQTLISADGVIESCFTAGQYGLEISSAAYKNKWRFDMEGLPADLIRRGMAVPDPTQPHGLKLLVEDYPCQRRSLIMVRNPNLGPNLRGTLLRKLEPNPNRY

SEQ ID NO: 38437 - protein, 240 aa, Arabidopsis thaliana
  peptide (1)..(240): Ceres Seq. ID no. 12738556
MGLNYLLKTTHANDGLLLWSAIQTWVRTYVERYYANSNLIQTDTELQAWYSESINVGHADHRDAEWWPKLSTVEDLVSVITTIIWLASAQHAALNFGQYPYGGYVPNRPPLMRRLIPDESDPEFTSFIEDPQKYFFSSMPSLLQTTKFMAVVDTLSTHSPDEEYIGERQQPSIWTGDAEIVDAFYGFSAEIGRIEKEIDKRNRDPSCRNRCGAGVLPYELMAPSSEPGVTCRGVPNSVSI

SEQ ID NO: 38438 - DNA, 1336 bp, Arabidopsis thaliana
  misc_feature (1)..(1336): Ceres Seq. ID no. 12329843
  misc_feature (1)..(1336): Ortholog of  Ceres SEQ ID NO 15177221 as cited in SEQ ID NO 53046
  misc_feature (1)..(1336): Ortholog of  Ceres SEQ ID NO 12616332 as cited in SEQ ID NO 63449
  misc_feature (1)..(1336): Ortholog of  Ceres SEQ ID NO 13597498 as cited in SEQ ID NO 64648
attaaagagttttttttcgaaaagagttaaagaaaaaatgggaatgggaaggtatcagaaatctgcaacttctggtgtttcagctagatgggtttttgttctctgtatttctagcttccttcttggtgttcttgtcgttaacaggcttttggcaagttttgaaaccgtagatggcattgagagagcttcacctgagcaaaatgatcaatctagatcacttaatcctcttgttgattgtgagagcaaggaaggagacattctatctcgagtttcgcatactcatgatgttatcaagacattagacaagacaatttcttctcttgaggtagaactagctacagctcgagcagcaagatctgatggtagagatggatctccagctgttgcaaaaacagtagcagaccaatcgaagattcggcctcggatgttctttgtgatgggaatcatgactgctttcagtagcagaaaacgaagagactccataagaggaacttggcttcctaaagggaatgaattgaaaagattagagacagagaagggaatcattatgagatttgttataggtcacagttcttctcctggaggagtcttggaccacaccattgaagctgaagaagaacaacacaaagacttctttcgactgaatcacatagaaggttatcatgaattatcatctaaaacccaaatatacttctcatctgctgttgcaaaatgggatgcagacttctacatcaaagtggatgatgatgttcacgtaaatctcggaatgcttggttctacattggttgcatgaagtctggacctgtccttgctcaaaaaggagtcaaataccatgagccagaatattggaagtttggtgaagaaggaaacaaatacttcagacatgcaactggacaaatctatgcaatctccaaagatttagcaacttatatctcagttaaccggcaactacttcacaagtatgcaaatgaagatgtctctttaggttcttggttcattggtctcgatgttgaacatatcgacgatagaagcctctgctgtggaacacctttagattgtgagtggaagggtcaagcaggaaacccttgcgcagcatcgttcgattggagctgtagtggaatctgcaaatccgtagatagaatgcttgaagtacatcaacgttgtggtgaaggcgatggagcaatttggcatagtagtttctaaatattttctctctgtaatgtatagttttcagcttcttcttcttcttatggattattagtctaggttatgattatgattgatgttacatgtttaacattacagacatcatctaaaaggtcccaatttttgcctg

SEQ ID NO: 38439 - protein, 263 aa, Arabidopsis thaliana
  peptide (1)..(263): Ceres Seq. ID no. 12329844
LKSFFSKRVKEKMGMGRYQKSATSGVSARWVFVLCISSFLLGVLVVNRLLASFETVDGIERASPEQNDQSRSLNPLVDCESKEGDILSRVSHTHDVIKTLDKTISSLEVELATARAARSDGRDGSPAVAKTVADQSKIRPRMFFVMGIMTAFSSRKRRDSIRGTWLPKGNELKRLETEKGIIMRFVIGHSSSPGGVLDHTIEAEEEQHKDFFRLNHIEGYHELSSKTQIYFSSAVAKWDADFYIKVDDDVHVNLGMLGSTLVA

SEQ ID NO: 38440 - protein, 251 aa, Arabidopsis thaliana
  peptide (1)..(251): Ceres Seq. ID no. 12329845
MGMGRYQKSATSGVSARWVFVLCISSFLLGVLVVNRLLASFETVDGIERASPEQNDQSRSLNPLVDCESKEGDILSRVSHTHDVIKTLDKTISSLEVELATARAARSDGRDGSPAVAKTVADQSKIRPRMFFVMGIMTAFSSRKRRDSIRGTWLPKGNELKRLETEKGIIMRFVIGHSSSPGGVLDHTIEAEEEQHKDFFRLNHIEGYHELSSKTQIYFSSAVAKWDADFYIKVDDDVHVNLGMLGSTLVA

SEQ ID NO: 38441 - protein, 249 aa, Arabidopsis thaliana
  peptide (1)..(249): Ceres Seq. ID no. 12329846
MGRYQKSATSGVSARWVFVLCISSFLLGVLVVNRLLASFETVDGIERASPEQNDQSRSLNPLVDCESKEGDILSRVSHTHDVIKTLDKTISSLEVELATARAARSDGRDGSPAVAKTVADQSKIRPRMFFVMGIMTAFSSRKRRDSIRGTWLPKGNELKRLETEKGIIMRFVIGHSSSPGGVLDHTIEAEEEQHKDFFRLNHIEGYHELSSKTQIYFSSAVAKWDADFYIKVDDDVHVNLGMLGSTLVA

SEQ ID NO: 38442 - DNA, 958 bp, Arabidopsis thaliana
  misc_feature (1)..(958): Ceres Seq. ID no. 12326648
  misc_feature (1)..(958): Ortholog of  Ceres SEQ ID NO 14316455 as cited in SEQ ID NO 57297
tttatccagaacattccgactactctctccctgagcttcggccatggcggttcgtctcgcgaggtcattggctgcgtcaccctcgtcacgtccatcgtgtttatccctcggaaatcgcttctcagcctcagatatcacttcatctgcgattaacggcggcgagttttctgatttcgttagagctttcgccttttattcgtcttcgtcctcttggtggtcgtctcccgatgatttgacggcgtcatcgaagaggaaagagaagaagactacagagcgtttctctgccgtgattgacgcagtccatgaccggaaactcccgccggagctacgtgggcggcgcgatttcgtaaggtcagagactgatataatcaacgtggtcgagcaaaggatatggcattcaatggaagaaggccactttgagaacttacccggtaaaggcaaacccttgaacctccatacaaatcctcacgcagacccagcggaggatacattgtatcggattcttaacaagaacgggtttgctcccgaatgggtggagctcaacaaagagataagaaacaaagcaaaagaatggagagtttcactgaagaaagcatggacaatgaaactcgaggaagaccaatcgggatgggaagagagatcagatttgctgaaaaacgaattgaaacaaatcaataacatggtattcaggtacaatctgatcgttcctttcggccgtcaaatgtttggactgaagtgggagaaagagattgatcgcttgaaagaataacatcttcagaagccaaaaggttggtcacactactatgttcttgtgtttgtagtatatctattgatagtatacgagtcaatgtggctattggtgcttaggctagatataaaaagaataagaaacaagtgtttgagttgtttcatgtatgttgtatccatcaaatactctcttgaaagataattatagcta

SEQ ID NO: 38443 - protein, 241 aa, Arabidopsis thaliana
  peptide (1)..(241): Ceres Seq. ID no. 12326649
MAVRLARSLAASPSSRPSCLSLGNRFSASDITSSAINGGEFSDFVRAFAFYSSSSSWWSSPDDLTASSKRKEKKTTERFSAVIDAVHDRKLPPELRGRRDFVRSETDIINVVEQRIWHSMEEGHFENLPGKGKPLNLHTNPHADPAEDTLYRILNKNGFAPEWVELNKEIRNKAKEWRVSLKKAWTMKLEEDQSGWEERSDLLKNELKQINNMVFRYNLIVPFGRQMFGLKWEKEIDRLKE

SEQ ID NO: 38444 - protein, 122 aa, Arabidopsis thaliana
  peptide (1)..(122): Ceres Seq. ID no. 12326650
MEEGHFENLPGKGKPLNLHTNPHADPAEDTLYRILNKNGFAPEWVELNKEIRNKAKEWRVSLKKAWTMKLEEDQSGWEERSDLLKNELKQINNMVFRYNLIVPFGRQMFGLKWEKEIDRLKE

SEQ ID NO: 38445 - DNA, 871 bp, Arabidopsis thaliana
  misc_feature (1)..(871): Ceres Seq. ID no. 12421004
  misc_feature (1)..(871): Ortholog of  Ceres SEQ ID NO 12609037 as cited in SEQ ID NO 51306
  misc_feature (1)..(871): Ortholog of  Ceres SEQ ID NO 12610391 as cited in SEQ ID NO 55942
  misc_feature (1)..(871): Ortholog of  Ceres SEQ ID NO 14309068 as cited in SEQ ID NO 0
gaaacaaaaactcgtggaggagatatgcaattgctgacgctaaatccggcggccatttccaggacgccgccgcaagccatagacccttcctcatcctcgagtcttcttcttccttttcctcagattttgagctcccaacgcgctcttggtcttgtagctaggccttgtaatccacttcgacgaggattatctaggtttttatcaagtcgacagcttttccgacgatccaaagttgtcaaggcagtagcaaccccagaccccatcttggaagtacctttaactgaggaaaatgtagaaagcgttttggatgaaatccgaccttaccttatgtctgatggtggtaatgtggcattacatgagatcgatggaaatattgtgcgggttaagctgcagggagcatgcggatcatgtccaagttctactatgacaatgaagatgggtattgagcgtcgtctaatggaaaagatccctgaaatagtggctgtagaagctcttccagatgaagagactggccttgaactgaatgaggaaaacattgaaaaggtgctggaagaaatcaggccttacttaatcggaacagcagatggatcgcttgatctagtggagattgaagatccaatcgtgaagataagaatcacaggacctgcagctggagtcatgacagttcgtgtagcagtcactcagaaactaagagagaaaattccatcaatcgcagctgttcaacttatatagaaacaacaactcttcttgtatgctttgtattagctcccttgtatagttgttgtgcatagattatgtgttttgttgacatttgctatttgtcctcaaataagttttcaacatttttgttttacttagaaaaaaagtcctt

SEQ ID NO: 38446 - protein, 243 aa, Arabidopsis thaliana
  peptide (1)..(243): Ceres Seq. ID no. 12421005
ETKTRGGDMQLLTLNPAAISRTPPQAIDPSSSSSLLLPFPQILSSQRALGLVARPCNPLRRGLSRFLSSRQLFRRSKVVKAVATPDPILEVPLTEENVESVLDEIRPYLMSDGGNVALHEIDGNIVRVKLQGACGSCPSSTMTMKMGIERRLMEKIPEIVAVEALPDEETGLELNEENIEKVLEEIRPYLIGTADGSLDLVEIEDPIVKIRITGPAAGVMTVRVAVTQKLREKIPSIAAVQLI

SEQ ID NO: 38447 - protein, 235 aa, Arabidopsis thaliana
  peptide (1)..(235): Ceres Seq. ID no. 12421006
MQLLTLNPAAISRTPPQAIDPSSSSSLLLPFPQILSSQRALGLVARPCNPLRRGLSRFLSSRQLFRRSKVVKAVATPDPILEVPLTEENVESVLDEIRPYLMSDGGNVALHEIDGNIVRVKLQGACGSCPSSTMTMKMGIERRLMEKIPEIVAVEALPDEETGLELNEENIEKVLEEIRPYLIGTADGSLDLVEIEDPIVKIRITGPAAGVMTVRVAVTQKLREKIPSIAAVQLI

SEQ ID NO: 38448 - protein, 134 aa, Arabidopsis thaliana
  peptide (1)..(134): Ceres Seq. ID no. 12421007
MSDGGNVALHEIDGNIVRVKLQGACGSCPSSTMTMKMGIERRLMEKIPEIVAVEALPDEETGLELNEENIEKVLEEIRPYLIGTADGSLDLVEIEDPIVKIRITGPAAGVMTVRVAVTQKLREKIPSIAAVQLI

SEQ ID NO: 38449 - DNA, 1207 bp, Arabidopsis thaliana
  misc_feature (1)..(1207): Ceres Seq. ID no. 12327556
  misc_feature (1)..(1207): Ortholog of  Ceres SEQ ID NO 13598735 as cited in SEQ ID NO 64586
aagtacattatcatcatttcaagaaacagagagagactaatggcgcaaaaaccacgaacggtgatctgcgtcggagacatccatggatacatatcaaagctcaataacctctggcttaatctccaatctgccatcgacccatcagatttcagctcagctctcgtcatattccttggcgattactgcgatcgtggaccggagactcgaaaagtcatcgatttcttaatctctctgccggagaaacatcccgatcaaactcatgtctttctcgccgggaaccatgactttgccttctctgggttcttaggtttgttgcctcgtccttcagatggatctgatttgaaggatacgtggaaggagtactcaaaaagtgaggagacagaaggatggtatacaggtgaagggttcgaagatatgcatcttcaaggtagaagatgggctggtaaaattaaggctacgttcaattctgtgaaagggatggcttataaaggatcgatttacgatgctggatcgacttttgaatcttatggcgttccacatggatcttctgatttgatgaaggcagtacctgagagtcacaagaagttcttgaccaatatggtatgggttcatgaagaggacgatgtttgtatagaaacagaggaagggcttaagcattgtaagttgatcgccgtacatgctggtttagagaaagggaataacgtagaagaacaactgaagcttttgagagctaaagacactagcatctcaaaaatacaacatctaagtggtaggaaaaacgtttgggacatcccacaggagctggatgataaacatactgttgttgttagcgggcaccatggaaaacttcacatcgatggtatgagattgatcatcgatgaaggcggtggattcccggataaaccagtggcagcaattgttcttccttccaagaagattatccgtgacaccgataatttgtctagttaagtttttctcatctactattgtaccaaagtcaattttgatttcaaaataaatgtagtaaggtttagcactaaattgaatttacttttcttacaaagaaaataaatgggcctctgaaagagtaagcccagattttggaagcggtctagtggtgtaatgtagctcgaaatcttttgggttgttcaaaaaagcccaaacaaaacatgctataatccatttttaatcgaaattatttttccgc

SEQ ID NO: 38450 - protein, 322 aa, Arabidopsis thaliana
  peptide (1)..(322): Ceres Seq. ID no. 12327557
KYIIIISRNRERLMAQKPRTVICVGDIHGYISKLNNLWLNLQSAIDPSDFSSALVIFLGDYCDRGPETRKVIDFLISLPEKHPDQTHVFLAGNHDFAFSGFLGLLPRPSDGSDLKDTWKEYSKSEETEGWYTGEGFEDMHLQGRRWAGKIKATFNSVKGMAYKGSIYDAGSTFESYGVPHGSSDLMKAVPESHKKFLTNMVWVHEEDDVCIETEEGLKHCKLIAVHAGLEKGNNVEEQLKLLRAKDTSISKIQHLSGRKNVWDIPQELDDKHTVVVSGHHGKLHIDGMRLIIDEGGGFPDKPVAAIVLPSKKIIRDTDNLSS

SEQ ID NO: 38451 - protein, 309 aa, Arabidopsis thaliana
  peptide (1)..(309): Ceres Seq. ID no. 12327558
MAQKPRTVICVGDIHGYISKLNNLWLNLQSAIDPSDFSSALVIFLGDYCDRGPETRKVIDFLISLPEKHPDQTHVFLAGNHDFAFSGFLGLLPRPSDGSDLKDTWKEYSKSEETEGWYTGEGFEDMHLQGRRWAGKIKATFNSVKGMAYKGSIYDAGSTFESYGVPHGSSDLMKAVPESHKKFLTNMVWVHEEDDVCIETEEGLKHCKLIAVHAGLEKGNNVEEQLKLLRAKDTSISKIQHLSGRKNVWDIPQELDDKHTVVVSGHHGKLHIDGMRLIIDEGGGFPDKPVAAIVLPSKKIIRDTDNLSS

SEQ ID NO: 38452 - protein, 184 aa, Arabidopsis thaliana
  peptide (1)..(184): Ceres Seq. ID no. 12327559
MHLQGRRWAGKIKATFNSVKGMAYKGSIYDAGSTFESYGVPHGSSDLMKAVPESHKKFLTNMVWVHEEDDVCIETEEGLKHCKLIAVHAGLEKGNNVEEQLKLLRAKDTSISKIQHLSGRKNVWDIPQELDDKHTVVVSGHHGKLHIDGMRLIIDEGGGFPDKPVAAIVLPSKKIIRDTDNLSS

SEQ ID NO: 38453 - DNA, 1799 bp, Arabidopsis thaliana; identical to SEQ ID NO: 26635
  misc_feature (1)..(1799): Ceres Seq. ID no. 12326657
  misc_feature (1)..(1799): Ortholog of  Ceres SEQ ID NO 13597407 as cited in SEQ ID NO 64106

SEQ ID NO: 38454 - protein, 482 aa, Arabidopsis thaliana; identical to SEQ ID NO: 26636
  peptide (1)..(482): Ceres Seq. ID no. 12326658

SEQ ID NO: 38455 - protein, 440 aa, Arabidopsis thaliana; identical to SEQ ID NO: 26637
  peptide (1)..(440): Ceres Seq. ID no. 12326659

SEQ ID NO: 38456 - protein, 398 aa, Arabidopsis thaliana; identical to SEQ ID NO: 26638
  peptide (1)..(398): Ceres Seq. ID no. 12326660

SEQ ID NO: 38457 - DNA, 793 bp, Arabidopsis thaliana
  misc_feature (1)..(793): Ceres Seq. ID no. 12394112
  misc_feature (1)..(793): Ortholog of  Ceres SEQ ID NO 12473409 as cited in SEQ ID NO 104
  misc_feature (1)..(793): Ortholog of  Ceres SEQ ID NO 15170477 as cited in SEQ ID NO 52825
  misc_feature (1)..(793): Ortholog of  Ceres SEQ ID NO 13595055 as cited in SEQ ID NO 55744
  misc_feature (1)..(793): Ortholog of  Ceres SEQ ID NO 13662009 as cited in SEQ ID NO 61951
aagtcattcaaattgtcacccgtatctgccaaaaaccctctaaccactcaaaaaaatatctctgctctgctccaatggcgtcgttactcgattccgtcaccgtgacccgcgtgttttctctgccgattgcggcttcggtctcgtcttcttcagctgctccgtcggtttcacgacgccggatttctcccgccaggtttctggaattcagaggtttgaagtcttcgcggagtttggtgactcagtcggccagtctgggtgcgaatcgtagaaccagaatcgctcgcggtggacgaatcgcctgtgaggctcaggacaccactgccgccgccgtcgaagtaccaaatctgtctgattcagaatggcaaacaaaggttctggaatcagatgtcccagttctggtcgagttctgggcaccatggtgtggaccttgccgtatgattcaccccatagttgaccagctaggccaaagatttcgcagggaagttcaaattctacaaaatcaacactgacgagagcccaaatacagcaaaccgttacgggatacgaagcgttccaacagtaatcatcttcaaaggcggtgagaagaaagatagcatcattggagctgtgcctagagagacgttggagaaaactatagaaagattcttggtcgagtaacaaaatttgactcttttgtcactctgaaccattttaccttatcttctctcttgtaatctctgtaaagtcttttaagtttttgactattatgttatcgtgggtcctctttgtcttcttcaataaaaaaaatggaaac

SEQ ID NO: 38458 - protein, 168 aa, Arabidopsis thaliana
  peptide (1)..(168): Ceres Seq. ID no. 12394113
VIQIVTRICQKPSNHSKKYLCSAPMASLLDSVTVTRVFSLPIAASVSSSSAAPSVSRRRISPARFLEFRGLKSSRSLVTQSASLGANRRTRIARGGRIACEAQDTTAAAVEVPNLSDSEWQTKVLESDVPVLVEFWAPWCGPCRMIHPIVDQLGQRFRREVQILQNQH

SEQ ID NO: 38459 - protein, 144 aa, Arabidopsis thaliana
  peptide (1)..(144): Ceres Seq. ID no. 12394114
MASLLDSVTVTRVFSLPIAASVSSSSAAPSVSRRRISPARFLEFRGLKSSRSLVTQSASLGANRRTRIARGGRIACEAQDTTAAAVEVPNLSDSEWQTKVLESDVPVLVEFWAPWCGPCRMIHPIVDQLGQRFRREVQILQNQH

SEQ ID NO: 38460 - DNA, 1175 bp, Arabidopsis thaliana
  misc_feature (1)..(1175): Ceres Seq. ID no. 13489378
  misc_feature (1)..(1175): Ortholog of  Ceres SEQ ID NO 15225507 as cited in SEQ ID NO 55551
  misc_feature (1)..(1175): Ortholog of  Ceres SEQ ID NO 15225677 as cited in SEQ ID NO 0
atcaattcaataaggaggaggaatagagagctaaagaaaaagaaaaaagactacatttctacaaggacgttggttcttttagtcgtcgtcggtcgtcgaagaaagatcttctccttctttcttcgccgtacgatcgtcgtctaatgggagaatcatcaaatccaatggctacaagttcttcttcctcctcctcctcaattcctccttcgtctccaacaccctctccgacgtccacaaccactccgccacgtcaacatcctctcctccagccaccatcttcaaaaaagaagaaaaacagaacaaacgttttcagagtcttacgcaccgtgtttcgatctttcccaatctttacaacaccatccgtagcatgcaaaatcccggttatacatcccggtttaggcttaccggatccacatcacaacacgtcaagaatcaccggaacgttattcggataccgtaaaggccgagtaagtctttccattcaagaaaaccctaaatgtttaccttctttagtcgtggagctcgccatgcaaaccacaacgcttcaaaaagagctaagcacgggaatggtgagaatagctctcgagactgagaaacagcctcgagctgataataacaattctaaaaccgagaagaagacagatattttggaagaaccgttatggacaatgtattgtaaaggagagaaaacgggttacggtgtgaaacgagaagcgaccgaagaagatcttaacgtgatggagttgttacgtccggtgtctatgggcgccggagttttgccgggaaactcggagtcggaaggacccgacggcgaaatggcgtatatgagagcttattttgagagagttattgggtctaaagattcagagactttttatatgttgagtcctgaagggaataatggacccgaacttagctttttctttgtgagagtttgacttattttgttatggttcaaattaatgtaacgtgtatgtaaatgaccggaaacggcggtggtcgtcgacgttatatactattgtttaggataattgtaagaattttttgttgttctttcgttgttaatctctcgatctttataaaaagattgaattgtaagtgtgtgtatatacacacttcttcgtcctgaaaggaaatgtatgtgatgacattggataggaggaggtttaattgac

SEQ ID NO: 38461 - protein, 264 aa, Arabidopsis thaliana
  peptide (1)..(264): Ceres Seq. ID no. 13489379
MGESSNPMATSSSSSSSSIPPSSPTPSPTSTTTPPRQHPLLQPPSSKKKKNRTNVFRVLRTVFRSFPIFTTPSVACKIPVIHPGLGLPDPHHNTSRITGTLFGYRKGRVSLSIQENPKCLPSLVVELAMQTTTLQKELSTGMVRIALETEKQPRADNNNSKTEKKTDILEEPLWTMYCKGEKTGYGVKREATEEDLNVMELLRPVSMGAGVLPGNSESEGPDGEMAYMRAYFERVIGSKDSETFYMLSPEGNNGPELSFFFVRV

SEQ ID NO: 38462 - protein, 257 aa, Arabidopsis thaliana
  peptide (1)..(257): Ceres Seq. ID no. 13489380
MATSSSSSSSSIPPSSPTPSPTSTTTPPRQHPLLQPPSSKKKKNRTNVFRVLRTVFRSFPIFTTPSVACKIPVIHPGLGLPDPHHNTSRITGTLFGYRKGRVSLSIQENPKCLPSLVVELAMQTTTLQKELSTGMVRIALETEKQPRADNNNSKTEKKTDILEEPLWTMYCKGEKTGYGVKREATEEDLNVMELLRPVSMGAGVLPGNSESEGPDGEMAYMRAYFERVIGSKDSETFYMLSPEGNNGPELSFFFVRV

SEQ ID NO: 38463 - protein, 136 aa, Arabidopsis thaliana
  peptide (1)..(136): Ceres Seq. ID no. 13489381
MQTTTLQKELSTGMVRIALETEKQPRADNNNSKTEKKTDILEEPLWTMYCKGEKTGYGVKREATEEDLNVMELLRPVSMGAGVLPGNSESEGPDGEMAYMRAYFERVIGSKDSETFYMLSPEGNNGPELSFFFVRV

SEQ ID NO: 38464 - DNA, 798 bp, Arabidopsis thaliana
  misc_feature (1)..(798): Ceres Seq. ID no. 12562120
  misc_feature (1)..(798): Ortholog of  Ceres SEQ ID NO 14316382 as cited in SEQ ID NO 57756
atctgtcgaaagctcagtcatcactagacagttggaagcaacacattgtctccaagaacccgagaatagaaaattgccgtgcaatcttgagcagccttgttcagaccttgaatctccccaaggaaaaactcggccaaagggaaagtcttgatgagagctctatatggtgtaaaggttaagaccttatacatctctggtgtttttgctgcagcgttctcaggttcatcgcagaatctgatgtaccttacagtctcaaacgagcttccatgggcacaatcattcatggaagtgcagaacaccatgaacgcagaaatcaagaacatatttttgtcagacgggttaacggttctgaaagagctagaggcagttgcttcaggtgtcaagaaactctaccctgcgatccaacaaggatcaatagatcccatatcgctgcagccactgaaggactcggtcacagaattatcgaatgggatagatcttgtttcgaaagaagtggattgtttcttcaagattctgttatcggggagagacacattactagagaacctaaggtcgatgggtgcatcaaccctacaggcaacatcgccaaaaaaggctgccggaaaaaattacagaggattctgataaactataaatgtttgtacagatggttttacttcaagtgttccatcttcttggtattgaatgtattattaggtgtttgtgcaatcgtagtcgtttgtatgagatgctttgaaagtagtagttgtataagtaaaggttttaccaacttatctatatatattatgaatatctttg

SEQ ID NO: 38465 - protein, 177 aa, Arabidopsis thaliana
  peptide (1)..(177): Ceres Seq. ID no. 12562121
MGTIIHGSAEHHERRNQEHIFVRRVNGSERARGSCFRCQETLPCDPTRINRSHIAAATEGLGHRIIEWDRSCFERSGLFLQDSVIGERHITREPKVDGCINPTGNIAKKGCRKKLQRILINYKCLYRWFYFKCSIFLVLNVLLGVCAIVVVCMRCFESSSCISKGFTNLSIYIMNIF

SEQ ID NO: 38466 - protein, 157 aa, Arabidopsis thaliana
  peptide (1)..(157): Ceres Seq. ID no. 12562122
MRALYGVKVKTLYISGVFAAAFSGSSQNLMYLTVSNELPWAQSFMEVQNTMNAEIKNIFLSDGLTVLKELEAVASGVKKLYPAIQQGSIDPISLQPLKDSVTELSNGIDLVSKEVDCFFKILLSGRDTLLENLRSMGASTLQATSPKKAAGKNYRGF

SEQ ID NO: 38467 - protein, 128 aa, Arabidopsis thaliana
  peptide (1)..(128): Ceres Seq. ID no. 12562123
MYLTVSNELPWAQSFMEVQNTMNAEIKNIFLSDGLTVLKELEAVASGVKKLYPAIQQGSIDPISLQPLKDSVTELSNGIDLVSKEVDCFFKILLSGRDTLLENLRSMGASTLQATSPKKAAGKNYRGF

SEQ ID NO: 38468 - DNA, 2957 bp, Arabidopsis thaliana
  misc_feature (1)..(2957): Ceres Seq. ID no. 12560451
  misc_feature (1)..(2957): Ortholog of  Ceres SEQ ID NO 13595870 as cited in SEQ ID NO 62101
  misc_feature (1)..(2957): Ortholog of  Ceres SEQ ID NO 13590241 as cited in SEQ ID NO 63878
  misc_feature (1)..(2957): Ortholog of  Ceres SEQ ID NO 13657939 as cited in SEQ ID NO 66349
ataaaccttctcttctctcgataaacttcagatattaaaaaacccaaacttttatttcccccaatcaaaaaccctaatttcttcttatcttgtttggatttttcatttcttctgtttgattttattccacaaacacaataaaaaagtttgcattttttcctcttctaagctcgtttcagatcttcgatttcaccatttttataaactattatgcgaacttagttttgttctttgtgattttgtatgacaatgatcttcttctctaagcttaatcgctccatttctcgttcaaagggatttttgtacggtggtggtgttagatcggcggcaaggctacttacttcgccgggacttgaggcggcgtctgtgaatgaagtggaaggtggattagggtttataagaagacactttgcttctttagcttcacggaagggtttagtcaataatgatttgattggtgtttttgctaatccaagacttcgtagattcttctctgatgaagctcctaagaagaagaattatgagaactattttcctaaagataagcaagaacccaagagtgatcagaaatcagagcataaagagggttcagaaaagaatgaaaatgagaatgtgggagatatgttcatgaaccgattccaaaatttgctaattcctctactagctcttgctgtattcttttctactttctcgtttggctctggggaacaacaacagataagtttccaggagttcaaaaacaagctactcgagcctggtttagttgaccacatagatgtttcaaacaaatcagtagcaaaagtctacgtgaggagcacaccgaaagaccaacaaacaactgacgttgtccatggtaatggtaacggtattcctgctaaaagaactggtggtcagtataagtactacttcaatatcggtagtgttgattcttttgaggagaaactcgaagaagctcaagaagcgttaggtgttgatcgtcatgaatatgttcctgtcacatacgtctctgaaatggtctggtatcaagagttcatgaggtttgcaccgactttgttgctcttgggtactctgatctatggtgcgagacggatgcaaggtggattgggtgtaggaggaactggcggtaagaatggtcgtggaattttcaatataggcaaagctacaataacgagagctgataaacattccaagaataagatttatttcaaggatgttgctggatgtgacgaggctaaacaagaaattatggagtttgtacatttccttaagaacccaaagaagtatgaagatttgggtgctaaaattccgaaaggtgcacttttagtcggtccgcctggaaccggaaagacccttttagcaaaagccacagcaggagaatctggtgtgccatttctgtctatttctggctcagatttcatggagatgtttgttggtgttgggccttcgagggtgagacatttgttccaagaggcgagacaagctgcaccgagcattatatttatcgatgagattgatgctattggtcgggcaagaggtcgtggaggtttaggcggaaatgatgagcgtgaaagcactctgaatcagttgctagttgaaatggatggttttggtacaaccgctggtgttgtggttcttgctggaaccaacagaccggatattttggataaagctttgttaaggcctggacgttttgatcgccagataactattgataaacctgatatcaaagggcgtgatcagattttcaagatttacttgaagaagatcaaacttgatcatgagccatcatattactctcaaaggcttgctgctctcactcccgggtttgcaggagctgacattgcgaatgtctgtaacgaagcagctcttattgctgctagacacgaaggagcaacggttactatggcacactttgaatctgcgattgatcgtgttattggtggtcttgagaagaaaaaccgggtgataagcaagttggagcgacgtacagttgcatatcatgaatctggtcacgcagttgtagggtggttccttgaacatgcagagccgttactgaaagtgactattgtaccacgtggcacagcggctctcggatttgcacaatacgttccaaacgaaaaccttctcatgaccaaagagcaactctttgacatgacttgcatgactctcggaggccgtgcagctgagcaggtattgataggtaaaatctcaacgggtgcgcagaacgatctagagaaggtgacgaagatgacttacgcgcaagtagctgtgtatggtttcagtgacaaggttgggctactctcgtttccaccaagggatgatggctacgacttctctaaaccatacagcaacaaaaccggtgctatcatagacgaagaagttagggactgggtggccaaagcttatgagcggaccgtagagctggttgaggaacacaaagtgaaagtggctgagatcgccgagcttttactagagaaagaggtgttgcatcaggatgatctcttaaaaattttaggtgaacgtccgtttaagtcagctgaggtcactaattatgaccggttcaagtctgggtttgaagagactgagaaggactcagccgccacccctacagtggagcctgtggtggatgatggagctcccccgccgtttgaaccccaggttgttccgacgtaagagaaacgtcactgttacaactgtaaatttgatcaagtatgcaataacacaattcaaaaaaagcattctcttgttcttcaatgtttttagtgacgacggaatttgttagcaatgaacattttttgttttctaaattattgcttctaataagatttttatttgcttttcagtctcattcttatagtttgcgttttgtaataaaggattgaatatgatgatgatattgttacatcttccaatatttaccaaataccatcatgtaagaatgatggcatcatgtgtct

SEQ ID NO: 38469 - protein, 809 aa, Arabidopsis thaliana
  peptide (1)..(809): Ceres Seq. ID no. 12560452
MTMIFFSKLNRSISRSKGFLYGGGVRSAARLLTSPGLEAASVNEVEGGLGFIRRHFASLASRKGLVNNDLIGVFANPRLRRFFSDEAPKKKNYENYFPKDKQEPKSDQKSEHKEGSEKNENENVGDMFMNRFQNLLIPLLALAVFFSTFSFGSGEQQQISFQEFKNKLLEPGLVDHIDVSNKSVAKVYVRSTPKDQQTTDVVHGNGNGIPAKRTGGQYKYYFNIGSVDSFEEKLEEAQEALGVDRHEYVPVTYVSEMVWYQEFMRFAPTLLLLGTLIYGARRMQGGLGVGGTGGKNGRGIFNIGKATITRADKHSKNKIYFKDVAGCDEAKQEIMEFVHFLKNPKKYEDLGAKIPKGALLVGPPGTGKTLLAKATAGESGVPFLSISGSDFMEMFVGVGPSRVRHLFQEARQAAPSIIFIDEIDAIGRARGRGGLGGNDERESTLNQLLVEMDGFGTTAGVVVLAGTNRPDILDKALLRPGRFDRQITIDKPDIKGRDQIFKIYLKKIKLDHEPSYYSQRLAALTPGFAGADIANVCNEAALIAARHEGATVTMAHFESAIDRVIGGLEKKNRVISKLERRTVAYHESGHAVVGWFLEHAEPLLKVTIVPRGTAALGFAQYVPNENLLMTKEQLFDMTCMTLGGRAAEQVLIGKISTGAQNDLEKVTKMTYAQVAVYGFSDKVGLLSFPPRDDGYDFSKPYSNKTGAIIDEEVRDWVAKAYERTVELVEEHKVKVAEIAELLLEKEVLHQDDLLKILGERPFKSAEVTNYDRFKSGFEETEKDSAATPTVEPVVDDGAPPPFEPQVVPT

SEQ ID NO: 38470 - protein, 807 aa, Arabidopsis thaliana
  peptide (1)..(807): Ceres Seq. ID no. 12560453
MIFFSKLNRSISRSKGFLYGGGVRSAARLLTSPGLEAASVNEVEGGLGFIRRHFASLASRKGLVNNDLIGVFANPRLRRFFSDEAPKKKNYENYFPKDKQEPKSDQKSEHKEGSEKNENENVGDMFMNRFQNLLIPLLALAVFFSTFSFGSGEQQQISFQEFKNKLLEPGLVDHIDVSNKSVAKVYVRSTPKDQQTTDVVHGNGNGIPAKRTGGQYKYYFNIGSVDSFEEKLEEAQEALGVDRHEYVPVTYVSEMVWYQEFMRFAPTLLLLGTLIYGARRMQGGLGVGGTGGKNGRGIFNIGKATITRADKHSKNKIYFKDVAGCDEAKQEIMEFVHFLKNPKKYEDLGAKIPKGALLVGPPGTGKTLLAKATAGESGVPFLSISGSDFMEMFVGVGPSRVRHLFQEARQAAPSIIFIDEIDAIGRARGRGGLGGNDERESTLNQLLVEMDGFGTTAGVVVLAGTNRPDILDKALLRPGRFDRQITIDKPDIKGRDQIFKIYLKKIKLDHEPSYYSQRLAALTPGFAGADIANVCNEAALIAARHEGATVTMAHFESAIDRVIGGLEKKNRVISKLERRTVAYHESGHAVVGWFLEHAEPLLKVTIVPRGTAALGFAQYVPNENLLMTKEQLFDMTCMTLGGRAAEQVLIGKISTGAQNDLEKVTKMTYAQVAVYGFSDKVGLLSFPPRDDGYDFSKPYSNKTGAIIDEEVRDWVAKAYERTVELVEEHKVKVAEIAELLLEKEVLHQDDLLKILGERPFKSAEVTNYDRFKSGFEETEKDSAATPTVEPVVDDGAPPPFEPQVVPT

SEQ ID NO: 38471 - protein, 683 aa, Arabidopsis thaliana
  peptide (1)..(683): Ceres Seq. ID no. 12560454
MFMNRFQNLLIPLLALAVFFSTFSFGSGEQQQISFQEFKNKLLEPGLVDHIDVSNKSVAKVYVRSTPKDQQTTDVVHGNGNGIPAKRTGGQYKYYFNIGSVDSFEEKLEEAQEALGVDRHEYVPVTYVSEMVWYQEFMRFAPTLLLLGTLIYGARRMQGGLGVGGTGGKNGRGIFNIGKATITRADKHSKNKIYFKDVAGCDEAKQEIMEFVHFLKNPKKYEDLGAKIPKGALLVGPPGTGKTLLAKATAGESGVPFLSISGSDFMEMFVGVGPSRVRHLFQEARQAAPSIIFIDEIDAIGRARGRGGLGGNDERESTLNQLLVEMDGFGTTAGVVVLAGTNRPDILDKALLRPGRFDRQITIDKPDIKGRDQIFKIYLKKIKLDHEPSYYSQRLAALTPGFAGADIANVCNEAALIAARHEGATVTMAHFESAIDRVIGGLEKKNRVISKLERRTVAYHESGHAVVGWFLEHAEPLLKVTIVPRGTAALGFAQYVPNENLLMTKEQLFDMTCMTLGGRAAEQVLIGKISTGAQNDLEKVTKMTYAQVAVYGFSDKVGLLSFPPRDDGYDFSKPYSNKTGAIIDEEVRDWVAKAYERTVELVEEHKVKVAEIAELLLEKEVLHQDDLLKILGERPFKSAEVTNYDRFKSGFEETEKDSAATPTVEPVVDDGAPPPFEPQVVPT

SEQ ID NO: 38472 - DNA, 956 bp, Arabidopsis thaliana
  misc_feature (1)..(956): Ceres Seq. ID no. 12326661
  misc_feature (1)..(956): Ortholog of  Ceres SEQ ID NO 14306138 as cited in SEQ ID NO 57513
atgattggtggtttcttcgccgatgttaaattcaacagatcgagagagaaaaaactctctctccctcctccgttcaccgtcgcgactcggctctacagtacattttgttgagcaatctcgtatttagaggattccaatgtctggcgcagaggataataaatcttcccatgctcagctttcgtcccaaatttttcttgatcttgtggattcggtgatagctgatgtagcatctgagtgtcatcgggtagcacgactaggacttgatcgtgatttggatatagtagaagaagagttgagattgtcagtggaagcgcgtgcgaagatcgctgatcctagcaacaacctcgaaaccaacaccaaatatgttgttgatatatttgggcagactcaccctcctgtagctagtgaagtgttcaattgcatgaactgtgggcgacaaattgttgcaggaaggtttgctcctcatctcgaaaaatgcatgggaaagggaagaaaggctcgtgccaagacaaccagaagcacaacggctgcacagaaccggaatgcacgacgcagccccaatccacgatattctccttatccaaattctgctagtgagaaccagttagcaagtggatcacctggtgttgcaggtgaagactgctcaaatttcacagttcgagagaacgtgaaaggagactgaagtacaactgatgagaggcttatactgattactgaacgacaatgtggctagtaactgactcgaccagactggtataaatcgaattgctaggtttatattcagttcacaaaaaaagagagaaaagcggcgcaaaaggaaaagtagcggaggttcataatgtagctatttctacagcttactaatggggtatcaatatattagtacatgcaccatcatgttataattacaaaaaactctgtagagtcctcaatcaaacagttcccactgttgtgtt

SEQ ID NO: 38473 - protein, 181 aa, Arabidopsis thaliana
  peptide (1)..(181): Ceres Seq. ID no. 12326662
MSGAEDNKSSHAQLSSQIFLDLVDSVIADVASECHRVARLGLDRDLDIVEEELRLSVEARAKIADPSNNLETNTKYVVDIFGQTHPPVASEVFNCMNCGRQIVAGRFAPHLEKCMGKGRKARAKTTRSTTAAQNRNARRSPNPRYSPYPNSASENQLASGSPGVAGEDCSNFTVRENVKGD

SEQ ID NO: 38474 - DNA, 1116 bp, Arabidopsis thaliana
  misc_feature (1)..(1116): Ceres Seq. ID no. 12422005
  misc_feature (1)..(1116): Ortholog of  Ceres SEQ ID NO 14313060 as cited in SEQ ID NO 59447
  misc_feature (1)..(1116): Ortholog of  Ceres SEQ ID NO 12624676 as cited in SEQ ID NO 61197
cccaaagtcggcggaagaagatggtgtcgccgaaaatagcaccgtcgatgctgtcatcggacttcgcaaatctagcggcggaggccaatcggatgatcgatttgggcgctaactggcttcacatggatattatggacgggtaaaatttgctgccttacctgtggattcttattagcatccaaacccagcttgtaacatttttgtttcaagatagtttggtataataactctgtgtagctcccgcaggcattttgtccctaatcttacgattggtgctcctgtcatcgagagtttgcgaaagcacactaatgcatatcttgattgccaccttatggtgacgaaccccatggattacgttgcacagatggctaaagctggggcttctggtttcacattccacgtcgaggtggcccaagataattggcaacaacttgtcgagaagattaagtctactgggatgagaccaggcgtggctctaaagcctggaacacctgttgaacaagtctatcctctggttgaagggacaactccggttgaaatggttcttgtgatgactgtagaacctggatttggaggccagaagtttatgcctgacatgatggacaaggtccgggcattgaggcaaaaatacccaacacttgatattcaggtggatggcggcttaggcccttcaacgatcgacacagcggctgcagcaggcgccaactgtattgttgctggaagttcagtgtttggagctccggagccaggagatgtcatctcccttctgaggaccagtgttgagaaagcccaacccaccacttgaaagctgcacgtggtggcggtggtgctgagacggcgttgtattctcatcggaagatggtacctcttcgtttctctcaaggttaaaaagctggtcctttatgttttaaaatcatctcgtgaatcgtgatacttagtcttggttccaagaactgtataacgtcattttgagttattaattccctcaccacacagattatttcataggagttgggtaccaagagtagtgtgcaatgtataattagtaatttaataaacgtattaggttcagtcattttggaatggttataattatgaatacaagtatacaacatg

SEQ ID NO: 38475 - protein, 157 aa, Arabidopsis thaliana
  peptide (1)..(157): Ceres Seq. ID no. 12422006
MVTNPMDYVAQMAKAGASGFTFHVEVAQDNWQQLVEKIKSTGMRPGVALKPGTPVEQVYPLVEGTTPVEMVLVMTVEPGFGGQKFMPDMMDKVRALRQKYPTLDIQVDGGLGPSTIDTAAAAGANCIVAGSSVFGAPEPGDVISLLRTSVEKAQPTT

SEQ ID NO: 38476 - protein, 152 aa, Arabidopsis thaliana
  peptide (1)..(152): Ceres Seq. ID no. 12422007
MDYVAQMAKAGASGFTFHVEVAQDNWQQLVEKIKSTGMRPGVALKPGTPVEQVYPLVEGTTPVEMVLVMTVEPGFGGQKFMPDMMDKVRALRQKYPTLDIQVDGGLGPSTIDTAAAAGANCIVAGSSVFGAPEPGDVISLLRTSVEKAQPTT

SEQ ID NO: 38477 - protein, 146 aa, Arabidopsis thaliana
  peptide (1)..(146): Ceres Seq. ID no. 12422008
MAKAGASGFTFHVEVAQDNWQQLVEKIKSTGMRPGVALKPGTPVEQVYPLVEGTTPVEMVLVMTVEPGFGGQKFMPDMMDKVRALRQKYPTLDIQVDGGLGPSTIDTAAAAGANCIVAGSSVFGAPEPGDVISLLRTSVEKAQPTT

SEQ ID NO: 38478 - DNA, 1359 bp, Arabidopsis thaliana
  misc_feature (1)..(1359): Ceres Seq. ID no. 12328518
atactaaatcatcaccccaacactacaaagaagaaacacactctatctctctgtctcaatacatatttcctcacttctgatcagtgtgatcacgtagagtgccttgaaggagaagaaggaaacaaaaagaaataaaaatgggataccttatagaagaaactttaagctctaactctaaaaccccaattgttatcgatgatgataacgagttgggtttgatggccgtgagactagccaatgctgctgcctttccgatggttctcaaagccgccctcgagctcggtgtctttgacactctctatgctgaagcctctcgcagcgactcgttcctttcaccatcagaaatagcgagtaagctaccaactacacctcgtaaccctgaggctccggttttattggaccgtatgcttcgtctactcgctagctattctgtggtcaagtgtggtaaggtctcataaggaaagggtgagagggtctacagagccgagccaatttgcaggtttttcttgaaggataacattcaagatattggatcccttgcttctcaagtcattgtcaatttcgatagcgtcttcctcaatacttgggcacaattgaaagacgtggttctagaaggaggagatgcatttggccgcgcacatggtggtatgaagctctttgactatatgggtacagatgagagattcagcaaactatttaaccagaccggttttaccattgcggtggtgaagaaggctcttgaagtttaccaaggcttcaaagatgtggatgtgttggttgatgtgggaggtggagttggtaacactcttggtgttgtaacatctaagtatcccaatattaagggtatcaattttgatctaacttgcgccttggcacaagcaccctcttatcccggtgtggaacatgttgctggagatatgtttgtggatattccaaccggagatgctatgatcttgaaacgtatacttcatgattggaccgacgaagactgtgtgaagattcttaagaattgttggaaatcacttccagaaaacggtaaagtggttgtcatagaattagtcactcctgatgaggcagagaatggagacatcaacgcaaacattgcctttgacatggacatgttaatgttcacacaatgttccggaggaaaagagagatcaagagctgagtttgaagctttggctgcagcttctggctttacccattgcaagttcgtttgccaagcttatcactgctggattattgagttctgtaaataaaatgtgtgaaatgtaaaacaaaatcgtcgttaattatttattttcatctttgttgtcattctttcttgatatctttctcgtcgagtaataaaagtgtttt

SEQ ID NO: 38479 - protein, 203 aa, Arabidopsis thaliana
  peptide (1)..(203): Ceres Seq. ID no. 12328519
MKLFDYMGTDERFSKLFNQTGFTIAVVKKALEVYQGFKDVDVLVDVGGGVGNTLGVVTSKYPNIKGINFDLTCALAQAPSYPGVEHVAGDMFVDIPTGDAMILKRILHDWTDEDCVKILKNCWKSLPENGKVVVIELVTPDEAENGDINANIAFDMDMLMFTQCSGGKERSRAEFEALAAASGFTHCKFVCQAYHCWIIEFCK

SEQ ID NO: 38480 - protein, 197 aa, Arabidopsis thaliana
  peptide (1)..(197): Ceres Seq. ID no. 12328520
MGTDERFSKLFNQTGFTIAVVKKALEVYQGFKDVDVLVDVGGGVGNTLGVVTSKYPNIKGINFDLTCALAQAPSYPGVEHVAGDMFVDIPTGDAMILKRILHDWTDEDCVKILKNCWKSLPENGKVVVIELVTPDEAENGDINANIAFDMDMLMFTQCSGGKERSRAEFEALAAASGFTHCKFVCQAYHCWIIEFCK

SEQ ID NO: 38481 - protein, 113 aa, Arabidopsis thaliana
  peptide (1)..(113): Ceres Seq. ID no. 12328521
MFVDIPTGDAMILKRILHDWTDEDCVKILKNCWKSLPENGKVVVIELVTPDEAENGDINANIAFDMDMLMFTQCSGGKERSRAEFEALAAASGFTHCKFVCQAYHCWIIEFCK

SEQ ID NO: 38482 - DNA, 1110 bp, Arabidopsis thaliana
  misc_feature (1)..(1110): Ceres Seq. ID no. 12711308
  misc_feature (1)..(1110): Ortholog of  Ceres SEQ ID NO 12617391 as cited in SEQ ID NO 64114
  misc_feature (1)..(1110): Ortholog of  Ceres SEQ ID NO 13595922 as cited in SEQ ID NO 69293
  misc_feature (1)..(1110): Ortholog of  Ceres SEQ ID NO 12635496 as cited in SEQ ID NO 0
acattctgagaagaagaagaagaaaataagaaaaaacaaaagatgaaaaccattatcctttttgtaacatttcttgctctttcttcttcatctctagccgatgagacagagactgaatttcattacaaacccggtgagatagccgatccctcgaaatggagcagtatcaaggctgaatggaaaatttgcgggacagggaagaggcaatcgccaatcaatcttactccaaaaatagctcgcattgttcacaattctacagagattcttcagacatattacaaacctgtagaggctattcttaagaaccgtggattcgacatgaaggttaagtgggaagacgatgcagggaagatcgtgatcaatgataccgactataaattggttcaaagccactggcacgcaccttcagagcattttctcgatggacagaggttggcaatggaacttcacatggtacacaaaagtgtagaagggcacttggcagtgattggagttctcttcagagaaggagaaccaaatgctttcatttcgcggatcatggacaagatccataagatcgcagacgtacaagatggagaggtcagcatcggaaagatagatccaagagaatttggatgggatcttacaaagttttatgaatacagaggttctctcacgactcctccttgcacggaagatgtcatgtggaccatcatcaacaaggtggggactgtttcacgtgagcaaattgatgtattgacagatgctcgtcgcggtggttatgagaagaacgcgagaccagctcaacctctgaacggacgtctggtttatttaaacgagcagtccagtccaagtccaactccacggctaagaataccacgagttggtccggtctaagacagtcttataggacaaggcaactccgagccctaatttccatacaaagaaaattcggaaaagaattttgaagatgtatgaaaattgggagccataactatttttttttaactattcttttgattaaaagataaaactacgcaatattatatgcataaagtttttcttttatacatgtattccaataaacaagatgtaataatatccaaccataatgagttgtttgattatttt

SEQ ID NO: 38483 - protein, 277 aa, Arabidopsis thaliana
  peptide (1)..(277): Ceres Seq. ID no. 12711309
MKTIILFVTFLALSSSSLADETETEFHYKPGEIADPSKWSSIKAEWKICGTGKRQSPINLTPKIARIVHNSTEILQTYYKPVEAILKNRGFDMKVKWEDDAGKIVINDTDYKLVQSHWHAPSEHFLDGQRLAMELHMVHKSVEGHLAVIGVLFREGEPNAFISRIMDKIHKIADVQDGEVSIGKIDPREFGWDLTKFYEYRGSLTTPPCTEDVMWTIINKVGTVSREQIDVLTDARRGGYEKNARPAQPLNGRLVYLNEQSSPSPTPRLRIPRVGPV

SEQ ID NO: 38484 - protein, 185 aa, Arabidopsis thaliana
  peptide (1)..(185): Ceres Seq. ID no. 12711310
MKVKWEDDAGKIVINDTDYKLVQSHWHAPSEHFLDGQRLAMELHMVHKSVEGHLAVIGVLFREGEPNAFISRIMDKIHKIADVQDGEVSIGKIDPREFGWDLTKFYEYRGSLTTPPCTEDVMWTIINKVGTVSREQIDVLTDARRGGYEKNARPAQPLNGRLVYLNEQSSPSPTPRLRIPRVGPV

SEQ ID NO: 38485 - protein, 145 aa, Arabidopsis thaliana
  peptide (1)..(145): Ceres Seq. ID no. 12711311
MELHMVHKSVEGHLAVIGVLFREGEPNAFISRIMDKIHKIADVQDGEVSIGKIDPREFGWDLTKFYEYRGSLTTPPCTEDVMWTIINKVGTVSREQIDVLTDARRGGYEKNARPAQPLNGRLVYLNEQSSPSPTPRLRIPRVGPV

SEQ ID NO: 38486 - DNA, 1503 bp, Arabidopsis thaliana
  misc_feature (1)..(1503): Ceres Seq. ID no. 12328773
  misc_feature (1)..(1503): Ortholog of  Ceres SEQ ID NO 15171245 as cited in SEQ ID NO 52264
  misc_feature (1)..(1503): Ortholog of  Ceres SEQ ID NO 14303576 as cited in SEQ ID NO 68428
cttctctttcctctctctcacacacatcttcgagaagtttccgccggcgggagagatcaaagacaactgctgatcagaaatcagagatcagagatatgaacattctcttctccagattctcctttttgcttctgtttctctgttcttggaccattttcactttcaccacaacagaagcttatgatgcacttgatccatatggaaacattactataaaatgggatattatgagctggactggtgatggttatgtggctgttgtaacaatctttaatttccaacaataccgtcacatagaggcgccggggtggcaattaggatggagttggatgaagaaggaagtaatatggagtatggttggtggtcaagcaacagaacaaggagattgttctaagtttaagggtaacattcctcattgctgcaagaaaactccggctatcgttgatttgttaccgggaactccttataaccagcagatatccaactgttgtagagggggtgtgattagcgcgtgggcacaagaccccgcaaccgcgatttcttcgtttcagatcagtgttggccagtctggaacaactaatactacggttagagcacctaggaatataactttgaaggctccaggacctggttacacttgcgggcctgcaaaactcgttaagccgagtagattcatttccgcggataaacgaagaaagactcagtctttgcttacatggaacattacttgcacatattcgcagtttctagcacggaaaactccgacttgttgtgtctcactctcagccttctacaatgaaactatagtaccatgtccaacttgttcttgtggatgtcaaaatagttctcaagctggtacatgtgttgaccctaaaatagcttcagtagtaccagccttagggaagaacaacctcgaacctctcttgcaatgtacgcaacatatgtgtcccattcgagttcattggcatgtaaaaactagctacaaagagtactggagagtgaaggttgccatcacaaactttaactacaatatgaactactctcagtggaacttagtctttcagcatcccaacttcgacaatctcactcagcttttcagtttcaactacaaaccgcttaatccttacttgaacataaatgacacggccatgctatggggaatcaagttctacaatgattttttaagccaagctggtccagtaggcaatgtacagtcagagcttctcttccaaaagaacccattggagttcacattcgagaaaggatgggcgtttccgaggcgcatatacttcaacggtgataactgcgttatgccacctccagactcttatccatggcttccaaacgctagtccaaacattgcaacctcgccatttgtcatacttctcatcactttcttatctgttttgattcttatgtaaatggatatctatataccgtcatggacatgtttggtgatgtttacattataagtgagtgtgttattaggaaatcattctttgc

SEQ ID NO: 38487 - protein, 472 aa, Arabidopsis thaliana
  peptide (1)..(472): Ceres Seq. ID no. 12328774
SLSSLSHTSSRSFRRRERSKTTADQKSEIRDMNILFSRFSFLLLFLCSWTIFTFTTTEAYDALDPYGNITIKWDIMSWTGDGYVAVVTIFNFQQYRHIEAPGWQLGWSWMKKEVIWSMVGGQATEQGDCSKFKGNIPHCCKKTPAIVDLLPGTPYNQQISNCCRGGVISAWAQDPATAISSFQISVGQSGTTNTTVRAPRNITLKAPGPGYTCGPAKLVKPSRFISADKRRKTQSLLTWNITCTYSQFLARKTPTCCVSLSAFYNETIVPCPTCSCGCQNSSQAGTCVDPKIASVVPALGKNNLEPLLQCTQHMCPIRVHWHVKTSYKEYWRVKVAITNFNYNMNYSQWNLVFQHPNFDNLTQLFSFNYKPLNPYLNINDTAMLWGIKFYNDFLSQAGPVGNVQSELLFQKNPLEFTFEKGWAFPRRIYFNGDNCVMPPPDSYPWLPNASPNIATSPFVILLITFLSVLILM

SEQ ID NO: 38488 - protein, 441 aa, Arabidopsis thaliana
  peptide (1)..(441): Ceres Seq. ID no. 12328775
MNILFSRFSFLLLFLCSWTIFTFTTTEAYDALDPYGNITIKWDIMSWTGDGYVAVVTIFNFQQYRHIEAPGWQLGWSWMKKEVIWSMVGGQATEQGDCSKFKGNIPHCCKKTPAIVDLLPGTPYNQQISNCCRGGVISAWAQDPATAISSFQISVGQSGTTNTTVRAPRNITLKAPGPGYTCGPAKLVKPSRFISADKRRKTQSLLTWNITCTYSQFLARKTPTCCVSLSAFYNETIVPCPTCSCGCQNSSQAGTCVDPKIASVVPALGKNNLEPLLQCTQHMCPIRVHWHVKTSYKEYWRVKVAITNFNYNMNYSQWNLVFQHPNFDNLTQLFSFNYKPLNPYLNINDTAMLWGIKFYNDFLSQAGPVGNVQSELLFQKNPLEFTFEKGWAFPRRIYFNGDNCVMPPPDSYPWLPNASPNIATSPFVILLITFLSVLILM

SEQ ID NO: 38489 - protein, 397 aa, Arabidopsis thaliana
  peptide (1)..(397): Ceres Seq. ID no. 12328776
MSWTGDGYVAVVTIFNFQQYRHIEAPGWQLGWSWMKKEVIWSMVGGQATEQGDCSKFKGNIPHCCKKTPAIVDLLPGTPYNQQISNCCRGGVISAWAQDPATAISSFQISVGQSGTTNTTVRAPRNITLKAPGPGYTCGPAKLVKPSRFISADKRRKTQSLLTWNITCTYSQFLARKTPTCCVSLSAFYNETIVPCPTCSCGCQNSSQAGTCVDPKIASVVPALGKNNLEPLLQCTQHMCPIRVHWHVKTSYKEYWRVKVAITNFNYNMNYSQWNLVFQHPNFDNLTQLFSFNYKPLNPYLNINDTAMLWGIKFYNDFLSQAGPVGNVQSELLFQKNPLEFTFEKGWAFPRRIYFNGDNCVMPPPDSYPWLPNASPNIATSPFVILLITFLSVLILM

SEQ ID NO: 38490 - DNA, 1383 bp, Arabidopsis thaliana
  misc_feature (1)..(1383): Ceres Seq. ID no. 13489199
  misc_feature (1)..(1383): Ortholog of  Ceres SEQ ID NO 13656752 as cited in SEQ ID NO 65725
ggtctcactgaaactgtgaaaattttatctcttttatagataaagaatcttgcttttttcagttttcagtatgaagaagaattgaagagagtgtccgaggaaggagacctttggtttcagtttgtgagtcttgttgtaatggctttatcaatggagtttgggttttcaattgggtcatgcttcaaggcaccaaacccacctgttctaatctctgcaagccctaataagatcaatttcacgttgagaaggagaaagaaaagattcttacttagagtctctgctgtgtcgtataaggaattcgcagagtctgctttagaagaaaccaggaaaaggatcgttcttgaaccttcacatctccaggaaaagtatagtagcatgacaggactagatggtaagaccgaacttcaaatgcttgcttttaaatcttcaaagattagactcttgaggagtatggcaatagagaatgagacaatgcaggtctttgactttgcgggtttcatggagcctgagtatgatactcccatattctgtgctaactttttcacatctaccaacgttaacatagttgtattggaccttaatcctttgcatcagttgactgaccagacggattaccaagacaagtattataacaagataatgtccatatatcacaaatatgctgagactttcccatggggagggaaattgactggtgaatccataaagtttttctcgcctttggtgatgtggactaggttttcgtctagcaaagaaaaacataaggctttgttctctgcgtttctagagtactatcaggcatggcttgagatgacaatccaagtgagggaggagatggaaccatctcatgtgagagccaattgtgaagcacaacacaagtacctgacatggcgagcacaaaaggatcctggacatggtcttcttaaaagattagtaggtgaagcaaaggcaaaggagctgctaagggatttcctgttcaatggggtggatgagttaggcacaaaaacattcattgattactttccagagtaccaaacagaagatggaactgtaagcgataaacgaagtatcattgggaagtcatatgaaactcgtccatgggatttaacaggacaatttatcggctaacaatgatatatgtgaacaagtcagatttcagagtcatcaacacaagaggacgtgaacttagggaagtaggaataagaaagagcagcatgaggagtctctcaggtctatctgcatttcaagatgattgtttgagttaccatgcattgtagttttacaagtgtagctctcagcccttcatcaaaatgagaatcctcgagtatgatatgattttaatgaaaatgtattcgtctctacctaatcaacagagattaactt

SEQ ID NO: 38491 - protein, 329 aa, Arabidopsis thaliana
  peptide (1)..(329): Ceres Seq. ID no. 13489200
MALSMEFGFSIGSCFKAPNPPVLISASPNKINFTLRRRKKRFLLRVSAVSYKEFAESALEETRKRIVLEPSHLQEKYSSMTGLDGKTELQMLAFKSSKIRLLRSMAIENETMQVFDFAGFMEPEYDTPIFCANFFTSTNVNIVVLDLNPLHQLTDQTDYQDKYYNKIMSIYHKYAETFPWGGKLTGESIKFFSPLVMWTRFSSSKEKHKALFSAFLEYYQAWLEMTIQVREEMEPSHVRANCEAQHKYLTWRAQKDPGHGLLKRLVGEAKAKELLRDFLFNGVDELGTKTFIDYFPEYQTEDGTVSDKRSIIGKSYETRPWDLTGQFIG

SEQ ID NO: 38492 - protein, 325 aa, Arabidopsis thaliana
  peptide (1)..(325): Ceres Seq. ID no. 13489201
MEFGFSIGSCFKAPNPPVLISASPNKINFTLRRRKKRFLLRVSAVSYKEFAESALEETRKRIVLEPSHLQEKYSSMTGLDGKTELQMLAFKSSKIRLLRSMAIENETMQVFDFAGFMEPEYDTPIFCANFFTSTNVNIVVLDLNPLHQLTDQTDYQDKYYNKIMSIYHKYAETFPWGGKLTGESIKFFSPLVMWTRFSSSKEKHKALFSAFLEYYQAWLEMTIQVREEMEPSHVRANCEAQHKYLTWRAQKDPGHGLLKRLVGEAKAKELLRDFLFNGVDELGTKTFIDYFPEYQTEDGTVSDKRSIIGKSYETRPWDLTGQFIG

SEQ ID NO: 38493 - protein, 250 aa, Arabidopsis thaliana
  peptide (1)..(250): Ceres Seq. ID no. 13489202
MTGLDGKTELQMLAFKSSKIRLLRSMAIENETMQVFDFAGFMEPEYDTPIFCANFFTSTNVNIVVLDLNPLHQLTDQTDYQDKYYNKIMSIYHKYAETFPWGGKLTGESIKFFSPLVMWTRFSSSKEKHKALFSAFLEYYQAWLEMTIQVREEMEPSHVRANCEAQHKYLTWRAQKDPGHGLLKRLVGEAKAKELLRDFLFNGVDELGTKTFIDYFPEYQTEDGTVSDKRSIIGKSYETRPWDLTGQFIG

SEQ ID NO: 38494 - DNA, 1567 bp, Arabidopsis thaliana
  misc_feature (1)..(1567): Ceres Seq. ID no. 13489203
  misc_feature (1)..(1567): Ortholog of  Ceres SEQ ID NO 15177022 as cited in SEQ ID NO 57405
  misc_feature (1)..(1567): Ortholog of  Ceres SEQ ID NO 13597427 as cited in SEQ ID NO 64038
tggcatcgcctgtttttataatttctcgtcttgtacaaaataaaagactctctctctcttaaaatttctctttcgattctctcgcatttcaaaatttcatttccttatatagactcttaaggccggcgatttctgtgagtccatagattttcgctactccgccgtcagtttttctcaactccggaggctgtgtttttgccaccgctttgattcgccggtaagttcacgtatggccagtaatactttgaaagagatgaatagtcttcatgtaactgagaagataagtgactgtaaagctagcttgaccaagccatgtgttggtaaaatgaatggaaaatctgaagatagaccattaccaaactctgcctccttggattccagtgattctaaagttgtagaagcagagaaacccgagccagagatagctattgtggaagttgaatatattgaatctgaaaacttggataatgtagacgatgctgatgcagttctgaagtctgttttagctggactagagtccaaggactggatttcactctgtgatgctcttaataacgttcgccgactttcgatattccacaaggaagaaatgatgcatatgcttgaaaaagtgataccacttgtcgtgaaatcactgaaaaatccaagaagtgcggtgtgtaaaacggcatgcatgacatctgcagatatcttcagtgcatataataatcatataacagatctgttggagcctctgcttactcaactactcctcaagtcttcccaagacaaacggtttgtttgcgaggcagcagagaaagctttaacagcaatgaccaaatatgtttccccaaccttgctgttaccaaagctgcaaccttgtctcaaaaacaggaatcctcggatccgtgccaaagcatcattatgcttttctcgaagtgttcctcgactgggcgttgaagggattaaagaatatggaatcgacaaattagttcaagcagccgcatctcagcttagcgatcagctccctgaatcccgtgaggctgcacggactgtcctactagaacttcagagcgtatatgaaaaagctcatcctctcatcaaccctgagacatcatcaccagaagaacagcaaatcccggaggtagagccaattacttgggaaactttctgcaagtcaaaactgtcggctcttagcgcacaagccgtgcttcgtgtcaccaatgttgtcactgttactgctcgggagggtttggttactacaggttcatcatcttcatcccagttataaacattttctactacaaattttttaaaaaccgtttgctacgagtcatacggtttacatggtattctccggcatggcggcatgatctaccaaattggcaaattatggaccgataaaaagagtgaacgttcgtgtatgaaaaatcttggcttctttctgggttattttctttttgtggattctcatctgtcttcactaccagtacttgtttctttttcttatgtgtatatattctataccaagatttggtaagatagtcatgagtcttttggttatatgcaaaattggtcggattctttg

SEQ ID NO: 38495 - protein, 346 aa, Arabidopsis thaliana
  peptide (1)..(346): Ceres Seq. ID no. 13489204
MASNTLKEMNSLHVTEKISDCKASLTKPCVGKMNGKSEDRPLPNSASLDSSDSKVVEAEKPEPEIAIVEVEYIESENLDNVDDADAVLKSVLAGLESKDWISLCDALNNVRRLSIFHKEEMMHMLEKVIPLVVKSLKNPRSAVCKTACMTSADIFSAYNNHITDLLEPLLTQLLLKSSQDKRFVCEAAEKALTAMTKYVSPTLLLPKLQPCLKNRNPRIRAKASLCFSRSVPRLGVEGIKEYGIDKLVQAAASQLSDQLPESREAARTVLLELQSVYEKAHPLINPETSSPEEQQIPEVEPITWETFCKSKLSALSAQAVLRVTNVVTVTAREGLVTTGSSSSSQL

SEQ ID NO: 38496 - protein, 338 aa, Arabidopsis thaliana
  peptide (1)..(338): Ceres Seq. ID no. 13489205
MNSLHVTEKISDCKASLTKPCVGKMNGKSEDRPLPNSASLDSSDSKVVEAEKPEPEIAIVEVEYIESENLDNVDDADAVLKSVLAGLESKDWISLCDALNNVRRLSIFHKEEMMHMLEKVIPLVVKSLKNPRSAVCKTACMTSADIFSAYNNHITDLLEPLLTQLLLKSSQDKRFVCEAAEKALTAMTKYVSPTLLLPKLQPCLKNRNPRIRAKASLCFSRSVPRLGVEGIKEYGIDKLVQAAASQLSDQLPESREAARTVLLELQSVYEKAHPLINPETSSPEEQQIPEVEPITWETFCKSKLSALSAQAVLRVTNVVTVTAREGLVTTGSSSSSQL

SEQ ID NO: 38497 - protein, 314 aa, Arabidopsis thaliana
  peptide (1)..(314): Ceres Seq. ID no. 13489206
MNGKSEDRPLPNSASLDSSDSKVVEAEKPEPEIAIVEVEYIESENLDNVDDADAVLKSVLAGLESKDWISLCDALNNVRRLSIFHKEEMMHMLEKVIPLVVKSLKNPRSAVCKTACMTSADIFSAYNNHITDLLEPLLTQLLLKSSQDKRFVCEAAEKALTAMTKYVSPTLLLPKLQPCLKNRNPRIRAKASLCFSRSVPRLGVEGIKEYGIDKLVQAAASQLSDQLPESREAARTVLLELQSVYEKAHPLINPETSSPEEQQIPEVEPITWETFCKSKLSALSAQAVLRVTNVVTVTAREGLVTTGSSSSSQL

SEQ ID NO: 38498 - DNA, 892 bp, Arabidopsis thaliana
  misc_feature (1)..(892): Ceres Seq. ID no. 13645732
  misc_feature (1)..(892): Ortholog of  Ceres SEQ ID NO 15172991 as cited in SEQ ID NO 51333
  misc_feature (1)..(892): Ortholog of  Ceres SEQ ID NO 13594870 as cited in SEQ ID NO 51929
  misc_feature (1)..(892): Ortholog of  Ceres SEQ ID NO 12635481 as cited in SEQ ID NO 0
aggcctcatctcttactctctctctctgatcgtctttttcttttgattctgcttttttctgctaggtttctgagatcttccattcgtctcgaattaagttgctacgatgaagacagcgaaggggaaagataaagttaagaccacaaaggaagccttgaagccagttgatgacagaaaggtgggaaagaggaaggcaccggccgagaagcctactaaacgagagactcgtaaagaaaagaaggctaaaaaggacccaaacaaaccaaaaagagctcctagtgccttctttgtctttctagaagattttagggtcacgttcaagaaagaaaatccaaatgtgaaggccgtctctgctgttgggaaagctggagggcagaaatggaaggcaatgtctcaagctgaaaaagctccatatgaagagaaagctgcaaaaaggaaagctgaatatgagaagcaaatggatgcatacaacaaaaacttggaggaagggagtgatgaatctgaaaagtctagatctgagataaatgatgaagatgaagccagtggggaggaagaactactagagaaggaagcggcaggtgatgatgaagaagaagaagaggaagaagatgacgataatgatgacgacgaggaagaagactaaatcagggatagaaatcagattttgtatctcaagcttaactgcagatccttaagcagaagtaagtattttgtaatttgtgtgtcgacgagaactatagatctaaaatcgtgtgtatttttgtttttcttttcctaagaaagcgaaacagttgttagcatctctcaggatgtctgtttcagctttttgccgcaacaaacaatgtatcaatgtctgcgttagtgatcatccaaaccaaaaacgggagggggg

SEQ ID NO: 38499 - protein, 178 aa, Arabidopsis thaliana
  peptide (1)..(178): Ceres Seq. ID no. 15219022
MKTAKGKDKVKTTKEALKPVDDRKVGKRKAPAEKPTKRETRKEKKAKKDPNKPKRAPSAFFVFLEDFRVTFKKENPNVKAVSAVGKAGGQKWKAMSQAEKAPYEEKAAKRKAEYEKQMDAYNKNLEEGSDESEKSRSEINDEDEASGEEELLEKEAAGDDEEEEEEEDDDNDDDEEED

SEQ ID NO: 38500 - DNA, 1125 bp, Arabidopsis thaliana
  misc_feature (1)..(1125): Ceres Seq. ID no. 13645733
  misc_feature (1)..(1125): Ortholog of  Ceres SEQ ID NO 15172803 as cited in SEQ ID NO 52102
  misc_feature (1)..(1125): Ortholog of  Ceres SEQ ID NO 12593499 as cited in SEQ ID NO 68777
ggaacacggaaatattggcgcccagataatcttcttctgtgaagcattttaagtcgccgactccaatcaacagagcccagttattccatattatcgaattaattagggttcagagagatgggtaggaaaaagaaatctagggcttcgacaaccgaagaagatgagattgagatggataatgctggcccatcctctgagacaagtctttacgaggttcttggagttgaaagaagagccacttcacaggaaataagaaaagcataccataagttggcattgaagcttcaccctgataaaaatcaggatgataaggaagctaaagacaagttccagcagctgcaaaaagtgatatcaattcttggtgatgaagagaaaagggcagtctatgatcaaactggctcaattgatgatgctgatattcctggagatgcgtttgagaatttgcgggatttcttccgggacatgtataagaaggtcaacgaagctgatattgaagagtttgaggcaaactacaggggatctgagtcagagaagaaagacttgcttgagcttttcaacaagtttaagggtaaaatgaacaggctattctgctcaatgctttgctcggaccccaagcttgattcacaccgtttcaaagacatgcttgatgaggccattgcagcaggagaagtgaagtcaagcaaggcatatgagaaatgggcaaataaaatttcagaaacgaaaccgcccaccagtccattgaggaagaggaagaagaagaagtcagcagcaaaggattcagagacagatctttgcttgatgattgcgaaacgacaagaggagaggaaagggaaggtggactcgatgttttcatcacttatctctaggtatggtggtgatgcggaagcagagcccactgaagaagaatttgaagctgcccagagaaggattgaaagcaaaagaaaaccatccaagaagtctagaggaaagtagaggtcttaaagcagagttgtcttctagtagtatttgtgatggaacaagaatgtttattttctttcaaaattgcatcaatttcaaaattgcatcaatttcaaaaatcagtaaatatttcgattattgctttataaattgaggaattatcttctc

SEQ ID NO: 38501 - protein, 284 aa, Arabidopsis thaliana
  peptide (1)..(284): Ceres Seq. ID no. 13645734
MGRKKKSRASTTEEDEIEMDNAGPSSETSLYEVLGVERRATSQEIRKAYHKLALKLHPDKNQDDKEAKDKFQQLQKVISILGDEEKRAVYDQTGSIDDADIPGDAFENLRDFFRDMYKKVNEADIEEFEANYRGSESEKKDLLELFNKFKGKMNRLFCSMLCSDPKLDSHRFKDMLDEAIAAGEVKSSKAYEKWANKISETKPPTSPLRKRKKKKSAAKDSETDLCLMIAKRQEERKGKVDSMFSSLISRYGGDAEAEPTEEEFEAAQRRIESKRKPSKKSRGK

SEQ ID NO: 38502 - protein, 266 aa, Arabidopsis thaliana
  peptide (1)..(266): Ceres Seq. ID no. 13645735
MDNAGPSSETSLYEVLGVERRATSQEIRKAYHKLALKLHPDKNQDDKEAKDKFQQLQKVISILGDEEKRAVYDQTGSIDDADIPGDAFENLRDFFRDMYKKVNEADIEEFEANYRGSESEKKDLLELFNKFKGKMNRLFCSMLCSDPKLDSHRFKDMLDEAIAAGEVKSSKAYEKWANKISETKPPTSPLRKRKKKKSAAKDSETDLCLMIAKRQEERKGKVDSMFSSLISRYGGDAEAEPTEEEFEAAQRRIESKRKPSKKSRGK

SEQ ID NO: 38503 - protein, 169 aa, Arabidopsis thaliana
  peptide (1)..(169): Ceres Seq. ID no. 13645736
MYKKVNEADIEEFEANYRGSESEKKDLLELFNKFKGKMNRLFCSMLCSDPKLDSHRFKDMLDEAIAAGEVKSSKAYEKWANKISETKPPTSPLRKRKKKKSAAKDSETDLCLMIAKRQEERKGKVDSMFSSLISRYGGDAEAEPTEEEFEAAQRRIESKRKPSKKSRGK

SEQ ID NO: 38504 - DNA, 930 bp, Arabidopsis thaliana
  misc_feature (1)..(930): Ceres Seq. ID no. 12423074
  misc_feature (1)..(930): Ortholog of  Ceres SEQ ID NO 15178260 as cited in SEQ ID NO 59907
  misc_feature (1)..(930): Ortholog of  Ceres SEQ ID NO 14313548 as cited in SEQ ID NO 68496
accaaaaatgccttttgcccctctctctctatatccaacccatgtctcctctttatctctctaactttccccttagagagattcctctttctctcaaactagggtttcctctctgaaaacaacaaaaatatcccaataattgcaaaatctacttgaagatttttcattctcctttcttataattaatgcccaagagagaaacaaagaagatcaaaccttctcaagaagttatcaaggaaggaccttttcttgttgcgatccatttaaaggggatatatatgtcgaactacacaaactcaccgtgtgcagcatgcaaattcctccggcgtaaatgcacgtcagactgcgtattcgcaccctattttccgccggaggaacctacaaagtttgcgaacgtccaccggatattcggggcaagcaatgtgagcaagatcctccacgaagtggctccccatcagcgggaagatgcggtcaactcgctggcttacgaggcggaagcacgacttaaagatccagtgtatggctgcgttggagcgatctcggtgctccaaagacaggtcttgaggttgcaaagggaactcgaggagacaaatgctgatctcatgaggtacgctggttgtctcggtggtgaaacgacgtcggcttatggtggtcggaggggttgactggtcaacgagagttgattagtcatcatcactctttgagaaaattagcggcggagaagtataaagagagagaggatggttgatgtgatggtaagtgttattagtcgtatgtatatatgtgtaaatatggggacatgcatgcatgtatatttatgtttattttcatgtatatacttatgcgtatgtgtaatttaacttgtaatttttttttcatgggagaggtcaaggaatatttttgatgatgttgaataactagatcttgctc

SEQ ID NO: 38505 - protein, 159 aa, Arabidopsis thaliana
  peptide (1)..(159): Ceres Seq. ID no. 12423075
MPKRETKKIKPSQEVIKEGPFLVAIHLKGIYMSNYTNSPCAACKFLRRKCTSDCVFAPYFPPEEPTKFANVHRIFGASNVSKILHEVAPHQREDAVNSLAYEAEARLKDPVYGCVGAISVLQRQVLRLQRELEETNADLMRYAGCLGGETTSAYGGRRG

SEQ ID NO: 38506 - protein, 128 aa, Arabidopsis thaliana
  peptide (1)..(128): Ceres Seq. ID no. 12423076
MSNYTNSPCAACKFLRRKCTSDCVFAPYFPPEEPTKFANVHRIFGASNVSKILHEVAPHQREDAVNSLAYEAEARLKDPVYGCVGAISVLQRQVLRLQRELEETNADLMRYAGCLGGETTSAYGGRRG

SEQ ID NO: 38507 - DNA, 976 bp, Arabidopsis thaliana
  misc_feature (1)..(976): Ceres Seq. ID no. 13488133
  misc_feature (1)..(976): Ortholog of  Ceres SEQ ID NO 13582893 as cited in SEQ ID NO 62081
aacaactccacgacgagaggaaaaaaaaaaaactcagagagacaaatctaaatggcgatgattacgcgcaacaccgccacgcgcctccctctcctcctccaatctcaacgcgccgtcgccgctgcctcggtctctcacctccacacatcccttcccgctctctctccctccacatcaccgacttcctacaccagacctggtcctccttcgacctcccctcctcctcctggtctctctaaagcggccgaatttgtgatctccaaggtcgatgatctcatgaactgggctcgtaccggatcgatctggcctatgacctttggtctcgcttgctgcgccgtcgaaatgatgcataccggtgctgctcgctacgatctcgatcgattcggtatcatcttcaggcctagtcctcgccagtctgattgtatgattgtcgccggtactcttaccaataagatggctccggctcttcgcaaggtttatgaccagatgcctgagccaaggtgggtgatttcaatgggaagttgtgccaatggaggtggatactatcactactcctactcggtggttcgaggatgtgacagaattgtcccagtcgacatatacgtcccggggtgcccaccaaccgctgaggctttgctctatggactactccagcttcagaagaaaatcaacaggcgcaaggatttcttgcattggtggaacaagtgagcttcgaacccgtcctccaatcgtgaaagggacttttttcagacagttttaccaaagtttggggataataaatcgtggacgtttcattgcatatttctttgtggtggagatgccatgtaaaggagtgtgtttctaagtttgttgtggaaacttaataaacttaagatgtttgttgtctgagttcttttatgggctcttttattatatatctctctctaccagttttcagctacatgctgactattgctaaatacctacatatatttat

SEQ ID NO: 38508 - protein, 218 aa, Arabidopsis thaliana; identical to SEQ ID NO: 29128
  peptide (1)..(218): Ceres Seq. ID no. 13488134

SEQ ID NO: 38509 - protein, 216 aa, Arabidopsis thaliana; identical to SEQ ID NO: 29129
  peptide (1)..(216): Ceres Seq. ID no. 13488135

SEQ ID NO: 38510 - protein, 143 aa, Arabidopsis thaliana; identical to SEQ ID NO: 29130
  peptide (1)..(143): Ceres Seq. ID no. 13488136

SEQ ID NO: 38511 - DNA, 677 bp, Arabidopsis thaliana; identical to SEQ ID NO: 23436
  misc_feature (1)..(677): Ceres Seq. ID no. 12561632
  misc_feature (1)..(677): Ortholog of  Ceres SEQ ID NO 13599506 as cited in SEQ ID NO 334
  misc_feature (1)..(677): Ortholog of  Ceres SEQ ID NO 13598157 as cited in SEQ ID NO 61570
  misc_feature (1)..(677): Ortholog of  Ceres SEQ ID NO 15175549 as cited in SEQ ID NO 0

SEQ ID NO: 38512 - protein, 153 aa, Arabidopsis thaliana; identical to SEQ ID NO: 23437
  peptide (1)..(153): Ceres Seq. ID no. 12561633

SEQ ID NO: 38513 - protein, 134 aa, Arabidopsis thaliana; identical to SEQ ID NO: 23438
  peptide (1)..(134): Ceres Seq. ID no. 12561634

SEQ ID NO: 38514 - DNA, 1402 bp, Arabidopsis thaliana
  misc_feature (1)..(1402): Ceres Seq. ID no. 12337871
  misc_feature (1)..(1402): Ortholog of  Ceres SEQ ID NO 14316017 as cited in SEQ ID NO 67028
  misc_feature (1)..(1402): Ortholog of  Ceres SEQ ID NO 15177500 as cited in SEQ ID NO 0
atcttcgaaaccccattactctcaaatccaaccaacctttcaaaacagaacacgaagacatggaccgaacacaatctccaaagacagctctgttcgccgtgttggcaacactccttgtcttaaccgtgaacggccagtcactttgtaagacacacaggttcaccaataacctcgccttcgcagattgctctgacctctcggccttaggctctttccttcactggacctacaatgaacaaaacggtaccgtctcaatcgcctatcgccaccctggaacctctgcttcttcttgggttgcttggggacttaacccaagtagtactcagatggttgggacgcaagctctagtagccttcacaaacacaacaactaaccaattccaggcctatacctcttccgtgagttcctatggtacgcggctcgaacgtagtagcctaagtttcggtgtgagtggcctctccgcgactctggtcagtggcgaggttacgatctttgcaactcttgagttgtctccgaatctgatcacggccaaccagctttggcaggtgggacctgttgtcaacggtgttcctgcgagtcatcaaacctcaggagataatatgagatcgagtggtaggattgatttccggactggtcaggcatcagctggtggtggtggttccggtgacaggctgaggaagagaaacacgcatggagtactaaatgcggtcagctggggagtactaatgccaatgggagcaatgatggctcggtacatgaaagtcttcgccgatccaacatggttctatctccacattgcctttcaagtgtcgggttacgtcatcggggtagccggttgggccaccggaatcaagcttggtaacgactcaccaggcacatcttactcaacccatcgtaaccttggaatagcactcttcacatttgccacacttcaagtatttgctctgcttgtaaggccaaagccagaccacaaatatcgaacgtactggaacgtgtaccatcacaccgttggatacacgaccatcatcctctctattgtcaacattttcaaaggattcgacattttggacccggaggataaatggcgatgggcttacattgggatcctcatctttcttggtgcttgtgtccttattctcgagccactcacttggttcattgttcttcgccgtaagagccgtggaggtaacacagtcgctgcaccaacttcgagcaagtactctaacggcgtcaatggtaccaccaccactggaccacatcaccaggacgcctagtttcactttttgtttctacacttgttcttgtttgttctacttctactcgattttggattcttttttgatttgatattttgtaggctcatgtatgtattatgtatacaattttattcattgtgttatag

SEQ ID NO: 38515 - protein, 423 aa, Arabidopsis thaliana
  peptide (1)..(423): Ceres Seq. ID no. 12337872
LRNPITLKSNQPFKTEHEDMDRTQSPKTALFAVLATLLVLTVNGQSLCKTHRFTNNLAFADCSDLSALGSFLHWTYNEQNGTVSIAYRHPGTSASSWVAWGLNPSSTQMVGTQALVAFTNTTTNQFQAYTSSVSSYGTRLERSSLSFGVSGLSATLVSGEVTIFATLELSPNLITANQLWQVGPVVNGVPASHQTSGDNMRSSGRIDFRTGQASAGGGGSGDRLRKRNTHGVLNAVSWGVLMPMGAMMARYMKVFADPTWFYLHIAFQVSGYVIGVAGWATGIKLGNDSPGTSYSTHRNLGIALFTFATLQVFALLVRPKPDHKYRTYWNVYHHTVGYTTIILSIVNIFKGFDILDPEDKWRWAYIGILIFLGACVLILEPLTWFIVLRRKSRGGNTVAAPTSSKYSNGVNGTTTTGPHHQDA

SEQ ID NO: 38516 - protein, 404 aa, Arabidopsis thaliana
  peptide (1)..(404): Ceres Seq. ID no. 12337873
MDRTQSPKTALFAVLATLLVLTVNGQSLCKTHRFTNNLAFADCSDLSALGSFLHWTYNEQNGTVSIAYRHPGTSASSWVAWGLNPSSTQMVGTQALVAFTNTTTNQFQAYTSSVSSYGTRLERSSLSFGVSGLSATLVSGEVTIFATLELSPNLITANQLWQVGPVVNGVPASHQTSGDNMRSSGRIDFRTGQASAGGGGSGDRLRKRNTHGVLNAVSWGVLMPMGAMMARYMKVFADPTWFYLHIAFQVSGYVIGVAGWATGIKLGNDSPGTSYSTHRNLGIALFTFATLQVFALLVRPKPDHKYRTYWNVYHHTVGYTTIILSIVNIFKGFDILDPEDKWRWAYIGILIFLGACVLILEPLTWFIVLRRKSRGGNTVAAPTSSKYSNGVNGTTTTGPHHQDA

SEQ ID NO: 38517 - protein, 315 aa, Arabidopsis thaliana; identical to SEQ ID NO: 22045
  peptide (1)..(315): Ceres Seq. ID no. 12337874

SEQ ID NO: 38518 - DNA, 1028 bp, Arabidopsis thaliana
  misc_feature (1)..(1028): Ceres Seq. ID no. 12325605
  misc_feature (1)..(1028): Ortholog of  Ceres SEQ ID NO 15173696 as cited in SEQ ID NO 59972
  misc_feature (1)..(1028): Ortholog of  Ceres SEQ ID NO 15226351 as cited in SEQ ID NO 61706
agaacgattcgcttatctttcccttatttcttttctcaggggatacagagagaagccaaagctaatagaagcacgaacggcgtcgggttagtccgacggaggaaccatgtcctcgtctcttcttctctccggttctactgtatcttcttcgtttatcgctccatctaagccttctctcgtacgaaattccagtaagacatcactgttaccatttcgtaatgtttcgagaagcttcaaaaccgtcaagtgcaccgttgattcttcatatggaggcaatgttcccacgttccctcggacgagagtttgggacccgtacaaacgtctaggagttagtccatatgcttccgaggaagaaatctgggcctctcgtaactttcttttacagcagtacgctggacatgaaagaagcgaagagtctatagaaggagcctttgagaagcttctcatgtctagttttatcagaaggaagaagactaaaatcaatcttaaatcaaagttgaagaagaaagttgaggaatctcctccgtggctcaaagctcttctcgatttcgttgaaatgcctcccatggacactattttcagaagacttttcctctttgccttcatgggtggttggagtatcatgaactctgcagaaggcggtcctgcgtttcaggtggcggtatcattggctgcgtgcgtatattttctgaatgagaagacaaagagcttggggagagcttgcttaatcggaattggagctttagttgccgggtggttctgcggttcgttaatcattcccatgattccgacgtttctcattcagcctacatggacactcgagctcctaacatcactggtcgcttatgtgtttttgtttctttcttgtactttcctcaagtaagttacgttgtggttttatccaaactctttttgttcttttcgcccagacatttacagaacctttcggaaaaattagtgaaagttgttaagtgtttgattggtttcacagttttcttttatgcgttaatgtaaatgacttcaacgtg

SEQ ID NO: 38519 - protein, 258 aa, Arabidopsis thaliana
  peptide (1)..(258): Ceres Seq. ID no. 12325606
MSSSLLLSGSTVSSSFIAPSKPSLVRNSSKTSLLPFRNVSRSFKTVKCTVDSSYGGNVPTFPRTRVWDPYKRLGVSPYASEEEIWASRNFLLQQYAGHERSEESIEGAFEKLLMSSFIRRKKTKINLKSKLKKKVEESPPWLKALLDFVEMPPMDTIFRRLFLFAFMGGWSIMNSAEGGPAFQVAVSLAACVYFLNEKTKSLGRACLIGIGALVAGWFCGSLIIPMIPTFLIQPTWTLELLTSLVAYVFLFLSCTFLK

SEQ ID NO: 38520 - protein, 145 aa, Arabidopsis thaliana
  peptide (1)..(145): Ceres Seq. ID no. 12325607
MSSFIRRKKTKINLKSKLKKKVEESPPWLKALLDFVEMPPMDTIFRRLFLFAFMGGWSIMNSAEGGPAFQVAVSLAACVYFLNEKTKSLGRACLIGIGALVAGWFCGSLIIPMIPTFLIQPTWTLELLTSLVAYVFLFLSCTFLK

SEQ ID NO: 38521 - DNA, 443 bp, Arabidopsis thaliana
  misc_feature (1)..(443): Ceres Seq. ID no. 12385620
  misc_feature (1)..(443): Ortholog of  Ceres SEQ ID NO 13656408 as cited in SEQ ID NO 65810
gctcattagggtttctcatctacgacggcgtggtgttcctccttcctgctctgaaaaatggcgaagagaaccaagaaggttggaatcgtcggcaaatacggaacacgttatcaggaagcagattaagaagatggaggtcagccagcacagcaagtacttctgtgagttctgtggcaagtacggagtgaagcgaaaggctgttggtatctggggttgcaaggattgtggcaaggtcaaggcaggtggtgcttacacaatgaacaccgccagtgcggtcactgttagaagcacgatcagaaggttgagggagcagatcgagggttaaaagtctgctggctttttatatttggtttccttgttttgacaatttaagttttgcaaactctatgcttgtgattttgaatcaagacttatacattgagcagtttaagcaggtttttatt

SEQ ID NO: 38522 - protein, 107 aa, Arabidopsis thaliana
  peptide (1)..(107): Ceres Seq. ID no. 12385621
LIRVSHLRRRGVPPSCSEKWRREPRRLESSANTEHVIRKQIKKMEVSQHSKYFCEFCGKYGVKRKAVGIWGCKDCGKVKAGGAYTMNTASAVTVRSTIRRLREQIEG

SEQ ID NO: 38523 - protein, 64 aa, Arabidopsis thaliana; identical to SEQ ID NO: 30082
  peptide (1)..(64): Ceres Seq. ID no. 12385622

SEQ ID NO: 38524 - protein, 61 aa, Arabidopsis thaliana
  peptide (1)..(61): Ceres Seq. ID no. 12385623
SLGFLIYDGVVFLLPALKNGEENQEGWNRRQIRNTLSGSRLRRWRSASTASTSVSSVASTE

SEQ ID NO: 38525 - DNA, 578 bp, Arabidopsis thaliana
  misc_feature (1)..(578): Ceres Seq. ID no. 12423144
  misc_feature (1)..(578): Ortholog of  Ceres SEQ ID NO 12635789 as cited in SEQ ID NO 0
caagttgatgcagagtttcaaatctaaggaatatgtgagagagacctttgcttggatgcattactactggttcctcacaaatgaaggtattgactttcttaggacttaccttaatctcccatctgagattgttcctgctactctgaagaagcaacagaagcctcttggtcgaccttttggaggtggtggtgaccgtccccgtggccctcctcgtggtgatggagagaggaggtttggtgacagagatggataccgtggaggtcctaaatcaggtggagagtatggtgacaaggctggagcacctgctgattaccagcctggcttcaggggtggagctagtggagcaaggcaagggtttggtcgtggagctggtcgttttggtggtggtgctggtccagctgctggatctgatctaccttgaaaaggactttcttgtttctttttggtcttatttaaggttacatagcaccttattgagaacgaatgtgtcttttggaactttgtttctttctcttaaaccatttcacaatatgattgtttttttacgttagaattttatgaagaaatgttggatcgtt

SEQ ID NO: 38526 - protein, 139 aa, Arabidopsis thaliana
  peptide (1)..(139): Ceres Seq. ID no. 12423145
KLMQSFKSKEYVRETFAWMHYYWFLTNEGIDFLRTYLNLPSEIVPATLKKQQKPLGRPFGGGGDRPRGPPRGDGERRFGDRDGYRGGPKSGGEYGDKAGAPADYQPGFRGGASGARQGFGRGAGRFGGGAGPAAGSDLP

SEQ ID NO: 38527 - protein, 137 aa, Arabidopsis thaliana
  peptide (1)..(137): Ceres Seq. ID no. 12423146
MQSFKSKEYVRETFAWMHYYWFLTNEGIDFLRTYLNLPSEIVPATLKKQQKPLGRPFGGGGDRPRGPPRGDGERRFGDRDGYRGGPKSGGEYGDKAGAPADYQPGFRGGASGARQGFGRGAGRFGGGAGPAAGSDLP

SEQ ID NO: 38528 - protein, 121 aa, Arabidopsis thaliana
  peptide (1)..(121): Ceres Seq. ID no. 12423147
MHYYWFLTNEGIDFLRTYLNLPSEIVPATLKKQQKPLGRPFGGGGDRPRGPPRGDGERRFGDRDGYRGGPKSGGEYGDKAGAPADYQPGFRGGASGARQGFGRGAGRFGGGAGPAAGSDLP

SEQ ID NO: 38529 - DNA, 1705 bp, Arabidopsis thaliana
  misc_feature (1)..(1705): Ceres Seq. ID no. 12396597
  misc_feature (1)..(1705): Ortholog of  Ceres SEQ ID NO 14311535 as cited in SEQ ID NO 51559
  misc_feature (1)..(1705): Ortholog of  Ceres SEQ ID NO 15176200 as cited in SEQ ID NO 55188
atacacacaattcaatatttgacttcacatagagagagatagagagatggcgacggaaacggaagttgtagctccggtaacggtaagcaacggcggaagcaaaggatgttgcaagtacggtggtcctggttacgcgactcctctcgccgctatgtctggtccatcggagaaacttatctacgtaaccgccgtctacaccggaactggaatagataaaccggattatttggcgacggtggatgtagatccaagctcgccttcgtattcaagtgttattcatagattaccaatgccttttgttggtgatgagcttcatcattctggttggaactcttgtagttcttgccatggtgatgcttctgttgatagacgttatctcgtgttaccgtctcttatatctggtcgcatttatgcgattgatactaaggaaaacccgagggctccgtctttgtataagtatgttgatcctaaagagattgctgataagactggattggcgtttcctcacacggctcattgcctcgccacgggcgagatcttggtgtcctgtcttggagatgaagaggggaatgctaaggggaatgggtttcttcttcttgactctgattttaacatcaagaataggtgggagaaancaggacatagtcctttgtatgggtatgatgttctagatgtttttggtaccaacctcggcacaagaccatgatcagcacatcttggggagcacctaaagccttctctaaaggtttcaatcttcagcacgttgctgatggcttgtatggaagtcatctacatgtttatagttggccaggaggtgaaatgaaacaattaattgaccttggaccgactggtctcttacctttggagattagattcttgcatgatccatctaaagatacagggtttgttgggagtgccttgtcgagtaatatgataagatttttcaagaacagtgatgaaacatggagccatgaggttgttatatcggttaaaccgttgaaagtcgaaaactggatacttccagaaatgccggggctaatcaccgacttcttgatctccctcgatgaccgatttatttactttgtgaactggctccatggagacattcgtcagtacaacatagaggaccctaaaaaccctgtattaacagggcaaatttgggttggaggattactacaaaagggcagtcctgttaaggcggttggagaagacggaaacactttccagttcgaggttcctcagatcaaggggaaatctttacgaggtggacctcaaatgattcagctgagcctcgatgggaaacgattgtatgcaacaaactcgctgtttagcgcatgggatcgtcagttttatcctgaaatcatggagaaaggctcacacataattcagattgatgttgatacagaaaaaggtggtctcaccataaaccctgatttctttgtggactttggtgatgaaccagacggtccttcactagcccacgagatgagatatccaggtggagactgcacttccgatatctggatttgaatttggctttgtttagagtgtgttttgtgttaagtttaaattgagttttattatttgttgtgtgtttagtagagttgaataaaaaagggagtaagatgactcagacaattaacacttgtttgtacattttgactcctatgtgtcttaagtaataaaactttctacaattcgactg

SEQ ID NO: 38530 - protein, 275 aa, Arabidopsis thaliana
  peptide (1)..(275): Ceres Seq. ID no. 12396598
MISTSWGAPKAFSKGFNLQHVADGLYGSHLHVYSWPGGEMKQLIDLGPTGLLPLEIRFLHDPSKDTGFVGSALSSNMIRFFKNSDETWSHEVVISVKPLKVENWILPEMPGLITDFLISLDDRFIYFVNWLHGDIRQYNIEDPKNPVLTGQIWVGGLLQKGSPVKAVGEDGNTFQFEVPQIKGKSLRGGPQMIQLSLDGKRLYATNSLFSAWDRQFYPEIMEKGSHIIQIDVDTEKGGLTINPDFFVDFGDEPDGPSLAHEMRYPGGDCTSDIWI

SEQ ID NO: 38531 - protein, 236 aa, Arabidopsis thaliana
  peptide (1)..(236): Ceres Seq. ID no. 12396599
MKQLIDLGPTGLLPLEIRFLHDPSKDTGFVGSALSSNMIRFFKNSDETWSHEVVISVKPLKVENWILPEMPGLITDFLISLDDRFIYFVNWLHGDIRQYNIEDPKNPVLTGQIWVGGLLQKGSPVKAVGEDGNTFQFEVPQIKGKSLRGGPQMIQLSLDGKRLYATNSLFSAWDRQFYPEIMEKGSHIIQIDVDTEKGGLTINPDFFVDFGDEPDGPSLAHEMRYPGGDCTSDIWI

SEQ ID NO: 38532 - protein, 219 aa, Arabidopsis thaliana
  peptide (1)..(219): Ceres Seq. ID no. 12396600
  misc_feature (197)..(197): Xaa is any aa, unknown or other
MATETEVVAPVTVSNGGSKGCCKYGGPGYATPLAAMSGPSEKLIYVTAVYTGTGIDKPDYLATVDVDPSSPSYSSVIHRLPMPFVGDELHHSGWNSCSSCHGDASVDRRYLVLPSLISGRIYAIDTKENPRAPSLYKYVDPKEIADKTGLAFPHTAHCLATGEILVSCLGDEEGNAKGNGFLLLDSDFNIKNRWEKXGHSPLYGYDVLDVFGTNLGTRP

SEQ ID NO: 38533 - DNA, 847 bp, Arabidopsis thaliana
  misc_feature (1)..(847): Ceres Seq. ID no. 13487178
  misc_feature (1)..(847): Ortholog of  Ceres SEQ ID NO 13638893 as cited in SEQ ID NO 55835
  misc_feature (1)..(847): Ortholog of  Ceres SEQ ID NO 13661656 as cited in SEQ ID NO 61607
  misc_feature (1)..(847): Ortholog of  Ceres SEQ ID NO 14309331 as cited in SEQ ID NO 0
ctcattttccaccattaaaaaacctctctactctctcctcaaaaactcaaaagagcaaaaaaaagagaagaagaatcaaaatcccacacaatggcaacacactcttccttcaccgcaacaacacctctctttctcatcgttcttctatccctatcctccgtctcagttctcggcgcatctcaccaccacgcaacggcgccggctccgtctgtagactgttcgactctcatactcaacatggctgactgtttatccttcgtttcgagcggaggcacggtggcgaaaccggaaggtacatgttgctctggtcttaagacggtgcttaaagctgactctcagtgtctatgtgaagcgtttaagagcagtgcttctcttggagttactttgaatatcactaaggcttctactcttcccgccgcatgcaagcttcacgctccttctatcgctacttgtggattgtctgttgctccaagtactgctccaggtcttgctccaggagtagctgctgctggacctgagacagccggatttctagctccaaatccttcttcagggaacgatggatcttctttgattccgacctcgttcacaactgtactcagtgccgtactgttcgttttgttcttctctagtgcgtaaaaaaaaacctgaatcttttttcaccagctagatttggctgtatgaaattgattaatggtttttattagggttaatctatgtatgttttggagtgttctgtttttagaccatatcggtttctctattactagcgtttactcttttagtttatgttattactttgtctcacaacattggtccttttattcgatctatcgcttattcctcc

SEQ ID NO: 38534 - protein, 182 aa, Arabidopsis thaliana
  peptide (1)..(182): Ceres Seq. ID no. 13487179
MATHSSFTATTPLFLIVLLSLSSVSVLGASHHHATAPAPSVDCSTLILNMADCLSFVSSGGTVAKPEGTCCSGLKTVLKADSQCLCEAFKSSASLGVTLNITKASTLPAACKLHAPSIATCGLSVAPSTAPGLAPGVAAAGPETAGFLAPNPSSGNDGSSLIPTSFTTVLSAVLFVLFFSSA

SEQ ID NO: 38535 - protein, 133 aa, Arabidopsis thaliana
  peptide (1)..(133): Ceres Seq. ID no. 13487180
MADCLSFVSSGGTVAKPEGTCCSGLKTVLKADSQCLCEAFKSSASLGVTLNITKASTLPAACKLHAPSIATCGLSVAPSTAPGLAPGVAAAGPETAGFLAPNPSSGNDGSSLIPTSFTTVLSAVLFVLFFSSA

SEQ ID NO: 38536 - DNA, 486 bp, Arabidopsis thaliana
  misc_feature (1)..(486): Ceres Seq. ID no. 12323140
  misc_feature (1)..(486): Ortholog of  Ceres SEQ ID NO 14306299 as cited in SEQ ID NO 56895
  misc_feature (1)..(486): Ortholog of  Ceres SEQ ID NO 13663631 as cited in SEQ ID NO 67073
atggcttttcctagttgtgtttcggttgcaatcacggctatgatgctacttgtaacatgttgtcattgtgcaacataccaagaacaattcatgggtccacaaaacgcagcaagagctcatttaaggctcaaaccgctaaagtgggacgccaaattggcccgttacgcgcaatggtgggctaaccagagacgcggtgactgcgccttgacccattccaatggaccctatggtgagaatctcttttggggctcaggcaatagatggggtccatctcaagccgcctatggatggttgtctgaagcaaggagctataactatagatctaactcgtgcaactccgagatgtgtggccattacacacaaatcgtgtggaagaacacacaaaagattggttgcgctcacgtgatctgcaatggcggaggaggcgtattcttgacttgcaattatgatccaccggggaattttcttggtaggaagccttattga

SEQ ID NO: 38537 - protein, 161 aa, Arabidopsis thaliana
  peptide (1)..(161): Ceres Seq. ID no. 12323141
MAFPSCVSVAITAMMLLVTCCHCATYQEQFMGPQNAARAHLRLKPLKWDAKLARYAQWWANQRRGDCALTHSNGPYGENLFWGSGNRWGPSQAAYGWLSEARSYNYRSNSCNSEMCGHYTQIVWKNTQKIGCAHVICNGGGGVFLTCNYDPPGNFLGRKPY

SEQ ID NO: 38538 - protein, 148 aa, Arabidopsis thaliana
  peptide (1)..(148): Ceres Seq. ID no. 12323142
MMLLVTCCHCATYQEQFMGPQNAARAHLRLKPLKWDAKLARYAQWWANQRRGDCALTHSNGPYGENLFWGSGNRWGPSQAAYGWLSEARSYNYRSNSCNSEMCGHYTQIVWKNTQKIGCAHVICNGGGGVFLTCNYDPPGNFLGRKPY

SEQ ID NO: 38539 - protein, 147 aa, Arabidopsis thaliana
  peptide (1)..(147): Ceres Seq. ID no. 12323143
MLLVTCCHCATYQEQFMGPQNAARAHLRLKPLKWDAKLARYAQWWANQRRGDCALTHSNGPYGENLFWGSGNRWGPSQAAYGWLSEARSYNYRSNSCNSEMCGHYTQIVWKNTQKIGCAHVICNGGGGVFLTCNYDPPGNFLGRKPY

SEQ ID NO: 38540 - DNA, 855 bp, Arabidopsis thaliana
  misc_feature (1)..(855): Ceres Seq. ID no. 13592318
  misc_feature (1)..(855): Ortholog of  Ceres SEQ ID NO 15170444 as cited in SEQ ID NO 52873
  misc_feature (1)..(855): Ortholog of  Ceres SEQ ID NO 13595847 as cited in SEQ ID NO 55845
  misc_feature (1)..(855): Ortholog of  Ceres SEQ ID NO 14314070 as cited in SEQ ID NO 56946
  misc_feature (1)..(855): Ortholog of  Ceres SEQ ID NO 12635868 as cited in SEQ ID NO 0
acatttcctcactcaactctctcattctcactaacagagagaaaaagcaaaagcaaaaatggctcgatctttcgctattgctgtgatctgtatcgtcctcatcgccggcgttactggtcaagctccgacttcaccaccaaccgctacaccagctccaccaactccaacaactcctccaccagcagcaactcctcctcctgtctcagcaccaccaccagtcacaacatctcctcctccagtcaccactgctcctcctccagcaaatccaccaccaccagtctcttctcctcctcctgcttctcctccaccagctactcctcctccagtcgcttctcctcctcctcccgttgcttctcctccaccagcaactcctcctcccgtcgctactcctcccccagctcctctagcttcccctcctgctcaagttccagctccagcaccgaccacgaagccagattctccatctccatctccgtcatctagcccacctcttccatcaagcgacgctcctggacctagcaccgattctatctctcctgctcctagccccactgatgtgaacgaccagaatggagctagcaagatggtttcgagcttagtatttggatctgttctcgtctgatttatgatctaagtggaatcttttgtgactgtgttacttgcatttatttttatgtcgtctttgtttgttccactgtattgcttgggactgaattcttttgggatttattatctttcggagaggatactattgagagcttgagatggagatagcaggatattttgattgcagatacttttgtggcttcatttctcattccatttgattattagtgtactacattccttttctcc

SEQ ID NO: 38541 - protein, 187 aa, Arabidopsis thaliana
  peptide (1)..(187): Ceres Seq. ID no. 13592319
MARSFAIAVICIVLIAGVTGQAPTSPPTATPAPPTPTTPPPAATPPPVSAPPPVTTSPPPVTTAPPPANPPPPVSSPPPASPPPATPPPVASPPPPVASPPPATPPPVATPPPAPLASPPAQVPAPAPTTKPDSPSPSPSSSPPLPSSDAPGPSTDSISPAPSPTDVNDQNGASKMVSSLVFGSVLV

SEQ ID NO: 38542 - protein, 160 aa, Arabidopsis thaliana
  peptide (1)..(160): Ceres Seq. ID no. 13592320
TFPHSTLSFSLTERKSKSKNGSIFRYCCDLYRPHRRRYWSSSDFTTNRYTSSTNSNNSSTSSNSSSCLSTTTSHNISSSSHHCSSSSKSTTTSLFSSSCFSSTSYSSSSRFSSSSRCFSSTSNSSSRRYSSPSSSSFPSCSSSSSSTDHEARFSISISVI

SEQ ID NO: 38543 - DNA, 1481 bp, Arabidopsis thaliana
  misc_feature (1)..(1481): Ceres Seq. ID no. 12482305
  misc_feature (1)..(1481): Ortholog of  Ceres SEQ ID NO 15177012 as cited in SEQ ID NO 56256
  misc_feature (1)..(1481): Ortholog of  Ceres SEQ ID NO 13596509 as cited in SEQ ID NO 62004
  misc_feature (1)..(1481): Ortholog of  Ceres SEQ ID NO 13500385 as cited in SEQ ID NO 67583
atctcttcaaataattttattggttcttctgtcttatgaacaagaacagaggagctctgtcttgtttcctcttatttacgtactaccaatcctcatacacacacatgtgtctttggtttcatctccgaaaagtgataatctgttttatttgatttgacttttgagagaacagagcatatataaagaaacagagcagctctgtttttttttttttgtgttgcagtttgtagaatcatggagaggtacgaaatagtgaaggatattgggtctggtaacttcggagtagcaaagcttgttcgtgacaaattttccaaagagcttttcgctgttaagttcatcgagcgaggccaaaagattgatgaacatgtacaaagagaaatcatgaaccataggtcgctgatccatcccaatataataagattcaaggaggttttattgacggcaacacatttggcgttagtaatggaatacgccgccggaggagaactgttcggaagaatctgcagcgccggaagattcagtgaagacgaggcaaggtttttctttcagcagcttatatcaggagttaattactgtcacagtcttcaaatatgccatagagatttaaagctagagaacacgttacttgatggaagcgaagcgccacgtgtaaagatttgcgactttggatattcaaaatcaggagttcttcattcgcaaccaaagacaacagtaggaacacctgcttacattgcacctgaagtgctctccacgaaagagtatgacggcaaaatcgctgatgtttggtcttgtggagtcactttgtatgttatgcttgttggtgcttatccttttgaagatccttctgatcctaaagattttcggaagacgatcggtcggattctcaaagctcagtatgctattcctgattatgttcgagtttcggatgaatgcagacatcttctctctcggatattcgttgccaaccctgaaaagagaataacaatagaggagataaagaatcattcttggtttctcaagaacttgccggtagagatgtatgaaggatcattgatgatgaatggtccatcgactcagacagtagaagagatagtgtggatcattgaagaagctcggaaacctatcaccgtagctactggactcgcaggtgctggtggctctggtggaagcagtaatggtgccattggaagtagcagtatggatctcgatgacttggacacagatttcgacgacatcgataccgctgatctcctttcccctttgtgaacaattgtatcaaaaaccaaagatttcatgtttctgaagcctgctgatactactacacattgatgatacacagacgtgaatataattgttcactaaaatgtataattagagtgtgaaaacatttgtctttgattacaaaaatgttctgttagacatttttatacatatgcatggaagatgtatatataaacagaaacataatatctagtcacgtt

SEQ ID NO: 38544 - protein, 343 aa, Arabidopsis thaliana
  peptide (1)..(343): Ceres Seq. ID no. 12482306
MERYEIVKDIGSGNFGVAKLVRDKFSKELFAVKFIERGQKIDEHVQREIMNHRSLIHPNIIRFKEVLLTATHLALVMEYAAGGELFGRICSAGRFSEDEARFFFQQLISGVNYCHSLQICHRDLKLENTLLDGSEAPRVKICDFGYSKSGVLHSQPKTTVGTPAYIAPEVLSTKEYDGKIADVWSCGVTLYVMLVGAYPFEDPSDPKDFRKTIGRILKAQYAIPDYVRVSDECRHLLSRIFVANPEKRITIEEIKNHSWFLKNLPVEMYEGSLMMNGPSTQTVEEIVWIIEEARKPITVATGLAGAGGSGGSSNGAIGSSSMDLDDLDTDFDDIDTADLLSPL

SEQ ID NO: 38545 - protein, 294 aa, Arabidopsis thaliana
  peptide (1)..(294): Ceres Seq. ID no. 12482307
MNHRSLIHPNIIRFKEVLLTATHLALVMEYAAGGELFGRICSAGRFSEDEARFFFQQLISGVNYCHSLQICHRDLKLENTLLDGSEAPRVKICDFGYSKSGVLHSQPKTTVGTPAYIAPEVLSTKEYDGKIADVWSCGVTLYVMLVGAYPFEDPSDPKDFRKTIGRILKAQYAIPDYVRVSDECRHLLSRIFVANPEKRITIEEIKNHSWFLKNLPVEMYEGSLMMNGPSTQTVEEIVWIIEEARKPITVATGLAGAGGSGGSSNGAIGSSSMDLDDLDTDFDDIDTADLLSPL

SEQ ID NO: 38546 - protein, 267 aa, Arabidopsis thaliana
  peptide (1)..(267): Ceres Seq. ID no. 12482308
MEYAAGGELFGRICSAGRFSEDEARFFFQQLISGVNYCHSLQICHRDLKLENTLLDGSEAPRVKICDFGYSKSGVLHSQPKTTVGTPAYIAPEVLSTKEYDGKIADVWSCGVTLYVMLVGAYPFEDPSDPKDFRKTIGRILKAQYAIPDYVRVSDECRHLLSRIFVANPEKRITIEEIKNHSWFLKNLPVEMYEGSLMMNGPSTQTVEEIVWIIEEARKPITVATGLAGAGGSGGSSNGAIGSSSMDLDDLDTDFDDIDTADLLSPL

SEQ ID NO: 38547 - DNA, 1279 bp, Arabidopsis thaliana
  misc_feature (1)..(1279): Ceres Seq. ID no. 13488872
  misc_feature (1)..(1279): Ortholog of  Ceres SEQ ID NO 13647847 as cited in SEQ ID NO 20430
  misc_feature (1)..(1279): Ortholog of  Ceres SEQ ID NO 15171696 as cited in SEQ ID NO 59997
gttttggtgtttcttcgtcgacgtcgctatctccaatctcattactcccctttctcaatgatcataaaacctacttcgattctactccttatcaactgaatcaccgaaaaacctcaccttttttctttttccgatcatggggaatctgatcagtttgatcttctgctgcgggagaaggcagaggagcaatattcctccggcgatggaaacggctcctcttgatctcccaccgaacagatttgtattcgccgccgtgccaccatatctgaaccctaaccctaactacgttgaccagtatccaggtaactgccttcctccgccagtaactgagccgccgatgctaccgtacaatttcaaccatttgcatcactatcctcccaacagttaccaactacctcatcctttgtttcacggcggtagataccctatactgccgcctcctacgtacgtcgaccagaaagccgtcacgattcgtaacgatgttaatctgaagaagaagactttaacgctcatacccgacccggagaatccgaatcgacttcttgtctccttcacatttgatgcatccatgcccggaaggatcacagttgttttctttgctacagaagatgcagaatgtaatcttagagctacaaaggaagatactttgcctccaatcacttttgatttcggagaaggacttggtcagaagttcatacaatcatctggaacgggtatagacttgacggcgtttaaagattccgagctattcaaggaggtggatacagatgtcttcccgttggcggttaaggcggaggcaactccagcggaagaaggaaagtctggttccaccaatgtgcagattactcaagtggtgtataccaaggagaaaggagagattaaaatagaagtggtgaagcagatactatgggtgaataagaggaggtatgagctgcttgagatttatgggattgagaacacggttgatggttccgatgagggaaaggaatgtgttgtatgcttgtctgaaccacgcgatacaactgttcttccttgcagacacatgtgtatgtgtagcgggtgcgcaaaggcgttaaggtttcagacaaatctgtgcccagtttgcagacaacctgttgagatgcttttggagattaacaagaacggatgaaatggagatggagaatgaacaaatttagttaagcaatcgacttgtgtaatatatgccatgcttaattaagacgtaaaacgttatggttcaatatattataagtggaaactgagttcttaaatagcaatg

SEQ ID NO: 38548 - protein, 337 aa, Arabidopsis thaliana
  peptide (1)..(337): Ceres Seq. ID no. 13488873
MGNLISLIFCCGRRQRSNIPPAMETAPLDLPPNRFVFAAVPPYLNPNPNYVDQYPGNCLPPPVTEPPMLPYNFNHLHHYPPNSYQLPHPLFHGGRYPILPPPTYVDQKAVTIRNDVNLKKKTLTLIPDPENPNRLLVSFTFDASMPGRITVVFFATEDAECNLRATKEDTLPPITFDFGEGLGQKFIQSSGTGIDLTAFKDSELFKEVDTDVFPLAVKAEATPAEEGKSGSTNVQITQVVYTKEKGEIKIEVVKQILWVNKRRYELLEIYGIENTVDGSDEGKECVVCLSEPRDTTVLPCRHMCMCSGCAKALRFQTNLCPVCRQPVEMLLEINKNG

SEQ ID NO: 38549 - protein, 315 aa, Arabidopsis thaliana
  peptide (1)..(315): Ceres Seq. ID no. 13488874
METAPLDLPPNRFVFAAVPPYLNPNPNYVDQYPGNCLPPPVTEPPMLPYNFNHLHHYPPNSYQLPHPLFHGGRYPILPPPTYVDQKAVTIRNDVNLKKKTLTLIPDPENPNRLLVSFTFDASMPGRITVVFFATEDAECNLRATKEDTLPPITFDFGEGLGQKFIQSSGTGIDLTAFKDSELFKEVDTDVFPLAVKAEATPAEEGKSGSTNVQITQVVYTKEKGEIKIEVVKQILWVNKRRYELLEIYGIENTVDGSDEGKECVVCLSEPRDTTVLPCRHMCMCSGCAKALRFQTNLCPVCRQPVEMLLEINKNG

SEQ ID NO: 38550 - protein, 270 aa, Arabidopsis thaliana
  peptide (1)..(270): Ceres Seq. ID no. 13488875
MLPYNFNHLHHYPPNSYQLPHPLFHGGRYPILPPPTYVDQKAVTIRNDVNLKKKTLTLIPDPENPNRLLVSFTFDASMPGRITVVFFATEDAECNLRATKEDTLPPITFDFGEGLGQKFIQSSGTGIDLTAFKDSELFKEVDTDVFPLAVKAEATPAEEGKSGSTNVQITQVVYTKEKGEIKIEVVKQILWVNKRRYELLEIYGIENTVDGSDEGKECVVCLSEPRDTTVLPCRHMCMCSGCAKALRFQTNLCPVCRQPVEMLLEINKNG

SEQ ID NO: 38551 - DNA, 1681 bp, Arabidopsis thaliana
  misc_feature (1)..(1681): Ceres Seq. ID no. 12328781
  misc_feature (1)..(1681): Ortholog of  Ceres SEQ ID NO 15170461 as cited in SEQ ID NO 52853
  misc_feature (1)..(1681): Ortholog of  Ceres SEQ ID NO 13595351 as cited in SEQ ID NO 55934
  misc_feature (1)..(1681): Ortholog of  Ceres SEQ ID NO 13639645 as cited in SEQ ID NO 57488
aatcaacacacacaaacacacacacacacagcctttttccttcgttgatcgattgttaagctcgatccaatggcggataacaccgataatcggagatccttatggggagttccggagaagcttcagcttcacatagcgatgctgacgttgcaattcggttacgccggattccacgtggtgtctcgagctgctcttaacatgggaatcagcaaactcgtcttccctgtttatcgtaacatcatcgccttgcttcttctccttcccttcgcttacttccttgaaaagaaggagagaccagcgattactctcaactttctcatccagttcttctttttggcactcataggaataacagcgaaccaaggattttacttgttgggactggacaacacttcaccaacatttgcttcctccatgcaaaactctgttcccgccattacctttctcatggctgctcttctcaggattgagaaagtaagaataaacagaagagacggtatctccaaaatcttaggaacagctctttgtgtcgccggagcttccgtcatcaccctctataaaggtccaaccatctacactccggctagccacctccacgctcatctactcaccacaaactccgccgtcttagcgccgctaggaaacgccgcgcctaaaaactggacccttggttgcatctacctaatcggtcactgtctctcgtggtcaggctggcttgttttccaagctccggttcttaagtcttatccagcgaggctctcggttacgtcttacacttgtttcttcggaatcattcagttcttgatcattgctgctttctgtgaaagagattctcaggcttgggtttttcactccggttgggagcttttcaccatcctctacgccggaatcgtagcgtctggaatcgcgtttgcggttcagatttggtgtattgacagagggggtccagtcttcgttgctgtttaccagcctgttcagactcttgtcgttgcgatcatggcttctattgcgttaggcgaagaattttatttgggcgggattattggagcggtcttgatcatagcgggactttacttcgtattgtacggtaagagcgaagagaggaaatttgcagcgcttgagaaggcagcgatccagtcctccgcggagcatggtattgaacgtgcacctgtttctcgcaactccatcaagtcgtccatcacaacaccactactccatcagtcaacggacaatgtttgactactttggacaaatcactctccagctaataattacaaatgccattacccaattaaaagggaacaatggtgtgccgttgtgttttatgacttttgtgtctgctttttttcttagtgttttctcttcttttttttttctaaaaaattattaattacctaagaaaggtttttgaagaaaggaaaaaaaatggtggatgagacatcattgttcatgaggatgatgatgatgatgatagtgatgaagaagactatgtgggagctttggattgagacttttctatatataatatctggctgatatattagtgccattttttcttacatttcttgtggggtttttctttcctttatcatcaatagaatgttataatttgcatttatgatctttagtaattatcactgtcggggatgtttaaaatggattagatcaaacgctttgttct

SEQ ID NO: 38552 - protein, 389 aa, Arabidopsis thaliana
  peptide (1)..(389): Ceres Seq. ID no. 12328782
MADNTDNRRSLWGVPEKLQLHIAMLTLQFGYAGFHVVSRAALNMGISKLVFPVYRNIIALLLLLPFAYFLEKKERPAITLNFLIQFFFLALIGITANQGFYLLGLDNTSPTFASSMQNSVPAITFLMAALLRIEKVRINRRDGISKILGTALCVAGASVITLYKGPTIYTPASHLHAHLLTTNSAVLAPLGNAAPKNWTLGCIYLIGHCLSWSGWLVFQAPVLKSYPARLSVTSYTCFFGIIQFLIIAAFCERDSQAWVFHSGWELFTILYAGIVASGIAFAVQIWCIDRGGPVFVAVYQPVQTLVVAIMASIALGEEFYLGGIIGAVLIIAGLYFVLYGKSEERKFAALEKAAIQSSAEHGIERAPVSRNSIKSSITTPLLHQSTDNV

SEQ ID NO: 38553 - protein, 366 aa, Arabidopsis thaliana
  peptide (1)..(366): Ceres Seq. ID no. 12328783
MLTLQFGYAGFHVVSRAALNMGISKLVFPVYRNIIALLLLLPFAYFLEKKERPAITLNFLIQFFFLALIGITANQGFYLLGLDNTSPTFASSMQNSVPAITFLMAALLRIEKVRINRRDGISKILGTALCVAGASVITLYKGPTIYTPASHLHAHLLTTNSAVLAPLGNAAPKNWTLGCIYLIGHCLSWSGWLVFQAPVLKSYPARLSVTSYTCFFGIIQFLIIAAFCERDSQAWVFHSGWELFTILYAGIVASGIAFAVQIWCIDRGGPVFVAVYQPVQTLVVAIMASIALGEEFYLGGIIGAVLIIAGLYFVLYGKSEERKFAALEKAAIQSSAEHGIERAPVSRNSIKSSITTPLLHQSTDNV

SEQ ID NO: 38554 - protein, 346 aa, Arabidopsis thaliana
  peptide (1)..(346): Ceres Seq. ID no. 12328784
MGISKLVFPVYRNIIALLLLLPFAYFLEKKERPAITLNFLIQFFFLALIGITANQGFYLLGLDNTSPTFASSMQNSVPAITFLMAALLRIEKVRINRRDGISKILGTALCVAGASVITLYKGPTIYTPASHLHAHLLTTNSAVLAPLGNAAPKNWTLGCIYLIGHCLSWSGWLVFQAPVLKSYPARLSVTSYTCFFGIIQFLIIAAFCERDSQAWVFHSGWELFTILYAGIVASGIAFAVQIWCIDRGGPVFVAVYQPVQTLVVAIMASIALGEEFYLGGIIGAVLIIAGLYFVLYGKSEERKFAALEKAAIQSSAEHGIERAPVSRNSIKSSITTPLLHQSTDNV

SEQ ID NO: 38555 - DNA, 1355 bp, Arabidopsis thaliana
  misc_feature (1)..(1355): Ceres Seq. ID no. 12579532
  misc_feature (1)..(1355): Ortholog of  Ceres SEQ ID NO 13664220 as cited in SEQ ID NO 61151
  misc_feature (1)..(1355): Ortholog of  Ceres SEQ ID NO 13597477 as cited in SEQ ID NO 65160
acataccaacagtcaacaatatctcttgttccggcggaaaaatgcccattaatcagaaaattccgacttggtttgccgttccggctgtttttgctgtcttgtccgtaatctcgtatcaaaccttaattgtgccggaaaatttagagggcgccaaaaatgtattgacaatggctaagaccataccaattcctgtcgctggaccgggagagcattgagtttgacccaaaaggagaaggtccttatgctgcggtcgtggacggccgtattctcaagtggcgcggcgatgatctcggctgggttgattttgcctacacatctcctcacagagggaactgttcaaaaactgaagtagtgcctacttgtggaaggccattaggacttactttcgagaagaaaacgggagatttgtacatatgtgatggttacttggggctcatgaaagttggaccagagggaggcttggccgagttaattgttgatgaagccgaaggtcgtaaagttatgtttgctaaccaaggggatatagacgaagaggaagatgtcttttacttcaatgatagtagtgacaagtatcatttcagggacgtatttttcgtggctgtcagtggggagcggtcgggaagagtgatcagatacgataagaagacgaaagaagccaaagttatcatggacaatctcgtttgtaacaacggtttggctctaaacaaagaccggtcttttctaattacatgcgagtccggcacaagtcttgtccaccgatactggattaaaggtcccaaagccgggactcgtgatatctttgcgaaggtcccaggttaccctgacaacatccggctgacatcaactggagacttttggattggtttacactgcaagaaaaatctgatagggagattgattgtgaagtacaaatggcttgggaaattggtagaaaagacaatgaaactggagtacgtgattgcttttattaacggatttaaaccgcacggagtcgtcgtgaaaatctccggcgagacgggagaggtacttgagttacttgaggacaaagaaggaaagacaatgaagtatgtaagcgaggcttatgaaagagatgatggaaagttgtggtttgggtctgtttactggccagccgtttgggttcttgatcgcaaatgagtgatcatgttgtatctacttataattatgttcgttttgtatattaataaatgtttatctgagttaaatcagcatttgtttgttgcgggaaaataaatgtgaatcctactttttcaaattgttttttttttctttgtattaatgctcccaagatgtttattgaactgaacacactagaatgaattatagcttttgtaacc

SEQ ID NO: 38556 - protein, 239 aa, Arabidopsis thaliana
  peptide (1)..(239): Ceres Seq. ID no. 12579533
MKVGPEGGLAELIVDEAEGRKVMFANQGDIDEEEDVFYFNDSSDKYHFRDVFFVAVSGERSGRVIRYDKKTKEAKVIMDNLVCNNGLALNKDRSFLITCESGTSLVHRYWIKGPKAGTRDIFAKVPGYPDNIRLTSTGDFWIGLHCKKNLIGRLIVKYKWLGKLVEKTMKLEYVIAFINGFKPHGVVVKISGETGEVLELLEDKEGKTMKYVSEAYERDDGKLWFGSVYWPAVWVLDRK

SEQ ID NO: 38557 - protein, 217 aa, Arabidopsis thaliana
  peptide (1)..(217): Ceres Seq. ID no. 12579534
MFANQGDIDEEEDVFYFNDSSDKYHFRDVFFVAVSGERSGRVIRYDKKTKEAKVIMDNLVCNNGLALNKDRSFLITCESGTSLVHRYWIKGPKAGTRDIFAKVPGYPDNIRLTSTGDFWIGLHCKKNLIGRLIVKYKWLGKLVEKTMKLEYVIAFINGFKPHGVVVKISGETGEVLELLEDKEGKTMKYVSEAYERDDGKLWFGSVYWPAVWVLDRK

SEQ ID NO: 38558 - protein, 162 aa, Arabidopsis thaliana
  peptide (1)..(162): Ceres Seq. ID no. 12579535
MDNLVCNNGLALNKDRSFLITCESGTSLVHRYWIKGPKAGTRDIFAKVPGYPDNIRLTSTGDFWIGLHCKKNLIGRLIVKYKWLGKLVEKTMKLEYVIAFINGFKPHGVVVKISGETGEVLELLEDKEGKTMKYVSEAYERDDGKLWFGSVYWPAVWVLDRK

SEQ ID NO: 38559 - DNA, 1879 bp, Arabidopsis thaliana; identical to SEQ ID NO: 28153
  misc_feature (1)..(1879): Ceres Seq. ID no. 13487772
  misc_feature (1)..(1879): Ortholog of  Ceres SEQ ID NO 14314404 as cited in SEQ ID NO 57421
  misc_feature (1)..(1879): Ortholog of  Ceres SEQ ID NO 13493536 as cited in SEQ ID NO 58515
  misc_feature (1)..(1879): Ortholog of  Ceres SEQ ID NO 12618461 as cited in SEQ ID NO 64349

SEQ ID NO: 38560 - protein, 561 aa, Arabidopsis thaliana; identical to SEQ ID NO: 28154
  peptide (1)..(561): Ceres Seq. ID no. 13487773

SEQ ID NO: 38561 - protein, 532 aa, Arabidopsis thaliana; identical to SEQ ID NO: 28155
  peptide (1)..(532): Ceres Seq. ID no. 13487774

SEQ ID NO: 38562 - protein, 394 aa, Arabidopsis thaliana; identical to SEQ ID NO: 28156
  peptide (1)..(394): Ceres Seq. ID no. 13487775
